United States Patent Application Publication US 2005/0228172 A9 - sequence listing, part 132

SEQ ID NO: 620409 - DNA, 566 bp, Homo sapiens
cctatttagaatacaaaagtatactaagttaaatttttaacctaaagccaagcctttgcagtaaaartgtttctctaatgctgtacaactgtcctgtaaaaagcatgaaaattattcaaattacctaccagctttgaatatatagccacatttacaaagttaaaaaaaaaagtcttttctcctactatattctcctgtgataaaaattgctttggtttcttgctagagcataagccttacctaaagccatccacagattatggtatcatccattttcctgtaagaaaagggattaggacagcagaaaatcaggaaaaaagaaagtaaaataaggctttcaccatggcagataagtcttggccttacaaacagatcttgggaaagctttccaagtctagagtgtcatctgcttctggggacaaactttcctagtcagctttacctcaagttctccaacaggtgtgcagttccaaaagtctggaggggcccttttgattgatgagatgttggacccaagatttgaggccctgaaattttactgcagtgtgtgtgatgagaacttggta

SEQ ID NO: 620410 - DNA, 566 bp, Homo sapiens
cctatttagaatacaaaagtatactaagttaaatttttaacctaaagccaagcctttgcagtaaaagtgtttctctaatgctgtacaactgtcctgtaaaaagcatgaaaattattcaaattacctaccagctttgaatatatagccacatttacaaagttaaaaaaaaaagtcttttctcctactatattctcctgtgataaaaattgctttggtttcttgctagagcataagccttacctaaagccatccacagattatggtatcatcmattttcctgtaagaaaagggattaggacagcagaaaatcaggaaaaaagaaagtaaaataaggctttcaccatggcagataagtcttggccttacaaacagatcttgggaaagctttccaagtctagagtgtcatctgcttctggggacaaactttcctagtcagctttacctcaagttctccaacaggtgtgcagttccaaaagtctggaggggcccttttgattgatgagatgttggacccaagatttgaggccctgaaattttactgcagtgtgtgtgatgagaacttggta

SEQ ID NO: 620411 - DNA, 566 bp, Homo sapiens
cctatttagaatacaaaagtatactaagttaaatttttaacctaaagccaagcctttgcagtaaaagtgtttctctaatgctgtacaactgtcctgtaaaaagcatgaaaattattcaaattacctaccagctttgaatatatagccacatttacaaagttaaaaaaaaaagtcttttctcctactatattctcctgtgataaaaattgctttggtttcttgctagagcataagccttacctaaagccatccacagattatggtatcatccattttcctgtaagaaaagggattaggacagcagaaaatcaggaaaaaagaaagtaaaataaggctttcaccatggcagataagtcttggccttacaaacagatcttgggaaagctttccaagtctagagtgtcatctgcttctggggacaaactttcctagtcagctttacctcmagttctccaacaggtgtgcagttccaaaagtctggaggggcccttttgattgatgagatgttggacccaagatttgaggccctgaaattttactgcagtgtgtgtgatgagaacttggta

SEQ ID NO: 620412 - DNA, 609 bp, Homo sapiens
ttcatggcaaaattggaaggtagagagatttgccatatactcctcctcctccccctgccgtatgcatatcctcctccattaccaacatcttccaccagaggggtgcatctgttacaaaatgatgaacctacagtgacacatcattaccacccagagtctacagtttacactmgggttccctcttggtggtgtacactccatgggtttggacaaatgtatagtggcatatatccaccaatacagtatcatacaggaagttgcgctgctctgaaaatcccctgtgttcttcctattcatccctccctgactccaaccctggtaatcactgatcttttccctgtctccatagttttgtcttttccaagaggtcatagagttggaatcatatgggatgtagcgtctttcaatgagtaataatgtatttacgttttcttcatgtcttttcacagcttgatagctcttttcttttttgtactgaaaaatattccattgtctgcatgtacctgtttatctttcagggttaacacaagtctcttaacatttaaaattttattttgttgtcagttattgttcattgaatacttattaaaaacagaaagataatgtatg

SEQ ID NO: 620413 - DNA, 570 bp, Homo sapiens
gttctctgatttcaatggggatgatgagatccccaaatgactgaggctggagagcagggattaatcactggagaaaagatgaatttgtttatgtaaatgggcagcagcctcagagaagtatcagaatgatatgacctacaaagatcttggcgttagctaactgttcaaatatcccataggctaaaataggtgggtagactactaatgtttcatttgatatgtaaaagaaaaataattactcgctttcaggtgaaggtacttgacttaaactaaccgtaatttaaaatcccagctcctaaccaaattctcagacctgcttcaatttgtagactcaggaccctgttaatggaggaaaaaacagaatgagttttctcyagaaaggacattgagacaatgctctaagtatgcaactgaaccttcctcctgcagccacctaacagggaaaatttttactggtgtaaggaaaatatacagatttgtggaaattactagacactggctctacactgacactagttcctgagacctaagatgccactgtggtccatcagtcagaatggtagcttatgg

SEQ ID NO: 620414 - DNA, 614 bp, Homo sapiens
aaaaataaatcaaatatccagatgtttaatttgcttgaaactttgcaatttctggctgtttggtcttatgtagagtcacagattaaacatctggataaattgtgcactgtttgtcttttcatgcaagtaatttggtgtcatgccagagatgtgggaatgctataaacatcatctttctcttccacagggtgaacaatcacaacacaatttcaaaggagggaagttttcccttaaataactatgctgtattatagtggtcttaaagtgcagtcccagaccagtgccatcaacatcacctggaaatttgtaaaaaaaawgcacatttcaagtctcattctagattggctgaatcagaaactgtgggggtagggaccagtcatctgtgttttaacaagctcgctaggtgaatcaaacgcatcctaaattataaggaccactgctgtaattaaaaagtctaacctgaaggatctgcttctcatcttcagattaattgtttttacagctctctgaactgagataaataattcacttatttccacttttacatctccagatatagacatagagagtttttagccattttaaacctctataataatagcaatataataaag

SEQ ID NO: 620415 - DNA, 614 bp, Homo sapiens
aaaaataaatcaaatatccagatgtttaatttgcttgaaactttgcaatttctggctgtttggtcttatgtagagtcacagattaaacatctggataaattgtgcactgtttgtcttttcatgcaagtaatttggtgtcatgccagagatgtgggaatgctataaacatcatctttctcttccacagggtgaacaatcacaacacaatttcaaaggagggaagttttcccttaaataactatgctgtattatagtggtcttaaagtgcagtcccagaccagtgccatcaacatcacctggaaatttgtaaaaaaaaagcacatttcaagtctcattctagattggctgaatcagaaactgtgggggtagggaccagtcatctgtgttttaacaagctygctaggtgaatcaaacgcatcctaaattataaggaccactgctgtaattaaaaagtctaacctgaaggatctgcttctcatcttcagattaattgtttttacagctctctgaactgagataaataattcacttatttccacttttacatctccagatatagacatagagagtttttagccattttaaacctctataataatagcaatataataaag

SEQ ID NO: 620416 - DNA, 542 bp, Homo sapiens
ggatgttttatgctataactcagagcactggggtttcagttacacactgctccatgggcttgagaagactcagagttcatcagggaggaaaaccctggactgagtcagarctactcttgtggtcctgatcctgatcctcaccaaaacaatgcttccagttagactgttttcatgaaacatacggttttcatgaaacaggatgttgtgggctgaaaagcttcttgtgaaatccgtgaagctctcagtagtcaataaaaaagctcataaacacttgtgatgttcatcagagaaattaattttgatttaattgtaatctaacaccaaaaaaatggtcccagtaattgaatatgtaaaatacttggcattcatgtcctgtgatttacatcgctgtgttcagttagatcacgagcacataatgtacttgtgtggaaagaggaagaagactttcaatgagttatgatctaagattatactctattttttatgaaggaagctttaatttgataattgtgcattttgttttggctgtatcatttttgaag

SEQ ID NO: 620417 - DNA, 589 bp, Homo sapiens
attcaggcaacaactagcaaaatgaataaaacagtacctcacatcttactactaatgtgaatttaaatagtctaagtgctccacttaaaaatacatgatggcagaatggataaaaatccaccaaccaagtatctgctgtcttcaagagattcacctaaggcgtaagaactcacataaactcaaggtaaaggcatgaaaaaggtattctatgataagtgagcaggagtasctattcttatatcagacaaaacagactttaaagcaacaacagttaaaaaagacaaagaggaaaattatataataaaaggccttgtccaacaggaaaaatcacaatcctaaatatatatatatatttatatacatgtgtgatatatatatacacacacacatatatatatatatatatatatatatacacctaacatgggagatcccaaaatcataatgcaattactactagccataagaaataagatagatggcaatacaataatagtgggggacttcaatattctactgacagcactaggcaggtcatcaagacagaaagtcaacaaagaaacaatggactcaaactgtgccctagaac

SEQ ID NO: 620418 - DNA, 578 bp, Homo sapiens
aacacacgtgaggaaacagtacgcttctcgggaggcagcacggggtagtggggaaggaatctgggctttggagaagccttcctgagcttgattcccaactttgctgctgacttacaagctgtatggtcttggccaagctactcaatctctctgttacatagtttgctgacctacagtatacgtagattggcaatggccacaaatatcttgtagctcttttctttgagaggtggagcctatttccccaacccttgaatctggactgccttgtggctgattttgcccaatagaataaagcaggggtattgtatgagtcccaagtctaggctctgataaatttagaagcttccactccttctgttggaattctgccmccatgtgaacagcccaggctggcctacaaggatgagaggctatgcgaggaagggatgagtggttccagctgagggtccctaatacagtagcctgccaaccactagacttgtgaaggcactgtaggttgacttgtgaggtcaaccagtccccaacaactcaccaggagacggaaagccagaggatcagaaggactgcccagctga

SEQ ID NO: 620419 - DNA, 504 bp, Homo sapiens
ggactgcccagctgaccaacagaactgtgagtaataacttttttaattgatttaagctgaacagtaaacacacttgatagcagtagtgtaagcatgcccttagamtgaccctatggcagatgcacctgagtgtgtgttttgagttagggagtccaggcatgcccaacccagagattcattccttatctatgagaagcatctgagaccccggtcagtcccgttaaatacaggctctacagaggatttgaggccctgagttttgggttaaacgaagattaccaggtggaggttgttaaagggaggctgttaagtcaaaatgctagagaaactgcaggctgttagcaagtggtggtggttatcttgcccagcccactaccacagggctctgcagttatgttgtccagcccgccaccactaggccgtttctgtatgtaaggcagttatcctgcccagcccaccaccactggactctctcccctgtatgtaagcccctaataaaacccc

SEQ ID NO: 620420 - DNA, 627 bp, Homo sapiens
tacttttccttttttagaattggcaaggagcttatgaattatttaatatagacttcaagagaaggaatattgccagagataaagagggacttttcgtagtgataaaaagggccaattcatcagaagacataacattcctaattgcacaggcacctagtaacagagtttcaaaaaataagaagcaaaaattgaccacactaaaggtagaagcagacagatctgtcatagggaatcttattatcttgctctcagtaattggtagcacaaaggatctctgataggccaaggatctggaagatctgaacagcgctatggacccacttggcccagctgacacttacagaccctccactcagtgacagcaggacacatccatttcccaygcaaatggaacattcaacaaggtagaccatgtgctggaccacaaaataaatctcaaatttccaaaggttaaaatcatatacagtatgttcccaaaccaaaatggaattacactttaaattaaaaaatatctagaaaatcccccagatatttgggaatcaagcaatacaattttaaacaatccatttgtctaagaagaaatcacaagggaaatcaaaaagtatcccaaactgaataatagtgttc

SEQ ID NO: 620421 - DNA, 473 bp, Homo sapiens
agaaacaaaaaccaaacccaaacccagcagaagaaaagaaacaactaagatcagagcagaactaaatgaaattaaaacaaacagatttcaggatcgtggcagatgggaggcaggwctagattgcagctccggacagagcagcatgcggaggcttgcactgaattttagctccagattgactgcaagaacaaaccagcaatcctgagaggacccacagaccttctgaagaaagcagactgctcctgcaggacccatggagacactgcaaatactgagagtgccccaactgtggaagtgggaaagggagaccctcctctcccaaacacaactcctcaactggagaagccgaagatctgttggcaggagaagtttccaactttacctggagctaaatcaagttagagaaccgagccaagtgaaatacaggggtagaggaagccacagaaaggccctgggagcttgctgggtcccca

SEQ ID NO: 620422 - DNA, 504 bp, Homo sapiens
acaacattcatgaaggtggtttgagagtaaaaaggggtacagtgcaagaatgttayggtcagctgtagcagatgctttttgtgtcctacaccacatctcttagaccacttgtcattttaactgcccatggtagcagtttccagatatgctgtcagcttctcacttcaagcctccaaagctgtagaagcaagaagtcaaagggagctaataatgttccttgttcaattcttgaccaattggagggaagagttggtagatgaatgccctgggctcccaccttttgtggaacaattttgaggcactttctacagggtcctcagaggtccccaggagcaatgatctccagttgcccacagtgttaatcagctcaattatacactcattattgatttttccatcttccctatctctgttccctcactgctgtttcccaggagcagctccaacataaactgcctgcactcaagtccttgtctcaggctccattttgggcagaacctaaac

SEQ ID NO: 620423 - DNA, 600 bp, Homo sapiens
gcacaaatcacacaggaactataaacaaaaatacaaattaaaaagcaaaaacaaaaaaacccaaagtacacaggcaataaagagcatgaygaatgcaacagtacctcacatttcaatactaacattgaatgtaaatggcctaaatacagaacctcagaatggataagaactcaccaacaaactgtctgctgccttcaggagactcacctaacacataaggactcacataaacttaaagtaaaggcgtggaaaaaggcaattcatgcaaatggacaacaagagcaagcaggggtaactattcttagacaaaacaaactaaagcaacagcagttaaaagagacaaagagggacattacataacggtaaaaggccttgtccaacaggaaaatatcacaatcctaaacatatatacgtacctaacactggagatcccaaatttataaaacaattactaatagacctaagaaatgagatagcaacacaatggtagtgggggatttcaatactccactgacagctctagacaggtcatcaagacagaaagtcaacgagaaacaatggatttaaactataccttggaacaaatgaacttaacagata

SEQ ID NO: 620424 - DNA, 600 bp, Homo sapiens
gcacaaatcacacaggaactataaacaaaaatacaaattaaaaagcaaaaacaaaaaaacccaaagtacacaggcaataaagagcatgacgaatgcaacagtacctcacatttcaatactaacattgaatgtaaatggcctaaatacagaacctcagaatggataagaactcaccaacaaactgtctgctgccttcaggagactcacctaacacataaggactcacataaacttaaagtaaaggcgtggaaaaaggcaattcatgcaaatggacaacaagagcaagcaggggtaactattcttagacaaaacaaactaaagcaacagcagttaaaagagacaaagagggacattacataacggtaaaaggccttgtccaacaggaaaatatcacaatcctaaacatatatacgtacctaacactggagatcccaaatttataaaacaattactaatagacctaagaaatgagayagcaacacaatggtagtgggggatttcaatactccactgacagctctagacaggtcatcaagacagaaagtcaacgagaaacaatggatttaaactataccttggaacaaatgaacttaacagata

SEQ ID NO: 620425 - DNA, 570 bp, Homo sapiens
ccccatcaaaataccaccatcattcttcacagagttagaaaaaacaattcaaaattcatatggaactaaaaaagagcccacgtagccaaagcaagactaagcaaaataaacaaatttggagacatcacactacctgatttcaaactatactataaggccatagtcaccaaaacagcatggtactggtataaaaataggcacatagaccaatggaacagaayagagaacccagaaataaacccaaatacttacagccaactgatcttcaacaaagcaaacaaaaacaaagtggagaaaggacatccttttcaacaaatggtgctgggataattggcaagccacatgtagaagaatgaaactggatcctcatctctcaccttatacaaaaatcaacttaagatagattaaggacttaaacctaagacctgaaactatgaaaactctagaagataacattggaaaaacctttctagacattggcttatgcaaggatttcatgaccaagaacccaaaagcatatgcaataaaaacaaagaaataggagctaattaaaaagtttttgtacagcaa

SEQ ID NO: 620426 - DNA, 393 bp, Homo sapiens
atttcctatgcctgtctttactctcttaatcctgtcatctcgtaaactgaggaggatgtatgtcacctcaggaccctgtgatgattgcgttaactscacaaattgtagagcatgtgtgtttgaacaacatgaaatcttggcaccttgaaaaaagaacaggataacagcaatgttcagggaacaagagagataaccttaaactctgaccaccactgagccagacggaacagagccatatttctcttatttcaaaagcaaatgggagaaatatcgctgaattctttttctcagcaaggaacatccctgagaaagagaatgtgcccctgagggtaggcctctaaaatggcccccttgggtgtggccgtcttctatggtcgaaactgtagggatgaa

SEQ ID NO: 620427 - DNA, 393 bp, Homo sapiens
atttcctatgcctgtctttactctcttaatcctgtcatctcgtaaactgaggaggatgtatgtcacctcaggaccctgtgatgattgcgttaactccacaaattgtagagcatgtgtgtttgaacaayatgaaatcttggcaccttgaaaaaagaacaggataacagcaatgttcagggaacaagagagataaccttaaactctgaccaccactgagccagacggaacagagccatatttctcttatttcaaaagcaaatgggagaaatatcgctgaattctttttctcagcaaggaacatccctgagaaagagaatgtgcccctgagggtaggcctctaaaatggcccccttgggtgtggccgtcttctatggtcgaaactgtagggatgaa

SEQ ID NO: 620428 - DNA, 393 bp, Homo sapiens
atttcctatgcctgtctttactctcttaatcctgtcatctcgtaaactgaggaggatgtatgtcacctcaggaccctgtgatgattgcgttaactccacaaattgtagagcatgtgtgtttgaacaacatgaaatctkggcaccttgaaaaaagaacaggataacagcaatgttcagggaacaagagagataaccttaaactctgaccaccactgagccagacggaacagagccatatttctcttatttcaaaagcaaatgggagaaatatcgctgaattctttttctcagcaaggaacatccctgagaaagagaatgtgcccctgagggtaggcctctaaaatggcccccttgggtgtggccgtcttctatggtcgaaactgtagggatgaa

SEQ ID NO: 620429 - DNA, 572 bp, Homo sapiens
gctgctttctgcttggctctttggaatcactctgtacgyggaaatctcaggagacagccaatgacctaagaggcattttagagcttctctcattgcagctaagtcttttccagaattttgttcctcaatcctttcctgctctggcagactcagacttcatccattgtctccttggcccagtcagattacagctttctgcttggcgaaggcctagtgcttattgaactgcaatgtgcccgcccttagggggaaagctgaggtgagtatctaagcatggaactcattccaagtatttcctttcattcagggattgtgcttccttcagttcctgcctgttttggctgccctccagggccttcacatctgtatctcagcctccacatccatgagttttacattcacagattcaaccaagcacaaattgaaaatattcagaaaaataaaaaataacaatacaacattaaaaacaatataaatttaaaacacaggataactatctacatagatttgcattgtattatgtattataagtaatctgagatgatttaaagtatacgggaggatgtgcgtag

SEQ ID NO: 620430 - DNA, 514 bp, Homo sapiens
gctgggattacaggtgtgagctaccatgtccagcctgaaattatttctttcaagttaatcaaagttttacagctgcaaaattctgcaaacttctcttgttctcaacctctccacattactggaaaaatcataatgtgctccttcaaagtattttttccaggttattgtaataattatctattatgatttttccatgcctagggtcataatataatattattctgcttgttcatttcattcctagaactcctatgtattttcttctttatttttgtttcattttctcaaactttcctgatctgaacatataaatagccagcatcayataggtaagaatttcagatttgtaagtaaatttgctttttgagatccaatgaatattttcatgtgactaatgaacactcgccctatctcataatgcaatacattttaaacaaaatcacttttccgccactccccaatctttattccaaactcccaaacttttacacttcgtttcatatgttttaaaata

SEQ ID NO: 620431 - DNA, 350 bp, Homo sapiens
tcttttctttgtaaattgcccagtttcagatagttctttaaagcaatgtgagaacaaactaatacagggagttttcttaatatttatagttataaatgtacttagatatttaaagtttttcttgaattattttttcatttaccttctcaggtaattaattaraacaaaatagtcaaatttacttagttgcatttgtagaaaagtatcactctcaagtatttaatttacttgataaatgtgatcatatgtcttgtctttctctcataaactttgattatttctggacttttcttcattaatttttatctattcattttatacccagtagtctttttttttttttttttttt

SEQ ID NO: 620432 - DNA, 522 bp, Homo sapiens
cgtgaccattcttcccagagtttcattgctccgaactctccttcacagactgaggtcagcctgcccctatgttgtttaccctgagttcctccttggagaaaaggctttttagaaccgaaataatcattttagtttttcctttcccctgccaggcacgagtatactgagtgatggattaacagaatattactatttttcacctagccaccatgsccttggcctcccagaataaccagaaatacctattgtttatctctacatccacttcatatattaaacagccctacaagtgtcacctgtgctgaggattagactcttccagaagataggacaggttctggttccagcagccccagaatgtcttccttctctctctttcagcccacaccacccttcctgtaaacactacacctgggagcaaagggtgttcagggggataaagcccaggtgacatccttgtcagacagcaagtgccacaagtttcatcacaaaagttgagtcaacaggtgggtgagggaagag

SEQ ID NO: 620433 - DNA, 522 bp, Homo sapiens
cgtgaccattcttcccagagtttcattgctccgaactctccttcacagactgaggtcagcctgcccctatgttgtttaccctgagttcctccttggagaaaaggctttttagaaccgaaataatcattttagtttttcctttcccctgccaggcacgagtatactgagtgatggattaacagaatattactatttttcacctagccaccatgcccttggcctcccagaataaccagaaatacctattgtttakctctacatccacttcatatattaaacagccctacaagtgtcacctgtgctgaggattagactcttccagaagataggacaggttctggttccagcagccccagaatgtcttccttctctctctttcagcccacaccacccttcctgtaaacactacacctgggagcaaagggtgttcagggggataaagcccaggtgacatccttgtcagacagcaagtgccacaagtttcatcacaaaagttgagtcaacaggtgggtgagggaagag

SEQ ID NO: 620434 - DNA, 559 bp, Homo sapiens
cttagatatcttaagagaacccttggacagaatttactttacagaatttgaaaaaatttgaaagtttttactgagtttttcctgaccttctctattcttgcatgttgggtaggggctgtgggtgaagataactggtcttttaatatcataattttctggaacaggaagagttacataggacctgattgagaagattgtatatcttgaacgggtgaaaatgaagctcttttgtgggtgctataaagcatattagcagagtactgtttcccaaactttaacatctgtagttgtgcattgtcgcaatgcacatgtctcataattagtttgtattttgctttatcaaaactgataagaactgatgaaaaaattagactggccttaggttaaaaatgaccatgaaataagagcatcgatatgcaagttataaattattttaatatagattaaaataygtatcataacagcaattaaacatgttattatttatcaactaagaatagtcttagttgtttatagcaacactaccaacagtagccaagatatggaatcaaataaagac

SEQ ID NO: 620435 - DNA, 617 bp, Homo sapiens
aaaaaaatccactttttgtttcattaatcttttgtaaagctttttagtttttattttatttatttctgctctatctttattttttggggggtttggtttgttcttgcttactagttctttggtatgcatattaagttcttcatttaaagcttttttttttctttttttgatgtaggcatttattgctaaaaaaaaaacccctttcctcttactattgcttttgctatgttttacaggttttggtatcttgtatttctatttttatttgtttcaaaaaatttttaatttttaaattwaaatttttttttcatttcttcattgacccattgatcattcaggagcatattgtttaatttccatatatttgcaaaaattctaaagtttttcttattatttattgatttctagttttattttattgttgtaagaaaatatccttgatatggttttgatttttaaaatttgttgagatttgtttgtggtataacatgtggtctgtaatattttatgtgctgatgagacaaatgtgtctattcggcagttattggataaaatattcaacttttatgtcttacaaaagtacagtgtgtgcgtgctcatgcatgtgtgtgtggaga

SEQ ID NO: 620436 - DNA, 617 bp, Homo sapiens
aaaaaaatccactttttgtttcattaatcttttgtaaagctttttagtttttattttatttatttctgctctatctttattttttggggggtttggtttgttcttgcttactagttctttggtatgcatattaagttcttcatttaaagcttttttttttctttttttgatgtaggcatttattgctaaaaaaaaaacccctttcctcttactattgcttttgctatgttttacaggttttggtatcttgtatttctatttttatttgtttcaaaaaatttttaatttttaaatttaaatttttttttcatttcttcattgacccattgatcattcaggagcatattgtttaatttccatatatttgcaaaaattctaaagtttttcttattatttattgatttctagttttattttattgttgtaagaaaatatccttgatatggttttgatttttaaaattygttgagatttgtttgtggtataacatgtggtctgtaatattttatgtgctgatgagacaaatgtgtctattcggcagttattggataaaatattcaacttttatgtcttacaaaagtacagtgtgtgcgtgctcatgcatgtgtgtgtggaga

SEQ ID NO: 620437 - DNA, 617 bp, Homo sapiens
aaaaaaatccactttttgtttcattaatcttttgtaaagctttttagtttttattttatttatttctgctctatctttattttttggggggtttggtttgttcttgcttactagttctttggtatgcatattaagttcttcatttaaagcttttttttttctttttttgatgtaggcatttattgctaaaaaaaaaacccctttcctcttactattgcttttgctatgttttacaggttttggtatcttgtatttctatttttatttgtttcaaaaaatttttaatttttaaatttaaatttttttttcatttcttcattgacccattgatcattcaggagcatattgtttaatttccatatatttgcaaaaattctaaagtttttcttattatttattgatttctagttttattttattgttgtaagaaaatatccttgatatggttttgatttttaaaatttgttgagatttgtttgtggtataacatgtggtctgtaatattttatgtgctgatgwgacaaatgtgtctattcggcagttattggataaaatattcaacttttatgtcttacaaaagtacagtgtgtgcgtgctcatgcatgtgtgtgtggaga

SEQ ID NO: 620438 - DNA, 617 bp, Homo sapiens
aaaaaaatccactttttgtttcattaatcttttgtaaagctttttagtttttattttatttatttctgctctatctttattttttggggggtttggtttgttcttgcttactagttctttggtatgcatattaagttcttcatttaaagcttttttttttctttttttgatgtaggcatttattgctaaaaaaaaaacccctttcctcttactattgcttttgctatgttttacaggttttggtatcttgtatttctatttttatttgtttcaaaaaatttttaatttttaaatttaaatttttttttcatttcttcattgacccattgatcattcaggagcatattgtttaatttccatatatttgcaaaaattctaaagtttttcttattatttattgatttctagttttattttattgttgtaagaaaatatccttgatatggttttgatttttaaaatttgttgagatttgtttgtggtataacatgtggtctgtaatattttatgtgctgatgagacaaatgtgtctattcrgcagttattggataaaatattcaacttttatgtcttacaaaagtacagtgtgtgcgtgctcatgcatgtgtgtgtggaga

SEQ ID NO: 620439 - DNA, 475 bp, Homo sapiens
agactgtttctttcacataggtgggaaccatggaagtgagaactgtaaaacccaccctcacccctctccctgtagtatcaacatgtttcaagtcaaattaaacaagatagagttatcaacagtgtattcatatatatatgcatatatttttatattgatggaaaaataggttgctcttgtatgtaactgggagacaaagcaagttgttctgcagtagcataaaagagattctttttcttaggatgcaaaatgaaataataaaaaaattacatgccattggtataactcaagaaattgtgatatttttgatcacggcatttttacttgattgcattatttaaaattacaaagcctatatgaaaaatatttgccctaaatgttgtattgccctaagggttttyttgtttaattagtaggtaaaatctaccatcatatccaaatataagtgcctctagcacctaaccaattaaccaag

SEQ ID NO: 620440 - DNA, 405 bp, Homo sapiens
acttccttttcttagctccacctggacagtggcagtatggcagcctcagaaagggaatcttttgctgtcacagatcatcacaggcaggccacaggttaaggagaaagaagctccctgtgcatccatggaaggctttggtgagaagatgcaagtggagctgtggaacgaggtgagccaattatccttatcctctcatgctcctgatgaatcctgaagctgttacttgctcttgggtggacactttggctggcagggtggggaaggtgtcacaggaggatatttctgctggcactgctgaggtgggcagggctgtggacactttggtgatgggcagggctcagggcacttcgggggtggacatggctctgggcactttggcgyggggcacacaggaggtggctggca

SEQ ID NO: 620441 - DNA, 317 bp, Homo sapiens
  misc_feature 200: n = A,T,C or G
ggttttggggatgcatggttcctggggtggaggctggcaaggttgtttcacctgctgctgctgaggctgagggggtggggtgcaaggctgcttctgctgctgagaattcatgcttcaaatgtgtttttttctagagacagaaagctgacacagtgattcaattaaagaaagatggatacaaattcatgccaaacagattntatttcaggaccctttaagaaaagaaagcctttcatctcccttarctcccccattacatttaaaaatgaaataagcttggataattttcaggccctttgaagaggaggagctaaaag

SEQ ID NO: 620442 - DNA, 399 bp, Homo sapiens
tgaatcctgaagctgttacttgctcttcggtggatactttggctggcagggtggggaaggtgtcacaggaggatatttctgctggcactgctgaggtgggcagggctgtggacactttggtggtgggcagggctcagggcacttcgggggtggacatggctctgggcactttggcgtggggcacacaggaggtggctggcagggctgcttgcactgctgctgttgataagacatcctgctggagtctcaggatctgaaagaaatgatayaacagtgttcgtgggaagggaatcctccagagagagaagccaaagcttatgtaataccatggcatattatttctccaatctccaaaaatttatttaaactcttagctctcttttcatgacttcctgtctt

SEQ ID NO: 620443 - DNA, 399 bp, Homo sapiens
tgaatcctgaagctgttacttgctcttcggtggatactttggctggcagggtggggaaggtgtcacaggaggatatttctgctggcactgctgaggtgggcagggctgtggacactttggtggtgggcagggctcagggcacttcgggggtggacatggctctgggcactttggcgtggggcacacaggaggtggctggcagggctgcttgcactgctgctgttgataagacatcctgctggagtctcaggatctgaaagaaatgatacracagtgttcgtgggaagggaatcctccagagagagaagccaaagcttatgtaataccatggcatattatttctccaatctccaaaaatttatttaaactcttagctctcttttcatgacttcctgtctt

SEQ ID NO: 620444 - DNA, 399 bp, Homo sapiens
tgaatcctgaagctgttacttgctcttcggtggatactttggctggcagggtggggaaggtgtcacaggaggatatttctgctggcactgctgaggtgggcagggctgtggacactttggtggtgggcagggctcagggcacttcgggggtggacatggctctgggcactttggcgtggggcacacaggaggtggctggcagggctgcttgcactgctgctgttgataagacatcctgctggagtctcaggatctgaaagaaatgatacaacagtgttcgtgggaagggamtcctccagagagagaagccaaagcttatgtaataccatggcatattatttctccaatctccaaaaatttatttaaactcttagctctcttttcatgacttcctgtctt

SEQ ID NO: 620445 - DNA, 590 bp, Homo sapiens
aaacaatacaacttactattttaaagttctgtaggttacaagtccaaagcaggcctcactgggctaagatcaaagtgttggcagggctgtgttcctttctgaagactccaaaaaataatccatttcctcactttatttagtttctagagaccacacacattccttggctcatggccccctcctctatcttcaaaaacattgcatttctcttaccattctcctgggggcacatctctttttgatttcaacttcagtgggaaaaggttctccccttttatggattcatatgattaggttgggttcacaatggaataatacaggattatctccccatctcaaggcccctaaccttaatcacatgtgcaaagtccgttttagtaagtcgyggtaaattatttggtaaggtaaggtaacacatttaaaggttctggggattaggacatggatatctttgtggacctttgttctgtctaccacaaatgtagaggtggaaatggacaaaagaggacataaagtattcacctgcttttgagaagcagcctgagtgcttctggcagctccacctgcctactaaattaagactcccaatc

SEQ ID NO: 620446 - DNA, 415 bp, Homo sapiens
attgaatcatgtttaagtatgaacaaattaaaatgaagagaggtgatggacaaaggctaggaaaaagaggctggctttagacacctaaaatctacagatttcagaagatttttkggttgtgaccagacagctaaacagtctgtgagtactttggcaagaacataaatggcgtaagaactgctgtgtccatatttttgaaagctgactctaagtcaggagaaataactatcttctgtgaacccgggagaagagacgtatccttgacattagctgaggtcagtatggccagtcaattcttttctctgccaaaaaaaaaaaaaaaaaaaaaagcccagaaagtaaggaaaacaagagggcaggagcctcatagatgaggaaaatcatatctttaaaacacagtttcttgttgataaat

SEQ ID NO: 620447 - DNA, 625 bp, Homo sapiens
tccctgtatcagccatcagaggtacaagtgacatgaaagtttaactggaatctttttttttccttatgtctcaatgcatactttgcacttttaattcagtattgtgtcaagttcatacatctaattcatggaaactacttataaaatatgaagacacattagcaactaagatttggttaatacacatttcaaatgttgttggatttctttggagtacaacaatacctaaatgttgcattatttaaccaatgttggggtgtgggtttgtgcacatagggttcccagcaggtaatttatctagtgatcatgtcctgatgaacacaagggccctattrcaggcaaatcaaaagaggtaggactatgtcccaagtgttgcttctcttaccccaaggttgcccaatgcaatagttttcattctggtacatgcaaacatgtttcctctaaggtgcaatgccagaaacctagaggaaaatgtgtcttggttttatctgagaaaactggcaacaattcctttggaattgattccttttctttttattattttaaagagagaatagatggttattataccacttacgcagctaacagtttgtaggtcaagatgacctagagccaagaatgtgat

SEQ ID NO: 620448 - DNA, 580 bp, Homo sapiens
agaataaattggatggccccctctctattcccttttttaatccccctaattatttattctgcaacttctcccccaacaagtatgtaagccacattagggccgggatttttgtttaatgtggcatccccagtgctggtatgtactctgtattaaaaatatattaatgaatgagtgaatgaatgaatgaatttcatctgaagaatgagccttccagacgaattccttgttaaaataagccagcacattgtctataaagcagcttccttgattaaggggcaaggtctcagkttaacgtgagataagagtttctgatttcagcatccagccaaatgatactgttctttggaacgcactctcttcttccctccactagtttttcttccctagcatttgttttggatctgtagttacagcattttctgctcagaattcaactgagggaaaaaaaaatgtgttttgagtaatactcactaaggtgaaaatctgaccatattttgagaaataaggggtttggaggctcaggacagaccatcccactgctgtcttagggacattgggctgctggagcctggcccaaaga

SEQ ID NO: 620449 - DNA, 548 bp, Homo sapiens
aatgtgatattcattatgatacagcatgaaaaagagaaagttctgtttgtaaaggatttttttatgaagtcacaggcccaagggagatgagtacagaaagctatttagggtaccaagaataaattggatggccccctctctattcccttttttaatccccctaattatttattctgcaacttctcccccaacaagtatgtaagccacattagggccgggatttttgtttaatgtggcatccccagtgctggtatgtactctgtattaaaaatatattaatgaatgagtgaatgaatgaatgaatttcatctgaagaatgagccttccagacgaattccttgttaaaataagccagcacattgtctataaagcagcttccttgattaaggggcaaggtctcaggttaacgtgagataagagtttctgatttcagcatccagccaaatgatactgttctttggaaygcactctcttcttccctccactagtttttcttccctagcatttgttttggatctgtagttacagcattttctgctcagaattca

SEQ ID NO: 620450 - DNA, 600 bp, Homo sapiens
aggattgccagacaaatgcaaactttttttatcctgcagaagtttcctgtcctgcattcttgccttcttatcatcctcagatgagaggagcttaatacatcagaaaagtcaggatacagtaggctatgtttcagtaacaaataaaccccaaagagcgaattgtttaacacactaagtttattctacactcaaagtccaaaatgaatcagatggccctcttccatcttatagcctgcaaggttgctgtgtcaagaaagagagagctaaaagtttccatgaggcgtgtctataagggccaggtttagaagtgccttgtgaaaccccccacctttgcatgcatcagggcctagccatgtgatcccaacctaaggcaagggagattggggagtgggtggcccacaagaggatgtgaagtggatcttaccactgtctctgctgcrggagaccttctagctcccttaagctcatctggcttaacagccagctctgtcttctctcctcagggctgtgctgtgggccctctgattctctagaaccaacatcccttcagagaaagagaacgttcagtgaaagaggaagagagagagatggaatgacagc

SEQ ID NO: 620451 - DNA, 513 bp, Homo sapiens
ttattgactttcaaatggtgaattagtattgcatacctctggagtttttcagttgcaaattcaatttcattaatggttatagamctattctggctgaggcttggtagtttgtaatttctaaagaattggtctatttctccaaatttatgaatgtaaagctgctcacagtatcccattatccatgtaatggctgcagaatttgtattgaaatccctattttattattgctattggtgatttctgtcttctttcttgttttataactttgtgagtcttactagaggtttatcagttttactgactgtttttaagaatcatttttttgtttcattgatttttctctgttgttttcttgttctgtatttcttacttttctttgtactgaagatcagtccccaagaggggaaaagaagagccccttttcactcattttctttccagttcttagtgtcttccactatcttttctccattccttctgtgtcagagaaaggatgtttttctctctttctaa

SEQ ID NO: 620452 - DNA, 604 bp, Homo sapiens
tttggtgctcattgctaaatagttcagtagaaatgcctcagaggaatcatcttggtgctggctccaaggctctgtgcagtcagccaggctatgaaagaaggcagcctgtgccttctccagactcattccygctccatcctcaacctaatcttcctgaatacactctccattcaagagccgatggaaaaatggatcactgacaaataacgaattattgtatgaattaacctcttgctggcaactgggcagtttgatagcagactcaaactgggtgatttgagaatttaataaagggactactaattcatcctatgctaatatgaaccctcatttagggttgagagagagtagccaagggatagtgcagtagttggggatttattaatggcagagagcctttaccatttcttgacctggaggggctaaatggcacaggaaacacccaagagtattgcatagctagggcttctggaaaggagcttcagccttcagtagtgggctataggctgtagaaggagggaagtagggaaaagaatctcaccctctctgtgtcaccttctcagctcctgccagtgcttctcattggccaaaccaaatcaacagc

SEQ ID NO: 620453 - DNA, 309 bp, Homo sapiens
tggagttacttgattaagtcctcctatgatggggggaagacagtggatatggaggggcagaaagaaaataaacaaccctacagggatccaccaattgcttttattcagaataaaattttattcagaataaaatttcaaagctattttattctgtaccaaacattgcaaatgttggcttgcggaaagcaaatacaagattattctaaagaaaacrttaagcctgaggccatatatcaattacaaggtgaattttagggctcaacacagttatatatcatcaagttcaaatgaacaaatgcctggatttga

SEQ ID NO: 620454 - DNA, 564 bp, Homo sapiens
tttgaatgctattgtgggtatcatgtcaagatccaatgttttctttccatgttatactraagaaataaaacttaatgtctatagttcaggttatatttgaaactttaatagttctagattgaagctagcataaaaacactgtatactgagcatggtggctcacacctgtaatctcaatgctttgagaggccaaggccagaggatcacttgaggccaggagttcaagaccaacctgagcaacatagcgagaccccatctgatatggtttggctctgtgttcccacccaaatctcacctcaaattgtaataattcccatgtgttaagagcgagaccaggtggagataattgaatcatggtggcagtttcctctatgctgttctcatgatagtgacttctcatgagatctgatggttttataaggggcttcccccttttctcagcactcatcctccctcctgctgccctgcgaagaggtgctttctgccatgattgtcagtttcctgaggccttcacagctatgcggaactacgagtcaattaaacctcttttctttataaattacc

SEQ ID NO: 620455 - DNA, 564 bp, Homo sapiens
tttgaatgctattgtgggtatcatgtcaagatccaatgttttctttccatgttatactaaagaaataaaacttaatgtctatagttcaggttatatttgaaactttaatagttctagattgaagctagcataaaaacactgtatactgagcatggtggctcacacctgtaatctcaatgctttgagaggccaaggccagaggatcacttgaggccaggagttcaagaccaacctgagcaacatagcgagaccccatctgatatggtttggctctgtgttcccacccaaatctcacctcaaattgtaataattcccatgtgttaagagcgagaccaggtggagataattgaatcatggtggcagtttcctctatgctgttctcatgatagtgacttctcatgagatctgatggttttataaggggcttcccccttttctcagcactcatcctccctcctgctgccctgcgaagaggtgctttctgccatgattgtcagtttcctgaggccttcacagctatgcggaactaygagtcaattaaacctcttttctttataaattacc

SEQ ID NO: 620456 - DNA, 589 bp, Homo sapiens
ttctgcaaaacctgaaccatcattgagtaatccatcaaaaatccagaggcattaaaagttccatgactaatatgtgtgaaatgtttgaagatgaaactctcttttgtaattatagaccgcagaatgtggaatagtttctgccgtttgaattacctacctgaggatactacttgaaagttccatcttccgtaaataacagycagcctgttatagaagacaggcagtgttttcatacctggaatagaaattattttagaatcatttccatgcaacattttttcattattactaagatctggtgactatgaaagggagtaaacttacacagctggctcttttcagacagagagattcaatttattcttgttccaatactgtaggaaaataaaaaggttaaaattaccttttggattcaatgtgatattttccctagatacctaaacaaatggaagacaggcagctttcccagctttggaataggggacagtaagggatttcccttgtagcgtgttgtgttttatctgaaatctggcccttttctgtaattaaaaaagggatttaggtactgaatttaatcctttaaatggcc

SEQ ID NO: 620457 - DNA, 589 bp, Homo sapiens
ttctgcaaaacctgaaccatcattgagtaatccatcaaaaatccagaggcattaaaagttccatgactaatatgtgtgaaatgtttgaagatgaaactctcttttgtaattatagaccgcagaatgtggaatagtttctgccgtttgaattacctacctgaggatactacttgaaagttccatcttccgtaaataacagccagcctgttatagaagacaggcagtgttttcatacctggaatagaaattattttagaatcatttccatgcaacattttttcattattactaagatctsgtgactatgaaagggagtaaacttacacagctggctcttttcagacagagagattcaatttattcttgttccaatactgtaggaaaataaaaaggttaaaattaccttttggattcaatgtgatattttccctagatacctaaacaaatggaagacaggcagctttcccagctttggaataggggacagtaagggatttcccttgtagcgtgttgtgttttatctgaaatctggcccttttctgtaattaaaaaagggatttaggtactgaatttaatcctttaaatggcc

SEQ ID NO: 620458 - DNA, 589 bp, Homo sapiens
ttctgcaaaacctgaaccatcattgagtaatccatcaaaaatccagaggcattaaaagttccatgactaatatgtgtgaaatgtttgaagatgaaactctcttttgtaattatagaccgcagaatgtggaatagtttctgccgtttgaattacctacctgaggatactacttgaaagttccatcttccgtaaataacagccagcctgttatagaagacaggcagtgttttcatacctggaatagaaattattttagaatcatttccatgcaacattttttcattattactaagatctggtgactatgaaagggagtaaacttacacagctggctcttttcagacagagagattcaatttattcttgttccaatactgtaggaaaataaaaaggttaaaattaccttttggattcaatgtgatattttccctagatacctaaacaaatggaagacagrcagctttcccagctttggaataggggacagtaagggatttcccttgtagcgtgttgtgttttatctgaaatctggcccttttctgtaattaaaaaagggatttaggtactgaatttaatcctttaaatggcc

SEQ ID NO: 620459 - DNA, 539 bp, Homo sapiens
gaatcttatagaaatggaatgatttgaacttgagaaatatgatttaggatatctggtaggggaaatttctaaagatttctgaagattatgcatattcagttatatgcattcacaaagagatggtttgctactggaacatacatttgaaagggaagcagagcataaaagtttgaaaaattagcagccygatgatgtgataaaagagaaaacatcattttctggggaggaatttagcacactacagaaatttgcataagtaatgaggagccaaatgttaatcaccaagataatgggcaaaatgtcttcagggcatgtcagagatcttggctgccgtccctcccataacaggccaggaagcctaggagaaaaaatggtttctctgggcccagggcccccgctgctctctgcagcctctggacatggcaccctgcattccagctgcttcagcgccagtcgtggctaaaagggtggcttccatatgttgttgggcctgcagtgaacaaaagtcaagaattgaggtttgggaacctccgcctaga

SEQ ID NO: 620460 - DNA, 579 bp, Homo sapiens
gttgctacaaaatttcactttgtattttttaaaaaagcaatatctgggaagtgcaaaaaagtgaagtgcaataacacaagatatggctgtatacccagcaaaacttttcttcagaaataaagaagagataaagacattcccaggcaaactaaagctgaaggattttatcaccactagacctgccttacaagaaatgaacaagagagttcttccagttgaaatgaaaagaccctaaacagcaacataataccataagaaagcaaaacacttgctggtatgttctcattcataagtgggagttgaacaattagaacatatagacacagggaggggaacgtcacacaccggggcccgttagggggtgggggacaaagggagggagagcattaagacaaatacctgacgcatatggggtttaaaacctagatgatgggttgatagatgcagcaaatcaccatggcacrtgtatacctatgtaacaaacctgaaaattctgcacatttatcccagaacttaaactaaaataaataaataaataaaaacatttgctggtaaaggtaactatagacagtatgtctg

SEQ ID NO: 620461 - DNA, 554 bp, Homo sapiens
accccatgggctattaaatccctcttacttccagatggcatatgcatatgagtgctatggcttcctgcacattggaaaraaaaatgaggtgaccacagctattaggtcacacccatgcaaagctgtttggcacaacaatgactacagtaaaatgtgggttgactgcatggaagatggagaaaggtgtccaatacatcatttcatggaggagtcaggaagagatctacattattttaagcttctatagggcacaaactatatatatgattttagttttcaaaatcgtttagtcttttatgatatcttctatctattcttatgttatccttttattcccaatattatttgttcattttctccttattccttcttcccaggtgtttttcttgtttatcagtattttctacaaattaacttttattgattggcttttttttctattcattaatttctgcttctatatttattttctcttccttcaacttacttttatatatgtctatcaaatcaaatgttagaatttgtcaccaagattttctaaagtttattttcta

SEQ ID NO: 620462 - DNA, 561 bp, Homo sapiens
acttactcctgttgttactttagactttttcaaactcaactcttgaacagttggctcaatagtcctgatattgattctatcctttgacttggtgtttgtgtgtgcttttctaaatgttttaactccaacttattctctacggaattttactcggctctccatccctgcttttttaaactcattttaatgagttggacaggaaatgccctgcttcatctcaaaacacacagtacccaaccctcacatttcccattaatcagtggccatctgggccagccctctcccataacaaacttcaaaggagaaacaaaaggagggtggccaaaaacattataccatactactaccattttggtaatagcccacctaaaatgacagggtcagatttggagagcagaatcccrtgaaccactttgggaattaaatcagcaaaagcaatcaagtggcaattaagtggtatcaagctctaacccaagagctcccaatctctgtaccatagatgcctgagagactaatcagttcttacaaagattttgccaatccatatatataggaatctgc

SEQ ID NO: 620463 - DNA, 531 bp, Homo sapiens
acaagggacttgccttgtctcagatgaaactttggatttgaactcctgggttaatgctggaattggttaagactttgggtgactgttggaagggcatgattgtgtttttatataggaggacatgagattttggaggaaccagggggcagaatgatataatttggcattgcgtccccactcaaatctcaccttgaattgtaataattcccatgtgtcaagggtgagaccaggtggaggtaattgaattatataggcggttcctccatgctgttctcatgatagtgagtgagttctcatgagatctgatggttttataacgggctctttcctcgaccttgggaataaggtgccttccttcccttccaccatgattgtaagtttcctgaggcctccccaggcacgtggaactatgagtcaatcaagcctctttcctttataaattacycagtctcaggtaatttataaagtgtgagaatggatgtaatttagcagtgtgagaatggatgaatgtattcctctttatatgtcctt

SEQ ID NO: 620464 - DNA, 425 bp, Homo sapiens
tgatcttttgttgttttttttaatagtaatccttacaagtgtgaggtgatatctcattgtgattttgatttgcatttctctaactattagtaatgtcaagcacctttccatatatgtgttggtcatttatatgtgctaatttttgacaagggtgccaaaaacacaccacagagaaaggacagtctctttgacatatgctgctgggaaaactggatatccacatacaaaagaataaaattggactcttttcttacaccatacacaaaaatcaatttaaaatggattaaagacttaaacctaagacctgaaactgtaaaactyctaaaagaaaacataggggaaaagatttacagcattggtcttggcaacaattaatcctatatgacaccaaaagcacaggcaacaaaggcaaaaacaagcaacaa

SEQ ID NO: 620465 - DNA, 600 bp, Homo sapiens
acatctttcagcttctgtctgtactctactatctcttgaccttttccgtggtgtttggagtttcaaatctccaggtgatataatggcttcatctcaaggatgagcctgtcttcatacttgagatggtactatcatccaacacaaaactacctggatgggccaagctcccttgtctctttaccataagctgctgatctcccctcaagtccagctgcctctgggtcaggtatgtaacctgttcaatccgtgtggcaagattgcagtgtctcataacaaaacatggaggcttattcagaggaaacctcttctgcatgttttgtgaagaagatgatggcatgtggcagatgctttagaatatcagtgtcagggattatttagttagtataaattattattcagtayattatgagaccaggaaatgtgactgaggaatgtgcccttcccctagcccttgaccttccttagatgtactaatacttgatatggtgtcataatttcttctttgtcctctgcaacttctttctctttcatgttcccttttcagttgcccaactagccctccacaagtctagtggtctgcttacagagatcatactttct

SEQ ID NO: 620466 - DNA, 607 bp, Homo sapiens
ttcatactgacttataagacaaagaaaaggggatggagataagaccacttggaagtaaaggaatatctgactcaaggttattcttaaataactacacaattcatttataggtttatttttgttcatctatttttctttctactgtattatggtgtctgtcactaagacataggtataacctggaattgcattattgaaattgtttttttcaattacctttctaagataattacctttgtactagacagttttaaaaatcaataaaatattcttggcaatagtcagtaacaattaataatacaactcatgttaacaaacagttattcaacttagcaaaaataactattttataatgccctcaaatactaagaaaagcatttggactaagaaaagcaaatataaagtatatttcttgaaggatatagtttaaaataactgctccttcttggtaaagttgagaatagactctatcaataccaatgacttcagctgaaggtaacartgaatgaagctgtcatcaattattttaaaatcacagggtctctaagtattctcatgtgtcattggtttgtatagaggcttgattgatttatcttgtccattgtca

SEQ ID NO: 620467 - DNA, 641 bp, Homo sapiens
gagtactcttattgtttaagggctatatgtcatatcaataaatactctgttttctaaatactgacttgaggattgtgatctatagaaatatatgatggggttaggagaacaacatatctgatattagaatcatgctggaaattccaagacawatggccatcatacacatggcataatactgcatgggcagggtgggaagggaatactacttatttattataatagtaataaatataatataatataataatagtaatataatataatatatatattatataatatattatattatataatataatagtagtataaataaatactacttatttattataatgccggacactgtgctaaatactttgtattctgttcttgcattaaatcctcacaatttaatgaatgggtggtgttattatctccacatgtgtaacattattaggctttaaaataagaaagggagcacaaatgtactctttgggagaaacctgcagaattagtttcctctgtactagagcaaattaaaagtttatatccatgcaaattatacctgtgcaagtccatacacaagttggttaataacaatgggaaaagaaagataggaagcagtgatgtagtaagtagaacattgctttgtatgt

SEQ ID NO: 620468 - DNA, 641 bp, Homo sapiens
gagtactcttattgtttaagggctatatgtcatatcaataaatactctgttttctaaatactgacttgaggattgtgatctatagaaatatatgatggggttaggagaacaacatatctgatattagaatcatgctggaaattccaagacatatggccatcatacacatggcataatactgcaygggcagggtgggaagggaatactacttatttattataatagtaataaatataatataatataataatagtaatataatataatatatatattatataatatattatattatataatataatagtagtataaataaatactacttatttattataatgccggacactgtgctaaatactttgtattctgttcttgcattaaatcctcacaatttaatgaatgggtggtgttattatctccacatgtgtaacattattaggctttaaaataagaaagggagcacaaatgtactctttgggagaaacctgcagaattagtttcctctgtactagagcaaattaaaagtttatatccatgcaaattatacctgtgcaagtccatacacaagttggttaataacaatgggaaaagaaagataggaagcagtgatgtagtaagtagaacattgctttgtatgt

SEQ ID NO: 620469 - DNA, 589 bp, Homo sapiens
gctagattatatagtaattacttgtttaaatttttaaggaactgctatgctgtttttcacagtggttgcaccattttacattccactagcaatgcacaaggcttccaggttctccacattctcaacacttgttattttctgttttttaaaaataatagtcatgctaataggtgtgaaatataatagtatcttactgtgcttttgatttgtattttcctaacagttagtgctgttcaacatctttcatgttcttagtgaccatttgcatatcttccttggagaaatgtctatttgagtcctttgcccatttttgaatttttgttgttgttgttgagttgtaggagttctttatatattctggatcttaacccttatcagatatgtgatttgaaaatkttttctcccattctgtcattgccatttcatttcagagtatctgttggtacacaaaagttttaaattttggtgaactccatttatcatttttttatttagttgcctgtgtttatggtgtcatatccaagaaatcattgtcaaatctgatgtcttgaagtttttgctctctgttttcttctaagaattttatagt

SEQ ID NO: 620470 - DNA, 589 bp, Homo sapiens
gctagattatatagtaattacttgtttaaatttttaaggaactgctatgctgtttttcacagtggttgcaccattttacattccactagcaatgcacaaggcttccaggttctccacattctcaacacttgttattttctgttttttaaaaataatagtcatgctaataggtgtgaaatataatagtatcttactgtgcttttgatttgtattttcctaacagttagtgctgttcaacatctttcatgttcttagtgaccatttgcatatcttccttggagaaatgtctatttgagtcctttgcccatttttgaatttttgttgttgttgttgagttgtaggagttctttatatattctggatcttaacccttatcagatatgtgatttgaaaatgttttctcccattctgtcattgccatttcatttcagagtatctgttggtacacaaaagwtttaaattttggtgaactccatttatcatttttttatttagttgcctgtgtttatggtgtcatatccaagaaatcattgtcaaatctgatgtcttgaagtttttgctctctgttttcttctaagaattttatagt

SEQ ID NO: 620471 - DNA, 666 bp, Homo sapiens
ggttaaattgagtggaatttttctaacctagtaatttttgaaaaggggcaaagctcccaaacacagaaagtcctcactatacagtactaggtttgaaagcccatgaacaatctttgccaccattacttctcagattggctcaaggagcattgctgaacatatctgacaaatagagatataaactgataccaatatgaaattttagttttattattcatcagctcaagtcaatgatttagagtgagaattaaatgcattaaagagaaaatataatttatagaatgaaaattagactagaattttcacagaggtagtgagagtggcaagaaatgcatgacataaaaatcacaacaaaattttctaagctttaattgaaattaatattgctcagcataccaaagctgcatttaagtcattttgttttaattgaccacattgtgctttcttacaaatttttcaacaagtagtcatgaggatttaaattttgtacagaagattatactatgatgcttaaaacattatattaaaggaacatttttaaatcaatgtagtattgaacaataccaagaaaaattatatacccttaaatctagaaagttgtcctatacatracagaacacaatctattgcttttcccttgctctcggttcatttgtttgatatatg

SEQ ID NO: 620472 - DNA, 666 bp, Homo sapiens
gattgctggatagtatggtagctcaatttttagtttktagaggaatctccaaactgttctccataagggttgtactaagttaatatcccacaagcagtgtacaagcattccactttctccacatccttgctagcattcgttattgcctgtcatttggatataagctattttaactggggtgagatgatatctcattgtagttttgatttgcatttctctgatgattaatgatgttgagcaccttttcatatgcctgtttgccatttgtatgtcttctctggaaaaacgtctattcagaacttttgttcatttattgattgaattattagatttttttcccataaagttgtctgaactccttatatattctagttattaatccctcatcagatgggtagtttgcaaatatttcctcccattctgtgggttgtctcttcactttgttgattgtttcctttgctgtgcagaagctttttcacctgatgtgatctcatttgtgcatttttgctttggttgcctggcttgtgcactatggctcaataaatctttgcctagaacaatgtcctcaagattttccccaatgttttcttgtagcagtttcatagtttgaggtcttacatttaagtctttaattcattttaatttgatttttgtatatggcaagag

SEQ ID NO: 620473 - DNA, 493 bp, Homo sapiens
tatgacttaacctatggtctatctttgaaaatgatccatgtgccaaggaaaagaatgtgtattctgcagccattggataaaatgttctgtaaatatctactagatccatgtggtctgtagtgcagactttgatctttctttgttgatttttctctctgaaaggtctgccaatggtgaaagtggggtgtggcattctccagctcttattgtattggagcctrtctctctctttagctctaataatacttgctgtatataactgggtgttctagtgttgggtgcatatatatttaaaattgttatatcttcttgctgaaatgacccctttatcattatatagtgaacttctttgtctactcttatagtttttgtcctgaaatcgactttatctgatataaatatagtgactccttcttttttatggtttcaattggcatgccgtatctttttccattcctttattttcagtcaatgtgtgtctttataagtaaag

SEQ ID NO: 620474 - DNA, 668 bp, Homo sapiens
aactgggtgttctagtgttgggtgcatatatatttaaaattgttatatcttcytgctgaaatgacccctttatcattatatagtgaacttctttgtctactcttatagtttttgtcctgaaatcgactttatctgatataaatatagtgactccttcttttttatggtttcaattggcatgccgtatctttttccattcctttattttcagtcaatgtgtgtctttataagtaaagtgtgtttcttgtaggtatcaaatcatgggatcttgtttttttaaccgtttagccactgtgtgtcttttgattggagagtttagttcatttacaccacttgcttatttgttttctggtcttctctttcttctttctgtccttcctgtcttcctctagtgacagtaattttcttgggtgatatgatttagtttcttgatttttattttttgtgtaaccattgtaagtgttttggtttgaggttaccatgaggcttacaaacactatctaataacccattattttaagctgatagcaacttaatactgtttgcataaacaagcaaataaccaccaaaaagaccacaaataaacatctaggttttaactttgttctcccctgcttttaaactttttgttgtttttgtttatatcttattgtactatgtcttgaaaa

SEQ ID NO: 620475 - DNA, 604 bp, Homo sapiens
ctgctgtaatcactccctcgttactacctatgtttgctgaatgccctggggatctacaattggttggtggccaagctagccagccctgtattcttcccttaagggcaacaaggtccaccaggttctgggtgggtccagaagtcccatctgggagtcaggaactagtcgaaacccttagaagtctacctggtattgtattgcagctgagctccactcaaaccacaagatggagaccttcccactcttcccttccctttccaaaggcagaagagcctcaccttgtactccctgccacccagggccattaggcgtactcacaaaccaccartgatgtacccttagggcccaaggtctcttaagtcagcttgtggtatgtgttcctggactgggactcgcccttcagggcagtgggctcccctctggcccagagcaggcctagaaatgctgtccaagagtaaagtcattgaactggggacctcaggagcccacttgttgccctatcttcctgtagttgtgctggtccttaaggtgtgatgcaaagtctcctttacttttccctctgcttttctcaagaagaaggagatttgccccatattcaccacag

SEQ ID NO: 620476 - DNA, 627 bp, Homo sapiens
cagctggtaatgtgttgagtctcacctgaagcaagcaaatctcagaggctcatccaaggcccttgatgtagcacttgggtattgctggtggttattcatggcccaagaactcttcagttagcagatgatgaatgcttccaggactgggtcccttccttccaggcagccggtatttttcttgctcacggtgtgtctagaaatgttttctgggagtgagggccttgaatgggggcctcatgactctgactatcatgctgtggccctatcatgctgtggctgagctggtatcctagatgaaaggcatagtcctccccgctcttcccagtcctttsctcaagcagaagaaagggttctcttttggagctgcaagttttgcatcctggggttaagcaaggagtgatgtcagcactcccttggctggctgccccaccttgtgtctcagaatgttgcgttccccctctgcccccacaccccagggcatggtctcctgggcctagttcagcactaggacttgcctaagagtttcagtacttacggcctaaactacctttaagtttacttggagacagagagtgctattgcacatggtagtgaggtttgcagggactcaagttcagacagctggga

SEQ ID NO: 620477 - DNA, 597 bp, Homo sapiens
ttccagtgttatctcctagaatttttatcgtttcaggtcttagatttaagtycttaatccatttgaattgatttttgcgtaaggtgagagatgaggacccagttttattctcctacatgtggctagccaattttcccagcaccatttgttgaaaagggtgtcctttccccactttatggttttgcttactttgtcaaagatcagttggctgtaagtatttggatttatttctgggttctctattctgttccattggtctatgtgcctatttttataccaggttaccatgctgttttagtgactatggccttatagtacagattgaaatcaggtagtgtaatgcctccagatttgttctttttgcctagtcttgctttggctatgcaggctctttttgggttccatatgaattttaaaattgttgattaatcaatttacatgcactttttaaaaaagtctttataatatacaagtttataattttagttaacgaagtatggtgtctatggtaatttccaaaaagagtgggaacagattcttggttaggaaggccacattatttgattggaaacgtcagttttaacttaaatattttcg

SEQ ID NO: 620478 - DNA, 591 bp, Homo sapiens
tgttatctcctagaatttttatcgtttcaggtcttagatttaagtccttaatccatttgaattgatttttgcgtaaggtgagagatgaggacccagttttattctcctacatgtggctagccaattttcccagcaccatttgttgaaaagggtgtcctttccccactttatggttttgcttactttgtcaaagatcagttggctgtaagtatttggatttatttctgggttctctattctgttccattggtctatgtgcctatttttataccaggttaccatgctgttttagtgactatggccttatagtacagattgaaatcaggtagtgtaatgcctccagatttgttctttttgcctagtcttgctttggctatgcaggctctttttgggttccatatgaattttaaaattgttgattaatcaatttacatgcactttttwaaaaagtctttataatatacaagtttataattttagttaacgaagtatggtgtctatggtaatttccaaaaagagtgggaacagattcttggttaggaaggccacattatttgattggaaacgtcagttttaacttaaatattttcg

SEQ ID NO: 620479 - DNA, 556 bp, Homo sapiens
gtcataatttaaacaatctccaatattgacatgtttccaattttttggttctaaacatgatatttacatagtctcagagtatatccccacaagatacttgttaactactttatagtagagaaatcttgcaggcaccattgcaacaaaatgatgccagtgaacattgccagtaatgggaccaatcaatttcacgtgccctattgatatgatgcactaagaattcagaattgcttctgtggtgatcctgccaaaagtgcttaagctaaaactaatcataagaaacaaaaaataaacycaaatggagagacattctacataattacagacctatacatttcaaaactgccaatgttgtaaaatacaaataaagccttgaaatttttcccaataaaataagacactgaacacaatacaaaacacaactgaacacaatacataattctgagttttcttttgctataaggactgtattaggacaattggcaaaaactcaataacatctatacactagataatagtattatatcaatgtcaagttgttaattttgataagtgt

SEQ ID NO: 620480 - DNA, 712 bp, Homo sapiens
ggccatttttttccagaaagttggttgttagacatttatcagcagatcactaaacaacagtgaaatcaagtaaatgagaccatactcaaagaaaaattcttaaccctacagcagaaggctggcaaatgcacacatgtatttggaagtcttgagttaaaataaaagtgccttaagatatgtatatatttttaatgtcctctactttaatattttcaattaatctacaactattggtcctgattcagatgagggcttccccyagagatactaaaaaagtagaacaaatttgtacaaccttttggaaagtagtttgacaacatttattgagaaatttgaaagtccatacctcttcacccagaaacttcacttctattactttatgttaagaaaatcataattgatgtagtccaatatgtataaatatgttcattatattgtttaaaataacaatacatacatacatacataacctaaatgttcaacgtaggaaaatgattaagtcataatacatctatataatagaatacaatacaatgagtaaaatcacgtttcaaagaatgtttaatgactaagaagaaattcaccaaatattaatggtggttatcactgcatggttggacttaaattgattccatgttttacacaagtaatgcatatgcattattgaaatgtcataaaaatagagataaataaaaataagaaaataacaatc

SEQ ID NO: 620481 - DNA, 578 bp, Homo sapiens
catttttttccagaaagttggttgttagacatttatcagcagatcactaaacaacagtgaaatcaagtaaatgagaccatactcaaagaaaaattcttaaccctacagcagaaggctggcaaatgcacacatgtatttggaagtcttgagttaaaataaaagtgccttaagatatgtatatatttttaatgtcctctactttaatattttcaattaatctacaactattggtcctgattcagatgagggcttcccccagagatactaaaaaagtagaacaaatttgtacaaccttttggaaagtagtttgacaacatttattgagaaatttgaaagtccatacctcttcacccagaaacttcacttctattactttatgttaagaaaatcataattgatgtagtccaatatgtataaatatgttcattatattgtttaaaataacaatacatacatacatacataacytaaatgttcaacgtaggaaaatgattaagtcataatacatctatataatagaatacaatacaatgagtaaaatcacgtttcaaagaatgtttaatgactaagaagaaatt

SEQ ID NO: 620482 - DNA, 163 bp, Homo sapiens
aaaaatttcacttttcaaactgagttaaggagaaatataaaatcttaaaattattataattatttatgagatcagtagttagaattttctacagagagaaagcaagcacaaatggtttttcaactgarcttttggcaggcagaatttttggcccccatgatct

SEQ ID NO: 620483 - DNA, 589 bp, Homo sapiens
atgaactgattcatgagaatatgatgccaatacatcacaaatagtttttcacttcccatccccaaaactcaaaccaccccagtttaaatccaaacatactaaaattttgggtgaccataaagggaattctagctctgagttttagttagcaacaagtacctaaaacggtctcttgtatttgtaaatgtatagagctatcactacgtcctctgtcattcacatakatataatttagcaatccactttatttcccaaaattcattctgttttatatagtatcaaatttcctgagtgctaaattcttgcattatctaacagttcttaatttctaactgtcaacatctttttgcattagctatttcaataaagtcacagaaatcccctaaatctttcagtcttttatgccaaaatgggtcatttcagaaacaccaagccccttccctaattacattataaatccaagtctgactaagctttgaactctaaaataaataaaccaatagttttagtaaggattaatacccatgagagaatacctttctacaatggatgatgaatctccattgtatagaggaatattaataatttc

SEQ ID NO: 620484 - DNA, 586 bp, Homo sapiens
cctatggaaaagtggccagactgcttgttacacaggaccctgatcccatatctcctcactgagtaggtcttcccagcttgggtctacagccacccttggctggggctatcaagccagtagcagctctgtgactccttgagagagagctcctagtgggaggggtgcgttgccaactttgctgtctcaaagccctcatgcttgctgtctctaggctctggagagaccatggagaccagagaccaggagctggtcacgacccctagtacagagcacccacctcatggaaaagtgaccagagtgttctcctggtcctcacttcttcctaggcagagtcacccaacctaggactccagcacaatcactctgtccccacctgaccacttcagtcagaggcagcccagcagttaaaggtatacccacatgcagagatgagaaagaaycaatggaaggacaccagaaactcaaatggccagagtgtattatgtccttcaaacatctgcactagttctccaaaaagtataattatccaggttaagttagctgaaatgacagaaatagaattcagaatatgggtatgaatgaagat

SEQ ID NO: 620485 - DNA, 647 bp, Homo sapiens
aacaagctgctcctgaatgactattgaataaataatgaaattaaggcagaaatcaagaagttctttgaaactaatgagaataaatagacaatataccacaatctctgggacactgctaatgcagtgttcagaggaaaatttatagcactaaatgcccacatcagaatgttagaaagatctcaaattaacaacttaaaatcacaactaaaagaactagagaaccaagagtaaamcaatgccaagctagcagaacacaagaaataaccaaagtcagagctgaactgaaggatactgagacacacacacacacacacacacacacacacacacacacacacacaaaacactcaaaagatcaacaaatccaaatgttggattttagaaaaaaactaatcagataggccactagctagacaaagaagaaaagaaagaagattaaaaaaaaacctagttagaaatgacaaaagggatgttaccactgaccccacagattaatcatcaggcttaataaattcctaaacacatacatcctcccaagactgaaccaggaaaaaattgattccctgaacagaacaacattgagctctgaaaatgaatcagtaataaatagcttaccaaccaaaaaagtccagtactagatagattca

SEQ ID NO: 620486 - DNA, 647 bp, Homo sapiens
aacaagctgctcctgaatgactattgaataaataatgaaattaaggcagaaatcaagaagttctttgaaactaatgagaataaatagacaatataccacaatctctgggacactgctaatgcagtgttcagaggaaaatttatagcactaaatgcccacatcagaatgttagaaagatctcaaattaacaacttaaaatcacaactaaaagaactagagaaccaagagtaaaacaatgccaagctagcagaacacaagaaataaccaaagtcagagctgaactgaaggatactgagacacacacacacacacacacacacacacacacacacacacacacaaaacactcaaaagatcaacaaatccaaatgttggattttagaaaaaaactaatcagataggccactagctagacaaagaagaaaagaaagaagattmaaaaaaaacctagttagaaatgacaaaagggatgttaccactgaccccacagattaatcatcaggcttaataaattcctaaacacatacatcctcccaagactgaaccaggaaaaaattgattccctgaacagaacaacattgagctctgaaaatgaatcagtaataaatagcttaccaaccaaaaaagtccagtactagatagattca

SEQ ID NO: 620487 - DNA, 647 bp, Homo sapiens
aacaagctgctcctgaatgactattgaataaataatgaaattaaggcagaaatcaagaagttctttgaaactaatgagaataaatagacaatataccacaatctctgggacactgctaatgcagtgttcagaggaaaatttatagcactaaatgcccacatcagaatgttagaaagatctcaaattaacaacttaaaatcacaactaaaagaactagagaaccaagagtaaaacaatgccaagctagcagaacacaagaaataaccaaagtcagagctgaactgaaggatactgagacacacacacacacacacacacacacacacacacacacacacacaaaacactcaaaagatcaacaaatccaaatgttggattttagaaaaaaactaatcagataggccactagctagacaaagaagaaaagaaagaagattaaaaaaaaacctarttagaaatgacaaaagggatgttaccactgaccccacagattaatcatcaggcttaataaattcctaaacacatacatcctcccaagactgaaccaggaaaaaattgattccctgaacagaacaacattgagctctgaaaatgaatcagtaataaatagcttaccaaccaaaaaagtccagtactagatagattca

SEQ ID NO: 620488 - DNA, 536 bp, Homo sapiens
tctcctttggctttgccactcaaacctgcctactagataatgactgccactgattgcagacacctcattttggataatttcttgcttttgtcctactcctttcctttttccactttggcccagcctttccttcctgagctggttttattccaggaattatackgcacagctgcgtgctggcctggtcaacttcagaactctatctgtagaaggggccctgagcactgtttactcacaaataaaggtagaatagtaaaggataaagccaaaaattgttacgtgagaaatgccaagaagctaaggtcaataaaatacttaaaaatcaatatttgaaggaagacataaaaggattgggacagatggcaagacatgaaaagaaactcatgaattctcattttacatctgtaactgcccaactggctcaccttgccctctgcctagagagagtcaatttattaagacagggaattgcaatagagaaagagtaattcatgcagatctggctgtgtgggagaatggaattttattattactca

SEQ ID NO: 620489 - DNA, 543 bp, Homo sapiens
atacacatacataaatatagacacacacacacatgcacacatacatacacatataagagaagatttaatatgggaattggcttgtgtgattacggggactgagatgatatgccatctgccagccagagaaccaggaatgtcagtgatgtaattgagaaacatgggcgctgatggtataagtcctagtctgaggctaaaggcctgagatcctggggggccactggtgtaagtcccagagtccaaaggctkgagaatccagaaggctctgatgtctgagggcagtagaagatacatgcttcagctgaaggaaagtgattgagaatctgcccttcctccatctttttgttctaattgggccttcaacagattgaatgatacctgctcacattggtgagggtgaatcttctttactgagtctgctgactcacatgctaatctcttcctgaaacactgtcagtaatgcacccagaaataatgtttgaccagctgtctgggcattccttaacacatccaagttgacatgtaaattatccatcacaagtc

SEQ ID NO: 620490 - DNA, 610 bp, Homo sapiens
aaatatgtcctgccttatgtgtatgaataacaaaatattgttattcatttctaaagttgattagcctacagtatcattggcaacatayggatttagctgttttatagtattagtaaagtgttacttagttctaattactccagatttttccacagttcttctttgtaaccagtttgcatacagtcatccagggctagggccaatgaaggttatctttgaatgaagcaatattcaattgtctacataggaatcaaaccaaacactgtggcctagctagtaaatgaaccactagatttatacagaaatattatttatctatctacctgtttaaaaatatgaatatatatatatatatgaagtaatttcctatgcacagaacctattaaaaaagacttaaaaattgaggaaagaagataactatatgagagaactaggctgaggacaattactataatttatcactacattaagctgcaagcttcctgatagtcaaagcaaaattggaaatacgattatgttagtgtttgttatttgattaaaaataccaattcatctggatatagagtatttttgcttttgtctgaaactaaacttcttgaaggatttgtca

SEQ ID NO: 620491 - DNA, 438 bp, Homo sapiens
atactccatttaccttgatgtgattattctgcattgcatgcctatatcaaaatatctcatgtatgcataaatatatacccctactatgtacccccaaaataaaataaagtgaaataaaaagtactatygttagatagagataagtagtatgatgaaaaataaaaggagggagaaagggaagatgtgtgttggggggatgtttcaatattatattgactgagaagttgacactgagtaaatctctgaaggatgtgagaaatatagaatattgatcataaaggatcatattcaggagatatatatatagagagagagagaggagagagagctgggattacaagcacctgtcataattcccagctaatttttgtatttttgtagagacagggtttcaccttgttggacaggcttgtctcaaactcctgacctcaggtgatc

SEQ ID NO: 620492 - DNA, 356 bp, Homo sapiens
tgtcttattatgtttcttttactacagagtattaatatctcatatagagaatataaatattaattttaattataaggcaatgaaacagattttccatgtgaaacttaagaagtcaatcacattgatttttttgtatcacctacatctatatggatttttttttctcttttcatacacaggaaagaagtaattgtatatacctccaatgatccatctcctcccaattggaaatgcattcatgaagaaatcctatttctaacaaatacatatcctctgctcttaaatttccttctttcttctatttctctgcctttgtaaataaatgtatcgaaaarcatacagagtaacatgtcact

SEQ ID NO: 620493 - DNA, 543 bp, Homo sapiens
agactattgaaaaaagtctagaaatagattggaaggatgtcatatcactaataattacaatttatcttaagaatgcaaggatggttgagtattaagtaataaaatgattagtcatattaatagatcgagacaacatttttaatcattacaagatagttaatgtaattcaatattgattcctgataaaatgtctgagtaagagagatataaagattwtttttcttaacacaatgaagaaaaactattagctattttaaatccaaagtcagcattatactcaataataaaatcctaaaagcatttttgttaatatcagaaaaagcttttggtagttcattaataacaaccaaacaaagattgacttagtctgttcaggttcctgtaacaaaatatcataggctgagtgacgatgtataaacaacagaaatttatttcttaccgttcttgaggttgggaagatcaaggtatcagcagattcagtgtcttgtgagggcccttttcctggttcatggatgatggatgccttcttgctatgtcctcacg

SEQ ID NO: 620494 - DNA, 632 bp, Homo sapiens
tctctacaaagataaataaaaatcaaaataaaaaaccaaaacattatcctaattttagtaattatcaataagaaataatattagggaaataatgccattaatcagtagcaatgaaacaaaaatatccaagaatactcttaacakgaaatgtgcaagtccagtgtggcaaaaattataaaattctattcaggagcagaaagggccatatgaaaattgaatgaaaaatcgtggtctttgacggaaaacctacatgttgtaatgatgccaattctctccaagtactttataaaattgaagaaattccagctggattattttttttttgacatgacagagtgtaaagtttgatgggaaaaattaactatacaggatagcaaataatttctgacaaaaaagaactcagcatagggatagagtataattttttaaatgcttttgtctgcaaataactaaaaaattagtccaaaaattgtttaaacagtaaggaaacctattggttcatataactggaaatttaggggtgggttggattcagctttcacttaatgtggtctttccagctccatttctctgagattttttaagcccagtgtttttcaactgggagtgattttgccacctagataacattt

SEQ ID NO: 620495 - DNA, 632 bp, Homo sapiens
tctctacaaagataaataaaaatcaaaataaaaaaccaaaacattatcctaattttagtaattatcaataagaaataatattagggaaataatgccattaatcagtagcaatgaaacaaaaatatccaagaatactcttaacatgaaatgtgcaagtccagtgtggcaaaaattataaaattctattcaggarcagaaagggccatatgaaaattgaatgaaaaatcgtggtctttgacggaaaacctacatgttgtaatgatgccaattctctccaagtactttataaaattgaagaaattccagctggattattttttttttgacatgacagagtgtaaagtttgatgggaaaaattaactatacaggatagcaaataatttctgacaaaaaagaactcagcatagggatagagtataattttttaaatgcttttgtctgcaaataactaaaaaattagtccaaaaattgtttaaacagtaaggaaacctattggttcatataactggaaatttaggggtgggttggattcagctttcacttaatgtggtctttccagctccatttctctgagattttttaagcccagtgtttttcaactgggagtgattttgccacctagataacattt

SEQ ID NO: 620496 - DNA, 589 bp, Homo sapiens
tgcaaataactaaaaaattagtccaaaaattgtttaaacagtaaggaaacctattggttcatataactggaaatttaggggtgggttggattcagctttcacttaatgtggtctttccagctccatttctctgagattttttaagcccagtgtttttcaactgggagtgattttgccacctagataacatttgtcaatgtctggagatattttaagttatcacaactgggtagagatggggtgggaaggggaaggctactggtatctaatgggtagaggccagggatactgttaaacatactacaatgcacaggccaaccctcaacaacaaagagttaccccaccaaaagtgttactaatcctgaagctgagagaccctaccctaagctacatacattctcctttgtgagtggtctttattcacacataataacatacagagaaaaaagacactgtctttttctggagttcctaactaataggaaggaaatttgccagtttcataaaatgagtttggaagctttctacctttttcataaactaaaattttatatgaaaaagctcackgttttttgaaggaaccataggt

SEQ ID NO: 620497 - DNA, 549 bp, Homo sapiens
gagatctttctaactttttcatgtggatatttagtgttataaatttccctcttaacgttaccttagctgtgttccagagattctggtacgttgtatttttgttctctttagtttcaaagaacttcttgatttctgccttaattttattatttacccagaagtcattcaggagcaggttaataagtctccatgtgaytgcaaggttttgagtgaatttcttaatcttttctaatttgattgcactgtagtctgagagattatttcttatgatttcagttcttttgcaattacttctgattatgtgatcgcttttagaataactgccatgtggcaatgagaagagtgtatattctgttgttctgaggtagaaagttctgtagatatctatcaggtccatttgatccactgctaagcccagatcctaaatatctttgttaattttctgtctcggtgatatatttaatattgtcaataggctgttaaagtctcctactattaccatgtgggagtctaagtctcttcaaaggtactccaagaacttgctttatg

SEQ ID NO: 620498 - DNA, 539 bp, Homo sapiens
cgtcaacatatcatcatttatcaattcactatgataaacatttaaatttcttcctattcttagtattgtaaagcttgattaggcaaccaaycatgtgtagatgtgcatgaatttctctatgttatatacctaaacatgaagtattgagtcacatgatatcagcactttcaaccttattatatattgtcaaatttctctcaattttctaatgctttatttagaaattttgtatttatgtccagaaaagagacttactataactttcttttgttatactttctttgtctatttttcagaaactattcattaatagtttcataaagtaagctgggagcatacccttattttctagactgaaagagatttatgtaatagagattattcctcaaaagtgtaataaaaatcacatccacttgggcctgatactttagaatggagtaggaattagggcaatatttttaaatttcagttcaatttctttaatgataatcagtctacttagattttctacttcttccggtatcactctgatcatatat

SEQ ID NO: 620499 - DNA, 412 bp, Homo sapiens
tatcctccttatcaatacaatgtcgctttattttcagattcgtcattgtgcagtttatcacactccatgctgtaatacaggtagttctgaatatgttgtagccacctgtccttccttccccctctccccaccactaatttatgagctacttgagagcaggtattgtgggtcacttatcttcatgtccctcattacatctagcaatgagccttgctcacagtaggtgcttaaacggtattggttgaaattagttggattgcatttgtggggctctaaaatagttctgaccagcgcttayttgaagtaaattggaaaatagttttctcataaactatagcctgacaaccagagccctagcatttcaaatcttgatccttgtgttcctgtagctcctcctagtgggaaggttgca

SEQ ID NO: 620500 - DNA, 588 bp, Homo sapiens
accaagctgttttggttactgcagccctacagtatagtttgaagttgtgtaatgtgatgcctctggctttgttctttttccttagaattgctttggctattcaggctctctctcttctctctctcwctctctctctctatatatatatatacatatgtgtatatatatgtgtatatatataaaatacatatatataatatatgtaaactttagaagagtttttttagttttttttttttagtttttcattggtgaaaaaatgaagtttgtagcttgataggaatagcactgaatctgtagattgctttgggcagtatggccattttaacaatattaattattccaatccatgagcatggaatttttctccatttgcttgtgtcatctatgatttctttcagcagtgttttataattcttgtagagatctgtcacctccttgattagatgtatttctaggttgtttttttctttttgcagccattataaattggataatgttcctgatttgcatctcagcttgaacattattggtgtatagaaatgctgctaattttgtattctgaaactttactgaagttatttgtca

SEQ ID NO: 620501 - DNA, 588 bp, Homo sapiens
accaagctgttttggttactgcagccctacagtatagtttgaagttgtgtaatgtgatgcctctggctttgttctttttccttagaattgctttggctattcaggctctctctcttctctctctctctctctctctctatatatatatayacatatgtgtatatatatgtgtatatatataaaatacatatatataatatatgtaaactttagaagagtttttttagttttttttttttagtttttcattggtgaaaaaatgaagtttgtagcttgataggaatagcactgaatctgtagattgctttgggcagtatggccattttaacaatattaattattccaatccatgagcatggaatttttctccatttgcttgtgtcatctatgatttctttcagcagtgttttataattcttgtagagatctgtcacctccttgattagatgtatttctaggttgtttttttctttttgcagccattataaattggataatgttcctgatttgcatctcagcttgaacattattggtgtatagaaatgctgctaattttgtattctgaaactttactgaagttatttgtca

SEQ ID NO: 620502 - DNA, 588 bp, Homo sapiens
accaagctgttttggttactgcagccctacagtatagtttgaagttgtgtaatgtgatgcctctggctttgttctttttccttagaattgctttggctattcaggctctctctcttctctctctctctctctctctctatatatatatatacatatgtgtatatatatgtgtatatatataaaatacatatatataatatatgtaaactttagaagagtttttttagttttttttttttagtttttcattggtgaaaaaatgaagtttgtagcttgataggaatagcactgaatctgtagattgctttgggcagtatggccattttaacaatattaattmttccaatccatgagcatggaatttttctccatttgcttgtgtcatctatgatttctttcagcagtgttttataattcttgtagagatctgtcacctccttgattagatgtatttctaggttgtttttttctttttgcagccattataaattggataatgttcctgatttgcatctcagcttgaacattattggtgtatagaaatgctgctaattttgtattctgaaactttactgaagttatttgtca

SEQ ID NO: 620503 - DNA, 525 bp, Homo sapiens
agaacccttaaaaatttcatcaatatactgatccaactttgtgtatcatttcacattaaaagtaacaaactggtaggcagaagtttttaaattttttaatccctttctccaaggaaaacaatcaaatttaatagaaacttatgcacagaattctgcttacatactaactacccaagcctttgmtgcctagtactggcaacatggttaaacatggacataccctgttttctaaaacagttgaatttacttaatcatgaaatatataaatacttttttgaaataaatataagggggaaaaagacccaaaaaagtatctatggttttatttatcatctcttgaaaatatttccttaaaaatagttttttccttaaattttttttccttaaaaaatgtgtttaattatacaaggcaaaatctatacacagaaatactgatacatgtgctatcaaaaagataacacatcatgatcaagcaggtttcatcccagggatatagaaatggtttaacataggccaatcagtaaa

SEQ ID NO: 620504 - DNA, 630 bp, Homo sapiens
acatgcacaaaacttaattaataggagtgcatgactaaaaattatatagaccactaccttacggaaaatagcataagaaatttaaaacaatcatgaaaagaatgtgctgtcggggcagttgccatgctgatggtgtggctgcagagaaaatgaaatggatgycctggcaatagaattcattctttcatcagcaattatgcattgggtgcctaccaaatgccaaaggcctttgccactggagaagtgattgggttgttagaaatagagtaaataaaacaaatagtaaaaataggtaaatccatgaccatcccctcccacacttcaggattatcctccctttccttaatagtgctctgatccttatcttcaagtaaggatccctgaaagaacccaaccatttctgtgcaactgagaaactacaaactacactatgattatttagtgaatatgtattaatatactgagcgtgagattgccaattgtgaaaaaaaaagatgaattaattcaaatgattccagttttgctcaggatcgtcaagtacatatacttttcaaatacatggactaggatcccaagaaactaaatgtatatccatatacatttgttgtgagtgccaaaaaatatttctca

SEQ ID NO: 620505 - DNA, 595 bp, Homo sapiens
  misc_feature 1, 2, 3, 4, 5, 6, 7, 8, 9, 10, 11, 12, 13, 14, 15, 16, 17,18: n = A,T,C or G
nnnnnnnnnnnnnnnnnngtagatattcttcctccaccataagagtcttattttgctttccaacagcagatttcaagtaagagtcttgttttctgcctgcatcttgttactgactacggtcacagaaaaacaaactcttctgaaaatccctgaatgtgatcgacatgactcaagcatgtgggagttattattaagtgtgacagagcacaaaaatattttccttaagctaaagacttttaccaaacatcatccagtttaaaacaacatacattttgattgaaactgcaaagagcatattatgtttgcaatgcrgctggcaggaggcagatacagactgtccatcactgggaagaatgtgagggaaaatacatcattcagactggatcactcctgcaaacagctatcaactataggcatcacaattacctatgcaaagaagagcttaatttcaatgtgataaatgacatttgggcatgtatccaatactacaatagttcaaacatttatcaagctagcatttttctccaaatgctttctctccataagtggagcagtaaaagattgccttacaaacaaagagtgaaaagattctcaa

SEQ ID NO: 620506 - DNA, 620 bp, Homo sapiens
caaaaactgcattcttcttcctttatgctttcaacagccaaggttctccagaatacagtgtrcaaggaaggttagcaagacagtccatgaaaatggagaaataattattagaattgttattaacaatctcattcttctgattaactatattttataaagcaacagaatatcttatttgtaaaatatgtatttagagactacatgcacaaaacttaattaataggagtgcatgactaaaaattatatagaccactaccttacggaaaatagcataagaaatttaaaacaatcatgaaaagaatgtgctgtcggggcagttgccatgctgatggtgtggctgcagagaaaatgaaatggatgccctggcaatagaattcattctttcatcagcaattatgcattgggtgcctaccaaatgccaaaggcctttgccactggagaagtgattgggttgttagaaatagagtaaataaaacaaatagtaaaaataggtaaatccatgaccatcccctcccacacttcaggattatcctccctttccttaatagtgctctgatccttatcttcaagtaaggatccctgaaagaacccaaccatttctgtgcaactgagaaactaca

SEQ ID NO: 620507 - DNA, 445 bp, Homo sapiens
aattctgagcacagtggctgttaacctcactcaacttggatgaagcagaagccaacattttaaaattgagctactttttatttctccaggataaaagaaatccaaggagatagaagtccatccctttggcatgagcttcagtgttcaatgacatatgtgtccacacaactttctgataacactttagagaaggaagacaagtgacaatactatttatcggtccgtttgcatatgcaatttcagtaaattctagcagcaatttcttgacacagtcattaatatttctacttcatatacaaagaaaccaaaattcaaaaggttgatttagtgaaggtagtacagctggaagagcaaggatttggactcagaccatatagacttggaaactgggtaatctctttrtccccttgctacctgtgggcctgaccatcttattcaagaacca

SEQ ID NO: 620508 - DNA, 515 bp, Homo sapiens
cttctccgtgtagccagagatttctcacagtatagaggcttcaaggtagataaacttttcyatggtctctctgggctacaaacatgaatgtcccctctaaatattggtaaagatgtgaactgaatgaagttcattgctgatggaacaactgctgtgtaaaactgtccagtagtttctaataaaattatacatatatagagcaatatggataaatttcaaaaacattatattaaatgaaagaagacaaagacaaaataatatatatatacataatttcatttatatgaatagacaaaaactaatctagagtaacggaaatcaaaacaccagtacctacgttacgcctcaaagagggcacaagagaactttcaatattattaagtaaatagaaattattgtaggggtgatgatagtattgtgcttatgtagtcaaatctctgatggtagaaatatgcatacagcaagtgtcattatatctgtacattactttcaaattgctcagcaaacaatcaaat

SEQ ID NO: 620509 - DNA, 515 bp, Homo sapiens
cttctccgtgtagccagagatttctcacagtatagaggcttcaaggtagataaacttttccatggtctctctgggctacaaacatgaatgtcccctctaaatattggtaaagatgtgaactgaatgaagttcattgctgatggaacaactgctgtgtaaaactgtccagtagtttctaataaaattatacatatatasagcaatatggataaatttcaaaaacattatattaaatgaaagaagacaaagacaaaataatatatatatacataatttcatttatatgaatagacaaaaactaatctagagtaacggaaatcaaaacaccagtacctacgttacgcctcaaagagggcacaagagaactttcaatattattaagtaaatagaaattattgtaggggtgatgatagtattgtgcttatgtagtcaaatctctgatggtagaaatatgcatacagcaagtgtcattatatctgtacattactttcaaattgctcagcaaacaatcaaat

SEQ ID NO: 620510 - DNA, 515 bp, Homo sapiens
cttctccgtgtagccagagatttctcacagtatagaggcttcaaggtagataaacttttccatggtctctctgggctacaaacatgaatgtcccctctaaatattggtaaagatgtgaactgaatgaagttcattgctgatggaacaactgctgtgtaaaactgtccagtagtttctaataaaattatacatatatagagcaatatggataaatttcaaaaacattatattaaatgaaagaagacaaagacaaaataatatatatayacataatttcatttatatgaatagacaaaaactaatctagagtaacggaaatcaaaacaccagtacctacgttacgcctcaaagagggcacaagagaactttcaatattattaagtaaatagaaattattgtaggggtgatgatagtattgtgcttatgtagtcaaatctctgatggtagaaatatgcatacagcaagtgtcattatatctgtacattactttcaaattgctcagcaaacaatcaaat

SEQ ID NO: 620511 - DNA, 549 bp, Homo sapiens
agtcccagctacttgggaagctgcagcaggagaatcgcttgagcctgggaggcggaggttgcagtgagccaagattgcaccactgcactccagcctgggcaagacagtaagaacgtgtctcaaaaaaaaaaaaaaaaaatcacttcttaggctccctctgtcttctaaacataaacactctaaggaccagcatgaatggagctaaggacaggccccccaggcttgcatatgtgaggcaggtggcctttgctgactttgcagcttgcctattccactgccaggattagaggtcakcagagtcagggaggctcaaggtcagggaaaaggaagttcaaatctcaaagtggcctaaggctaagaagaacccagaactcagaaggggcatggctactctggaatctagctcaactctcctacggatgcattcacttgagtggaacagccaggattgaaaactctgtgcacaagctgtttaacaagaagacagcagcccaaagaacgtgtgagtaaaggcagaagaatcacagtcacttatttttaacaaagtga

SEQ ID NO: 620512 - DNA, 609 bp, Homo sapiens
ataagaatgatatgatgtactttggggactcagrggaaagggtgggaggagggtgagggataaaagacaacaaattgggtttagtgttactgctcaggtgatgggtgcaccaaaatttcacaaattgccaccaaagaatttactctgtaaccaaataccacctgtttccccaaaacctgtggaaataaaggaaaatgcaaaaataaaaaaggatggccgggtgcggtggctcacacctataatcccagcactttgggagaccgaggcgggtggatcatgaggtcaggagttcaagaccagcctggccaagatggtgaaaccctgtctctactaaaaacacaaaaattagcctggcatggtggcaggcgcctgtaatcccagctacttgggaggctgaggcagagaactgcttgaacccaggaggcggagtttgcagtgagccaagatcgcgccagcgcactccagcctgggtgacagagcaagactccatttaaaacaaaaacaaaaacaaaaaaccaaaaaaaacaccaaaattctttggaaataatgaaaacaaacgtacaatataccagaatctctgggacacatctaaggcagtgttaagagaaa

SEQ ID NO: 620513 - DNA, 424 bp, Homo sapiens
tacatggaaaacactttaaaagtgtattggcatatagaaaaaaacataatagctatcattattattattatttcaagagctgtatttgaatagtatgctgagtaatgagacagatccttatgtttcaatggtgaccaaagatttagaaatgttagcatagttgccagtgaaagatgctggttttgcttggggctcctagggaaaccaggcacgtagatgggaatggacgggtacagtctggaagcagtggatgagaagggatttggggaagaagaaagccagaaggctagcatttcttttttccttcatggtttatctaagttggggccacagaggggtgaatattgttctgttgaacaaacagggggatatggcagtgtctggggctttgggggaycagtggtggtttctgggtatggctttt

SEQ ID NO: 620514 - DNA, 562 bp, Homo sapiens
gatcacttgaagtcaggaattcaagaccagcctggccaacatggtgaaaccctatgtctactaaaaatacaaaaaataagctggaagtggtggttggcacctgtaatcccagctccwcgggaggctgaggcaggagaatggcttgaacatgggaggcagcggttgcagcgagctgagatcgcgccactgcactccagactgggcaacagagtgaaactctgtctcaaaaaaaaaaaaaaaagaggagatttgaaggcagatacacagacagtaagaacaccatgtgaacagaaagacagccatcttccaaccaaggagagaggcctggagcagattcttgctcactgcccttagaaggaaccaaccctgctgacatcttaattttggacttctagcttccagaattgtgagataataaatttctgttggtttcagttgcccagtctgtggtagtttgttgtatcacccctagcaaactaatcagaccgtaattataaaatctataatatataggtaaatatttttgtgattgttggtatatagataaaaatttataaagcaa

SEQ ID NO: 620515 - DNA, 562 bp, Homo sapiens
gatcacttgaagtcaggaattcaagaccagcctggccaacatggtgaaaccctatgtctactaaaaatacaaaaaataagctggaagtggtggttggcacctgtaatcccagctccacgggaggctgaggcaggagaatggcttgaacatgggaggcagcggttgcagcgagctgagatcgygccactgcactccagactgggcaacagagtgaaactctgtctcaaaaaaaaaaaaaaaagaggagatttgaaggcagatacacagacagtaagaacaccatgtgaacagaaagacagccatcttccaaccaaggagagaggcctggagcagattcttgctcactgcccttagaaggaaccaaccctgctgacatcttaattttggacttctagcttccagaattgtgagataataaatttctgttggtttcagttgcccagtctgtggtagtttgttgtatcacccctagcaaactaatcagaccgtaattataaaatctataatatataggtaaatatttttgtgattgttggtatatagataaaaatttataaagcaa

SEQ ID NO: 620516 - DNA, 531 bp, Homo sapiens
caatctggatagacaaatctgcgggcttcagagragagagaatagcatgataaatgcacagtacagaggcagtgggctccaccgctggcagtccgggaatagcttgagccaggctgaccaggagccaagggatgttcttgaaggccaggccacgttcttcaccacctggcagagctgagtcccacagagccatgaaggcactggaatttaagagactgtgatatctcaaaatcacaatgttaaaaaaaaatacaacttttgtaataacactgaaattcagtctgttgatcttcttataacaagtatagctaactaatgaggacatgaaatcactaacacagttgttgtctgcttacgtaagtaaaacagctgcacaagctgtgaaaagtccagagaaagcacgtaaaatgatccatcacacaaagtccaccattctttcccaaatccttgttacagaaaaccaaccaacaaacaaacaaatcaacaactcattctctagaagtacagggtgggacatggcaaataaagaaa

SEQ ID NO: 620517 - DNA, 531 bp, Homo sapiens
caatctggatagacaaatctgcgggcttcagaggagagagaatagcatgataaatgcacagtacagaggsagtgggctccaccgctggcagtccgggaatagcttgagccaggctgaccaggagccaagggatgttcttgaaggccaggccacgttcttcaccacctggcagagctgagtcccacagagccatgaaggcactggaatttaagagactgtgatatctcaaaatcacaatgttaaaaaaaaatacaacttttgtaataacactgaaattcagtctgttgatcttcttataacaagtatagctaactaatgaggacatgaaatcactaacacagttgttgtctgcttacgtaagtaaaacagctgcacaagctgtgaaaagtccagagaaagcacgtaaaatgatccatcacacaaagtccaccattctttcccaaatccttgttacagaaaaccaaccaacaaacaaacaaatcaacaactcattctctagaagtacagggtgggacatggcaaataaagaaa

SEQ ID NO: 620518 - DNA, 604 bp, Homo sapiens
gtacaattgttggaacctgaccctatgttaattttgagataataggcaagttattttaaccttctctcagacttacttttatcatctgtaaagttggtataaaataggcgctatgtcccagaattatgtgaattaaatacattaatggatatagtgtttataatgccttgtacttgtcaaatggtagttattgttatagtctcctatttatgatctgcaatttaaaagtttgtttatctaattatgtacaagacgacttttcattatttaccatctttgtttaaattcaattataataaaactcatttctgaaaaagtgtacacatacaagttaaataaaatggaaaccttttgctaagaagccagtagacattctggcagctacatagtgacagctacatgggagactgaggtgggaggtttgagttcaggggtttgaagctgcaatgagctgtgatcgggccactgtgttccagcctggrcaacagaacaagactgttaatataatgaatgcatttggtaagggactgaaattgatagaaaactttaatgatcattacaattgatagattatcatggaaataactttcttgtttaaaaaaat

SEQ ID NO: 620519 - DNA, 556 bp, Homo sapiens
aacaattttaaactgttttgttatgtaattctccttagtgttatgctaattcattgcgataatgagtaactagctagctcccctctgagctcttagctgaaaccatagatatgggcttgtttaccttttgaccttttgtttaccatttgacccttaaaactggctctagaactttgttctcctcttgagcattcatttgtaattttaaaacttgtttagccaaatggtacttcttttctaattgcagctgtaaagaagaaagtccagctgttgttaaaaaggaggaaaaagtgcttcatgaattatttgggayggacataaggtgctgtgccagaaatgaactgggcagggaatgcaccaggctgttcacaataggtaacactataatatcatgcactttcattttcagtgaccggttcttagcaactatcagggactaacagtaactgcgtaggtgatcattcaacttcagaaatcctatcattccttcaggtcacagtaaatgcaatattatggattctgtaaatgctgatttcttcataaaagaggagtcagt

SEQ ID NO: 620520 - DNA, 498 bp, Homo sapiens
gttatctgttgcagcttaacattttaattcaaagcttagcatcttaaaataacaaacatttggccaggtgtggtgkcttatgcctgtaatcccagcattttgggaggccgaggcgagtggatcacttgaggtcagagttcgagaccatcctggccaacatggtgaaaccccatctctactaaaatccaaaaaactagccaggcgtggtggtgtgcgcctgtagtcccagctacttgggaggctgaggcaggagaatcgcttgaacccagagatcacgccactgcactccagcctggcaacagagtgagactgtcaaaaaaaagaaaggaaggaaggaaggaagagagagagaaagaaagggctaaaaaaaagcgtatagctatctgttgcagcttaacagattaattcaaagcttagcatcttaaaataataaacatttggccaggtgtggtggcttatgcctgtaatcccagcactttgggaggccgaggtgggtgg

SEQ ID NO: 620521 - DNA, 498 bp, Homo sapiens
gttatctgttgcagcttaacattttaattcaaagcttagcatcttaaaataacaaacatttggccaggtgtggtggcttatgcctgtaatcccagcattttgggaggccgaggcgagtggatcacttgaggtcagagttcgagaccatcctggccaacatggtgaaaccccatctctactaaaatccaaaaaactagccaggcgtggtggtgtgcgcctgtagtcccagytacttgggaggctgaggcaggagaatcgcttgaacccagagatcacgccactgcactccagcctggcaacagagtgagactgtcaaaaaaaagaaaggaaggaaggaaggaagagagagagaaagaaagggctaaaaaaaagcgtatagctatctgttgcagcttaacagattaattcaaagcttagcatcttaaaataataaacatttggccaggtgtggtggcttatgcctgtaatcccagcactttgggaggccgaggtgggtgg

SEQ ID NO: 620522 - DNA, 516 bp, Homo sapiens
ggttcaagcaattcccctgcctcagcctcccaagtagctacgactacagtgccaccatgcccagctaatttttgtatttttgttagagatggggkttcaccatgttggtcaggctggtctccaactcctgacctcaaatgatccacccgctttggcctcccaaagcgctgggattgcaggcatgagccacagcgcccagccaatcagtttcctttaagacagtaattgagctttaaatagaaggtagtgtgttaggtcttggccattggaagctcgcttttctccccataaccagcctgtttcattgctttatctcctcatgtttcacttatttcaggccatcttccttcacttctgtttctgacctaaggtagacacaacactctttaaaaaaatttttaaacccccagcagctacacaaaaacttaaaaaatttaaaattgaggtaaaatacacatacataaaatttaccatcttaactttttgtttttgtttttgtttttgagacagagtctc

SEQ ID NO: 620523 - DNA, 516 bp, Homo sapiens
ggttcaagcaattcccctgcctcagcctcccaagtagctacgactacagtgccaccatgcccagctaatttttgtatttttgttagagatggggtttcaccatgttggtcaggctggtctccaactcctgacctcaaatgatccacccgctttggcctcccaaagcgctgggattgcaggcatgagccacagcgcccagccaatcagtttcctttaagacagtaattgagctttaaatagaaggtagtgtgttaggtcttggccattggaagctcgcttttctccccataaccagcctgtttcattgctttatctcctcatgtttcacttatttcaggccatcttccttcacttctgtttctgacctaaggtagacacaacactctttaaaaaaatttttaaacccccagcagctacacaaaaacttaaaaaatttaaaattgaggtaaaatwcacatacataaaatttaccatcttaactttttgtttttgtttttgtttttgagacagagtctc

SEQ ID NO: 620524 - DNA, 584 bp, Homo sapiens
cttcatgccttgtctcccaacacaaacttcatgccatgtctcccaacacaaacttcatgccttgtctcccaacacaaacttcctgtctggccctgatggagaatttcacgacaacattgaaacaaatgtaaggcccttctgagtgtgaggatttttgaattgtacaagtaacatatatgaagatactccatccatgaataagaccttaaaaagaaaaaatgttgcaggatgggggttggggagtacaggattttatgtttcacaaaaagagttcaactaccagcctggccacatattttctttgtgatctggggacgtaatctatatcccacctcttaatctatctcatcttaaatgtcttcatctaaaaagtataaataatagtgtctacctctaagtaccactgtgaaaacctaacactgttgaggagattacactaggaatagtatccgaggagaragaccactgatttgaggtaaggaatgagagagagaaccctggtgagagggagcagtgggtttccatgtttatcagtttgggtcatttggcaagaaaaaaaaagatagcattagatgtgctagaga

SEQ ID NO: 620525 - DNA, 574 bp, Homo sapiens
cgttggaatgtggcttaagataataatcagattcaaagacattctgatgccaatggaacatggaatttggttatgatgcttttttcaggaacatattaagctttatttagagaactgaattcctattctgttttagtaggatgtatatgaggtgggcaaaggcttcatttctgcyactaacttaaaaacccccaaagacttaacctataggcttagaaggctctgatttaatcatttatccttcatttttagaaataaacatctttggctgggtgcagtggctcacgcctataatcccagcactttgggaggccaaggtgggcagatcacaaggtcaagagatcgagaccatcctggccaacatggtgaaaacccatctctactaaaagtacaaaaattaaccgggcatggtggcacgcacctgtagtcccagctacttgggatgctgaggaaggagaattttgaatctgggaggcggaggttgcagtgagctgagattgtgccactgcactccagcttggcaacacagcgagagtacgtcacagaaaaataaaataaaataaaataaacatat

SEQ ID NO: 620526 - DNA, 624 bp, Homo sapiens
gtaaaggaaaatatgctcatggtgaatgaaaagacaaagaaacacaacctatagaaagaaattgatggaaattctagaattaaaaatacagtatctgaaataaaaatttcaccacctagcttaacattagaatgcaaatgacagagaaaagagaagataggtaagtagaaattatttgatctgaagatgagaaaaaaaatagggggaaaagggaacagggctttcagaacctgtaggacgatagcaaatggtctcatagatgtatatttgaagtcccagaggagataatagaaagaatgacrcagaaaaaaaaaagcttaaagaaaaagtttatacataatattggaaggtatctttgtatcttaaactaaacccccaaaacacaaaccataggtgaaaattgcatacaaacactgccttgaaaatatcacatgcagaagcatttgcattaaatacattcatggaaatgaatgcacctagaaattactgatttattcctcataaatgtgtagaatgagaacaagttgactggggaaagtataatctatttttgctattttttcacttatacataaatcctaattaagtcaaccataagacacttatgcagagtggcttacctga

SEQ ID NO: 620527 - DNA, 533 bp, Homo sapiens
tgaatcttgaagtttgtttgtttatwtaaccagtttcccaattagaggaaatacgttgaaacaggatagtacttttttccaattatagaaataaatgttatgcatagaagatgttaagggtattgtttgttttatttttaacctctttcaagagctattgtatgttcaggctatggtttccctagattattattgttacattattgttagggaggggttagtctcaaaattaatcccaagagactcaatgaaattgcaatccagccaacatttcatgtctccaaaccaaaatatgcatattcctactgtccctcttacctagaattcactttctttcccagtttcacaagggaaatattatctcctgatgtttcctttgatatgtgaggtcaaaaagttaattgttcttttttttctaagagcatgctaaacatgggcttttgatatctctctacagcttcaccatcctccaagtcagattttaataatatcatgacccataaccttttgtttcaaaattggcttttgcagga

SEQ ID NO: 620528 - DNA, 521 bp, Homo sapiens
gtagaagacgagcctccgctctcgctctccctctccctctcccctctttccacggtctccctctgatgccgagccgaagctggactgtactgctgccatctcggctcactgcaacctccctgcctgattctcctgcctcagcctgccgagtgcctgcaattgcaggcgcatgccgccacgcctgactggttttcgtattttttgggtggagacggggtttcgctgtgttggccaggctggtctccagctcctaactgcgagtgatccgccagcctcggcctcccgaggtgccgggattgcagacggagtctccttcactcagtgctcaatggtgcccaggctggagtgcagtggcgtgatctcggctcgctacaacatccacctcccagcagcctgccttggcctcccaaagtgccgagattgcagcctctgcccggccgccaccccgtctgggaagtgaggascgtctctgcctggccgcccatcgtctgggatgtgaggagcccctctgcctggctgcc

SEQ ID NO: 620529 - DNA, 407 bp, Homo sapiens
gagtttcaaaattgaatcagtaataaatagcctaccaaccaaatcaaacaaacaaacaaatgagcaaaaagacccttggccagatagtttcacactcgaattctaccagatgtacaaaggagagttattaccaatactactaaaattattccaaaaatttgaggaagagcgactcctgtctaactaattgtacaaagccagcatcattttagtgccaaaacctggtagagacacaacaaaaaagaaaactttaggtcagtattcttgttgaacatagacacaaaaatcctcaacaaaatactagcaaaccatatccagcagcacatcaaaaagttattttaccatkgttaagtaagctttatttctatgatgcaaggttggttcaacatacacaaatcaataaatat

SEQ ID NO: 620530 - DNA, 602 bp, Homo sapiens
actatcatgagaatagcaagggaaaggcttgcccctatgattcagttacctctcatcaggtccctcccataacacataggaatttaagatgagattgagtggggactcagccaaaccatatcaaatatgtaattaacattaattgaatttgcacatttaaatcctaaaacacaagtgtggtggtatttccctaaagccaaagtataaggacatttgggtttaaaaaaattaaaatataagcacaattacaaataatcttgaaatgttgtgataaatatataaagtgaggtattagctgtgtcccaacaaatcaagtaatttcaaaacaaaaattctgagtcagagggtataaatggacatttttcaaaataagaagctggctgggtgaggtggctcatgcctgtaatcccagcactttgggatgctgaggcaggcrgatcacctgaggtcaggagttcgagaccagcctgaccaacatggagaaaccctgtctctactacaaatacaaaaaattagccaggtgtggtggtgcacacctgtaatcccagctacttgggaggctgaggcaggagaatcacttgaacccaggaggtggaggtagc

SEQ ID NO: 620531 - DNA, 552 bp, Homo sapiens
cacgcctgtaatcccatcactttgggaggctgaggtgggtggatcaagaggtcaggaaatcgagaccatcctggccaacatggtgaaacctcgtccctactaaaaataaaaaaattagctgggcgtggtggcgcatgtaatcccagctactggagaggctaaggcaggagaatcccttgaaccagggagttggaggtcaccttgtactacctaatcaaaattttaagtctagaaattaaatatatgactataataagctctgaaatatagaagtaaaatagtaaaagaaaagttgtttcatgcaaaatagtgaataatactttagaatactactttgttacactaaaatttttctaaatactaggtagtggatcaaatttgtcacactcaaaatatcaaatatatgtcaatttgagaagcacattgaaatttggacattgaartttaattatcattttgttgttttattataaacaacataaagagatagctttatgttgtattattacttcctgataaaggcccattcatttttttctaaaattatttaat

SEQ ID NO: 620532 - DNA, 474 bp, Homo sapiens
acacacacacacacacacacatgtttcctatatatcttaatactacggtcctcacatggcctgttttgtgtgcacgcacatccctggtgtgtgtctcactctatatatcctagtctctccttataaggacaccaatcagattggattaaggcccaccttaacagcctcttttcaattaactctttaaaaaaccaatatccaaatatagtcacattctaaggttctggaggttaagccttcaaaatacaaatttttgggaaacacaattccatccataatagatggttttgttgaattcttatgtagttttgctgattttctgtcaattgttgagcagatggtgctgaaactttcaactgtaactttatgtgaacttgtctttttctcctttcaattccatcagttttcgcatcccatattttccagcttcattgttkgttgcatgcacatttaagattgctgtaccttcttggt

SEQ ID NO: 620533 - DNA, 553 bp, Homo sapiens
gcctgggcttaagaaagagatggataaaatgttaataatgaagataaacttaaaaatgtatatatctgtagccatgcattctaaataacacaaaatatctgtttaaaaatttttcctcaatttgaaaatcattatttggctcagcaaagaagtcactcatcattaaataagtgacattcctacatagtcctgaagctgaaagagatttttacttaataaatgtaawttgtataaggatgagaaatagtttaattataagacacataacaaatgtagtgatgatagattgtactaggaaaagagttagcagattggaaagaaatttcatttctcaggtagcagttgcaatcgtaagttggctaaagacacaagagttcaccaaaaatcagcaaaagcattctttatttatggggtggatatatggaatttacaataaaatgtattgtatatgttattatttataaatgtgtgctacacatctgtatatctaatatttataataaagcatatagatacatgtatgtatataacacacacctacatatacagtctg

SEQ ID NO: 620534 - DNA, 553 bp, Homo sapiens
gcctgggcttaagaaagagatggataaaatgttaataatgaagataaacttaaaaatgtatatatctgtagccatgcattctaaataacacaaaatatctgtttaaaaatttttcctcaatttgaaaatcattatttggctcagcaaagaagtcactcatcattaaataagtgacattcctacatagtcctgaagctgaaagagatttttacttaataaatgtaatttgtataaggatgagaaatagtttaattataagacacataacaaatgtagtgatgatagattgtactaggaaaagagttagcagattggaaagaaatttcatttctcaggtagcagttgcaatcgtaagttggctaaagacamaagagttcaccaaaaatcagcaaaagcattctttatttatggggtggatatatggaatttacaataaaatgtattgtatatgttattatttataaatgtgtgctacacatctgtatatctaatatttataataaagcatatagatacatgtatgtatataacacacacctacatatacagtctg

SEQ ID NO: 620535 - DNA, 586 bp, Homo sapiens
cctcccaggctcaggtgattttcccacctcagccactcaagtagctgggactacaggtgtgcaccaccatacctggctaattttttttatttttagtacagacagggtttcaccatggtgcccaggctggtctygaactcctgaactcaagcaatccatctgccttggccttccaaagtgctgggattacatgcctgagccaccacacccagccagagccctgtaattttaatccctgctaccaccactttactggcccttgtgataagttgcttccctttcagcactgttggttccccttagaatagctcaaaatttcaaaatcttttcattaaatgctaagagaggctacagaaaagaagaaacacaaagaatctaggttttgatcttaccttggtttatttgctcccaaggttcacagactctgtcttactgaacgctttgtcttaagccccacaggactggtacagctggacagctcccccaccccaatgcccacctgcccccaactactcacctctacattctggccactgtgttaactcccaccacttggtggcccacttggaaacatctcaacatgttg

SEQ ID NO: 620536 - DNA, 426 bp, Homo sapiens
ctgggataaattccacctgatcatggcttatcatctttttgatgtgttattagatttgatttgctaatattttgttaaggatttttgcatctatgttcrtcagagatattgatttgtagttttttcttttggttgtgttcttgtctggttttggtatcagggtaatacttgtttcacggaatgagttagggagaatttcttcttcctcgtttttttcgggggatagtttcaggaggattgatattagttcttctttgtatgtttggtacaatttgtctgtgaatttatctggtcctgtgctttttttatcgggaggttttttttgttgctgattcaatctcgctacccattattggtctgtttgggagttctatttttcctggttcaactttggtagattgtgtgtttccagcaatttatcagttt

SEQ ID NO: 620537 - DNA, 611 bp, Homo sapiens
tttcatttcaccatttgtaaaataaagcagctgaacttgatatcacactagaacttgatcaaaagcccaagaagcaacaatgttttgccaatccctatgttatcttccctttttaaaattctgtaatgctgtgattacaaatagcttcctagttcctaaaaatttgatgttttaagygtcttactatttaagggtttaagaaaggacatttgcacaataatatacgatatccaaatttaaatataaaatatgcccaagaaaagcagataaggtctgcagtacctcagtgtccatataatggcattgaacaaatggaaacagatggtctgagagaattagacatattcttgtctattaaccactcctaagagatcatccctcaaataagagtttgtctaataacagttttaggtctatgcattatagatgaagacatttgaagaccaaaagcattcacatctgtagtttttaaattttaggcatactgagagttgtcaggaaaaatatttctgctagggccctttcacaccatataggtgataaccttatctgcttacatccatgtgatggtttggccaaaggccacaggtccttttacaaagcagggccta

SEQ ID NO: 620538 - DNA, 467 bp, Homo sapiens
tattaaccctcacatatgcagtggtagatcattctatatataatagtttttccccattatgcatataatatgatgtcagaatttttatgatcattttatccaataaattagctctggagctatttatggcttacttatttatttcttgtagagacaggatcttgctctgtcaaccaggctggagtgcagtggggtgaacatacatctctgtaacctcaaactcctgggctcaaatgatcctcttacctcagcctcccaaacagctagcactacaggtgcatgccaccacactaagctatttrtttatttatttatttatttttacagacagggtctcactatgttgcccaggctgatttcgatctttggtcctcaagtaattccccctgcctcggcctctcaaagtgctgggattaagggatgagccaccatgtccagccttttagcatatttaaattgaagctaaa

SEQ ID NO: 620539 - DNA, 524 bp, Homo sapiens
aaagcccattataaaaactatcagatctcatgacaacttactcactatcacragaacaggatggaggaaaccgcccccatgattcagttaccttcacctggtccctcccatgacacatggggattatgggaactacaattcaagatgagatttggatggggaaatagccaaaccatataaattttcatttcagagtactagacatttatttccttggttttggcttctttgaaaactactttaagatatatttgctgtggctgaatatctgtctctccctaaatttctatgttgaagcctaatccccagtgtgatgatatttagaggaggggactttgggaagtaaccaggtcatgaaagcagaaccttgtgaatgggattagtgtccttataagaagagacacatgagagcttgctttctttccctcttcctctcctctcacactcctctgtgtgaggatacaagaaggtgtccatctgcaaaccacatagagcttcctcactaggaatccaatcagccagga

SEQ ID NO: 620540 - DNA, 524 bp, Homo sapiens
aaagcccattataaaaactatcagatctcatgacaacttactcactatcacgagaacaggatggaggaaaccgcccccatgattcagttaccttcacctggtccctcccatgacacatggggattatgggaactacaattcaagatgagatttggatggggaaatagccaaaccatataaattttcatttcagagtactagacatttatttccttggttttggcttctttgaaaactactttaagatatatttgctgtggctgaatatctgtctctccctaaatttctatgttgaagcctaatccccagtgtgatgatatttagaggaggggactttgggaagtaaccaggtcatgaaagcagaaccttgtgaatgggattagtgtccttataagaagagacacatgagagcttgctttctttccctcttcctctcctctcacactcctctgtgtgaggatacaagaaggtgtccatctgcaaaccacatagrgcttcctcactaggaatccaatcagccagga

SEQ ID NO: 620541 - DNA, 597 bp, Homo sapiens
aaatagtactagatgtcaaacaatactattaaaatacttccaatttgaatatcacatcacagttttgaaaatgcatcttcatttattattgctttgttctcctgtagtacaaaagggaaaactgaggttacatatctaggaatcaaactcatgtcttctaattcttgagctatrtctactttggtctatagcttctaaatttgtaatagaagctcagaaatactcaggcgatgggcacagaggtgcatccaattaatcctatgactttaacaggaattaagaagggcttgattagctgggcacagtggcttacgcctgtaatcctagcacattgggaggttgaggcaggctgatcgcttgagcccagaagtttgagaccagcctgtgcaacatagtgagacccctgtctctacgaaaatattagctaggcattgtggcatgcacctgtagttccagctacccaaagggcaggttcacctgagcccaagaagttgaggctgcagtgtgccgtgattgcaccactgctctccagcctgggcaatagagcgagaccctgtctggaagaaaaaaaacaaaacaaaacgaaacagaaaaaag

SEQ ID NO: 620542 - DNA, 567 bp, Homo sapiens
attattgctttgttctcctgtagtacaaaagggaaaactgaggttacatatctaggaatcaaactcatgtcttctaattcttgagctatgtctactttggtctatagcttctaaatttgtaatagaagctcagaaatactcaggcgatgggcacagaggtgcatccaattaatcctatgactttaacaggaattaagaagggcttgattagctgggcacagtggcttacgcctgtaatcctagcacattgggaggttgaggcaggctgatcgcttgagcccagaagtttgagaccagcctgtgcaacatagtgagacccctgtctctacgaaaatattagctaggcattgtggcatgcacctgtagttccagctacccaaagggcaggttcacctgagcccaagaagttgaggctgcagtgtgcygtgattgcaccactgctctccagcctgggcaatagagcgagaccctgtctggaagaaaaaaaacaaaacaaaacgaaacagaaaaaagagcatgaccattctagttcccttgggtagtgcccatggattgaacaaatcatgg

SEQ ID NO: 620543 - DNA, 572 bp, Homo sapiens
gcttaataaagagaagagaaatagaaaggagaagaaagattattgaaaaggaataattacgaaaaacattctaaatcagggaaggaagtggacatccrgattgattaaccccaaagaatcctaaataagttgaatacaaagagatctgcaccaggatacattataattaaatttcaaaagttaaagacagagaattttgaaagaagcaaaagaaaagtgacttgtcatgtataagggaaccacctccataagacatcagtggatttttttttagtagaaatgttgcaggccagaagagagtgggacgacacattcaaaatactgaaagaaaaaaactgccaagtatacaatatctggcaaaactatcctttaaaaataaatgaaagagaaagtctttcccagggaaacaaaaactgagagagtttgtcactcctagacctattttacacaaaatggctaagggggttcttcaaattgaaaacaaaaacatgctaaacagtaacgtgaaagcataagaaaacataaatctcactggcaaaagtaaatatacagacaaatatataataatgtaa

SEQ ID NO: 620544 - DNA, 572 bp, Homo sapiens
gcttaataaagagaagagaaatagaaaggagaagaaagattattgaaaaggaataattacgaaaaacattctaaatcagggaaggaagtggacatccggattgattaaccccaaagaatcctaaataagttgaatacaaagagatctgcaccaggatacattataattaaatttcaaaagttaaagacagagaattttgaaagaagcaaaagaaaagtgacttgtcatgtataagggaaccacctccataagacatcagtggatttttttttagtagaaatgttgcaggccagaagagagtgggacgacacattcaaaatactgaaagaaaaaaactgccaagtatacaatatctggcaaaactatcctttaaaaataaatgaaagagaaagtctttcccagggaaacaaaaactgagagagtttgtcactcctagacctattttacacaaaatggctaagggggttcttcaaattgaaaacaaaaacatgctaaacagtaacgtgaaagcataagaaaacataaatctcactggcaaaaktaaatatacagacaaatatataataatgtaa

SEQ ID NO: 620545 - DNA, 469 bp, Homo sapiens
aaaagtgaaattacctccacagataacatgattatatacgtaggaaaccctgaagattcaaccaaaaaacaatgttagaactaataaatgagtttaacaaagttttttggtgcaaaattaacatacaaaaatctgtggtatttgtgtacacaaacaggaaagtcatcaaaaagaaatttaagaaaaccatcccatttacaataacaaagaaaatacttaggcatacatgtaatcaaagaagtaacagacttgttaactgaaaattataaaacrttggtgaaggaaatcaaagacacagataaaatggaaagacatccatgtccatggattgaaaaaaatgtgttaaaatgttcatactacccaaaatgatctatacattcaacacaacccctatcaaaattcaagtggcattctttatagaaatagaaaaaaaaatgctaaaatcaaatgaaaccacaaaagaccctga

SEQ ID NO: 620546 - DNA, 613 bp, Homo sapiens
aacttgtgctgcatttcttatccatgatgagatgctgagctcaagttcctaacctctccaagtcctgttccgggatagtgctggagcattaaagtagcatatagtagagggaacagacttttaaacaggtaattagagggtgacagcagaagtctttccaaggtacaaaagtagtgcaaagcagggagtgactattgcagaaggcaggaaaggtagcacctaaaataattgaggaattattttaaccctggaggtgcctaacttagctgcgggtccattggctactttctattatccattaactcctccctgtcctcacacttgaacttcatgrtccaatcacttcaataattatcttgtcctctgggaaacatgcagtgtttgacaaacccagtaatctgcttgttctgtccctgtacctaggtggctctacctgtgggaggaggacaattagcaggagggcttggtatgggtatattctcagcacatcacgcacagtggcactctcagccctctctatcccctactgctactctctcacccctttccttcactggctggaacttcttcactttcctcaaaaccccctcttctcagactcagagagaagatc

SEQ ID NO: 620547 - DNA, 538 bp, Homo sapiens
gttgaagtttgggctgtgatccagtaaatggtgcttaagtrtaatggtaagttcttgctcaaccacgtggctcctctgtatttcctctcgatttcagctgtgctccctcttagtgctctgaaagtgtagtttcttctcccagtcaatttctggctgcagatcttggattggcactcccagggtgcacactgcagctctggggtgagctcaggctttgtgtgtcctctccaacttggaggcagcagagggagggaccttggcagtggctgtagcagagagccattcacttgtctcttggggctccagcccagagaaatacggagctgctaccagttggtgtgattggcccagagttgggcagctgtgttatgggcccaagctggggtgggggcggggcttgcttggtgatgagcagggagcattggaggctcataggtgagctagactggcctcttctctttaagatggctgtggtttctggaggtgtaggtaaagcacttagggtctttgttccttccttagtccaagggcagcaagg

SEQ ID NO: 620548 - DNA, 538 bp, Homo sapiens
gttgaagtttgggctgtgatccagtaaatggtgcttaagtataatggtaagttcttgctcaaccacgtggctcctctgtatttcctctcgatttcagctgtgctccctcttagtgctctgaaagtgtagtttcttctcccagtcaatttctggctgcagatcttggattggcactcccagggtgcacactgcagctctggggtgagctcaggctttgtgtgtcctctccaacttggaggcagcagagggagggaccttggcagtggctgtagcagagagccattcacttgtctcttggggctccagcccagagaaatacggagctgctaccagttggtgtgattggcccagagttgggcagctgtgttatgggcccaagctggggtgggggcggggcttgcttggtgatgagcagggagcattggaggctcataggtgagctagactggcctcttctctttaagatggctgtggtttctggaggtgtaggtaaagcacttarggtctttgttccttccttagtccaagggcagcaagg

SEQ ID NO: 620549 - DNA, 600 bp, Homo sapiens
ttaagcagtgtgagcacagcatagcattagccagatgctgtaacagtcagaccaggayttctttcatcaaagtgcaaagtagttgtggaaagaagaagggatgagcttatgagtcagatttgagtttgaatctagcagcagggacctaatctgtctgttctgttcaccattgtttcccacactacctggcaaatagtaggcactattttaataaatgtttgtggggttactcatcttcttcactatccattctatgaacatagccaaatcccgttacttctgtgaacctatgttttttcatctatacattgataatcaccaagcatagttctctggatgggttgatacagagacttaagtgagatatggtatataaagctccaagcatagtacctgacactcaataaatgtgagctgtttcacttcttggactaacttgaaattcctggtcatgttctgcctaggtgttacggtgaaggaagttcagttaattgttaggctcagctactgcaggttcactcactttttgatgggtcagaataactttttaatttcatcctttcccaacttttcatttcctgactctgtcaccaccttccc

SEQ ID NO: 620550 - DNA, 600 bp, Homo sapiens
ggtgcagcaaccctatccaccctggcttggctctagccatgacaacaacctacacattcacaccatgtgccaggactacagcaggaattggcaacacagataagcaaaaaaaggcaagccctaggccttatggkatatatagtctactggaagagaaggccataaatcaaaaaaccttacaattacatggaaaactataactgaggtaaaagctacaaagagtagaatataggactatgagtgtccataacagggatttgacttggagttaataaaggactaacttggagttgacttggagtggaaagttagtaaaggcttccctgagaagccgtttgatgctgagagttgaaggaagagcatcctttgttcacttggcaaagggtgggatggggatgtatattaacaacattttatttctgtattctccatgttctggcatctggggtttcactgactgagaatagactgcccctcccagggctagccaattctttgagagagcaaacggctttcatatgcaaactaaccaatccagagcccatactctaaatcacctcctctatgtggcttctacactccaggaggcaatagtcctct

SEQ ID NO: 620551 - DNA, 607 bp, Homo sapiens
aacgctggaagcattccccttgagaacgggaacaagacaagaatgcccactctcaccactcctattcaacacagcactggaagtcctagccagaacaatcaggaaatagaaagaaatgaaaggcatccaaataggaagacaggaatcaaactatccctgtttgctgatgatgtgactatatacttagaaaacctcacatagcctctgcccaaaagttctgacatctgataaacaacctcagcaaagcttcagaatacaaaatcagtgtacaaaaatcagtagcatttctatacaccaacaacgtccaagctgaaagccaaatcaagaactcagtcacattcacgatggccataaaaagaataaaatacctggaatataaccaaccagggaggtgaaagatctctacaagatttacaaaacactgctcaaagaaatcagagataatacaaacaaayggaaaaacattccatactcatgaataggaagaatcaatattgttaaatggccatacttcccaaagcaacatataaattcagtgctattcctataaaacaaccaatagcattcttcacagaattagaaataactattttaaaattcatacaga

SEQ ID NO: 620552 - DNA, 537 bp, Homo sapiens
ttaattaagtaatactacaatgacttataggaggttatctcttctaaacaatgtattattataattttaattattaaattaagagtatcacccaaatacataatatatagtgggtgttctgaagacaataacttctcctcaagattgaggagaagttataactcatgttcatttttcttcaacactgaaccattttttcccacattagagaagacaaatgattgtaccaacatatatatttaatrtactcataatcaaatgcactgagtgctgttccatagttcactagagctgaggcttttgtgtttggagaaagttaaagtacaaagtttggaaaacatattacaagtggtttaatcttttggattatttttaatcagcgaaaatgatcaaaaagggtggaaatgtatcagacctattaaatcatagccaactagtaattatttgttctaatcaagagtatttgctatctggcatgggtaatccagaatatcatatttgccaaataacattcatatttggctttgaaatgcatca

SEQ ID NO: 620553 - DNA, 563 bp, Homo sapiens
acccaatcccctcacccctgtcttccctcatttctggaaatgtcagcaaattttctgcctacttcaaattgacaacctattggacaaatctgttcctgaaattttggggaataatcaccattctgtaaaagatattcttcctcttagccacttctctttgattttgctgaaatgcatacattgttttttagaagccacaaataattaaatgaaccgtcactttctytctgcctctgaaatttgaaaacatcatactgaaattgtactttaataaataataaaataatgctttgacaaaagcaacacaatacatggtattgacactttgtagacagaaaattttgttgtattgtttcccctgccctttctataattaaaacatctttctccatcctggtatacagaatccaagaaacaattggaaaagtctttcatctctagttctagtgcatggtggtacttagaaacacatattgtctgattggattccttctgcatgtaccataagagctccctatgatagaaactttgattataaagttgcatgatatcctatgcttcct

SEQ ID NO: 620554 - DNA, 598 bp, Homo sapiens
taacagcatttgtaaaagggagtaatgatagctactgtatgttgagcatctactatgtagaaggtactttatctgcacttttgagaatccttatcacagatctggaatgcagtgtcacttttcgcaatttttagatgagaaaattagacttgaaaagattaaccacttcctgaggccatccagatgggtcagctccaaatcatgtgtttttcctacagctctaaactaaagacrccaccagtgccttgttcccgcagtttaccacccagtgaaggagacagggaaactatgaaattaggaacctaagtaaatatgcacaattaggtgtacttataatatttctaaatcatgaagactaagatggcaatgcacctcatggtgcatacgtatgctaaaagtagcacacagttctgaaaagttcaggaaatagctttttcccatctttttaggttgccatatttatctccagtgtagctaacatttctaggcacgtacctttatttaaatattaaataaatgtattaatatttaataaattatttacattgtaaaatatttaaatatttttagaggagcaggaaaatctatgtttttgcca

SEQ ID NO: 620555 - DNA, 557 bp, Homo sapiens
tctctgcccatcctttttttttccaagaagttaagctggcatcagatggctcataaaattctaggaagaaaagtgaattcatataataaagctgaactttttagaggttttgcttgtaaaaatttggcattacttgtaggttttccttgtaggggaatttggggattttgaattcctagtaatctgggaaatatggtgagccaacctgtctggaagtcatgatgtgatttagttacaaggtatgtgtacataagtttcacatttttttttcactgatattttgctaagtcggcccttctataagtagttattggtgagtttttaaraattcttcctttaacctttattttaataataaaagacaagacttaattctttttacttgtgttttaattcctatgtctctttattggaaggttacaaatgaaggcttaaatgtaaagggtatgggtgcgtatgtagaaaaagagagaaaaattatctttatgttccaaatctttatggtataaactttggaagttaaataatgttttctttatttataggctgttggtgta

SEQ ID NO: 620556 - DNA, 557 bp, Homo sapiens
tctctgcccatcctttttttttccaagaagttaagctggcatcagatggctcataaaattctaggaagaaaagtgaattcatataataaagctgaactttttagaggttttgcttgtaaaaatttggcattacttgtaggttttccttgtaggggaatttggggattttgaattcctagtaatctgggaaatatggtgagccaacctgtctggaagtcatgatgtgatttagttacaaggtatgtgtacataagtttcacatttttttttcactgatattttgctaagtcggcccttctataagtagttattggtgagtttttaaaawttcttcctttaacctttattttaataataaaagacaagacttaattctttttacttgtgttttaattcctatgtctctttattggaaggttacaaatgaaggcttaaatgtaaagggtatgggtgcgtatgtagaaaaagagagaaaaattatctttatgttccaaatctttatggtataaactttggaagttaaataatgttttctttatttataggctgttggtgta

SEQ ID NO: 620557 - DNA, 527 bp, Homo sapiens
gtaatccccatagtccctataatccccacatgtcaagggagagaccagatggagggtaattggatcatgggggcgatttccccyatgctgttctcatgataacgagtgagttctcacaagatctgatggttttataaagggctcttccccttccctcggcacttctcctttctgctgccttgtgaaaaaggtgccttgcttcgccttcaccttcgccttcgccttccaccattattgtaagtttcctgaggcctccccagtcattctgaactgtgagtcaattaaacctctttcctttataagtcacctagtctcaggcagttctttatagcatatgaaaatgaactaatacaatggcagatgagaggaactagctgtttcattggactgaggcagaaaaaagcagagaagtcagaagatgaaggcttttcatgtcctattgggtaggatgtttggcattgctgcatataacttggtagcaatgagaatccaggaccaagagaaagcgttcggtgggcctaaatact

SEQ ID NO: 620558 - DNA, 527 bp, Homo sapiens
gtaatccccatagtccctataatccccacatgtcaagggagagaccagatggagggtaattggatcatgggggcgatttcccctatgctgttctcatgatarcgagtgagttctcacaagatctgatggttttataaagggctcttccccttccctcggcacttctcctttctgctgccttgtgaaaaaggtgccttgcttcgccttcaccttcgccttcgccttccaccattattgtaagtttcctgaggcctccccagtcattctgaactgtgagtcaattaaacctctttcctttataagtcacctagtctcaggcagttctttatagcatatgaaaatgaactaatacaatggcagatgagaggaactagctgtttcattggactgaggcagaaaaaagcagagaagtcagaagatgaaggcttttcatgtcctattgggtaggatgtttggcattgctgcatataacttggtagcaatgagaatccaggaccaagagaaagcgttcggtgggcctaaatact

SEQ ID NO: 620559 - DNA, 527 bp, Homo sapiens
gtaatccccatagtccctataatccccacatgtcaagggagagaccagatggagggtaattggatcatgggggcgatttcccctatgctgttctcatgataaygagtgagttctcacaagatctgatggttttataaagggctcttccccttccctcggcacttctcctttctgctgccttgtgaaaaaggtgccttgcttcgccttcaccttcgccttcgccttccaccattattgtaagtttcctgaggcctccccagtcattctgaactgtgagtcaattaaacctctttcctttataagtcacctagtctcaggcagttctttatagcatatgaaaatgaactaatacaatggcagatgagaggaactagctgtttcattggactgaggcagaaaaaagcagagaagtcagaagatgaaggcttttcatgtcctattgggtaggatgtttggcattgctgcatataacttggtagcaatgagaatccaggaccaagagaaagcgttcggtgggcctaaatact

SEQ ID NO: 620560 - DNA, 298 bp, Homo sapiens
aggtgttggcagtggaatttgtgctcgcttgcacatgccagcgattgcagcaatgctcrgtgtgtatgtgaattgcctgggatgtgggaccagtggaagcagggcagtggcattcctgctgcacctcctcatgcaggtggttgtggtggtggtgacatgacagggtcagggcactgtggtaacaggttgtctggcatttgtgccagtggtggtggcatggggttgggtgtcagggtgtgctagcaccagcagagggaggttgtggtgggggaagaccctgggagcctgttgtttcagc

SEQ ID NO: 620561 - DNA, 298 bp, Homo sapiens
aggtgttggcagtggaatttgtgctcgcttgcacatgccagcgattgcagcaatgctcagtgtgtatgtgaattgcctgggatgtgggaccagtggaagcagggcagtggcattcctgctgcacctcctcatgcaggtggttgtggtggtggtgacatgacagggtcagggcactgtggtaacaggttgtctggcatttgtgccagtggtggtggyatggggttgggtgtcagggtgtgctagcaccagcagagggaggttgtggtgggggaagaccctgggagcctgttgtttcagc

SEQ ID NO: 620562 - DNA, 585 bp, Homo sapiens
acctctacagcctttcttgaacaacatccaagaaagtttggttctgaaacatctttaatttgtaataaatctattttccctttgagacatggacacagctgatggcaaaaagaatgaagttgcagtttacttgagattgttgaacagctgctttctcttactatggagtcgacattaacattaagcaaaaaggttggagcataggaatgtgagtgaaagcataattcttcagtttcttaaytgttatttagtattagggacattcactgacatgtagtctttatccgtgatatgtatatagatttgtaaaaattcagggttaacatcgagtgtatctgcctatagctatttctaacagttgattatatgtttagtcagttgtaatatgcatagtatgaaatgtacgtattttaagtgtctgaaaattgttgctgtcttggagagaaattggaagtatagagtgggagtgatgaatgaatgcctctaagtgtaacaagatgtgtgtgtgttcctcctacacattgctctaaagtgtagccttcttaaaattggcctacagatttcatccaggaaattttaaagaaa

SEQ ID NO: 620563 - DNA, 630 bp, Homo sapiens
cctttttcaaaatttcatctttttcttgttaataatagagatctctgtgcctctaaatggtgtttggtcagtgagttttgtaatcttaaatggcagaaatgtcatgacatgtaattttgtgagwaaaggatacttacccctcctagcctttacataagtgaaatatagtaaatgctcttaaaataattgtacattttcttgtgagaaataacattccttgtactttatgagaaaaatatgtgtaaagttgcacatcatagaagatgcagattttaatatccagtgtatttcagcagtttggtatcagaaaagtgcactgagctagtgttaaataactttttattagaatgtcctctctattgttaagttgccacattatatgaggaaactcacttcagtttttgtgccttggtttcgttgttgtaaaatggagagaatggtacctgttttcgtatttccatttaaaaaatcacttgatataatataagtggccagtgcttagaaaggaataaaaatagttacaccaatgctaggtggtgtttttgtttttactaagaaagtccctgaagtcaccctgctctccccaccacatacatacacagacacacacatacacacatgtacacgtgt

SEQ ID NO: 620564 - DNA, 585 bp, Homo sapiens
acctctacagcctttcttgaacaacatccaagaaagtttggttctgaaacatctttaatttgtaataaatctattttccctttgagacatggacacagctgatggcaaaaagaatgaagttgcagtttacttgagattgttgaacagctgctttctcttactatggagtcgacattaacattaagcaaaaaggttggagcataggaatgtgagtgaaagcataattcttcagtttcttaattgttatttagtattagggacattcactgacatgtagtctttatccgtgatatgtatatagatttgtaaaaattcagggttaacatcgagtgtatctgcctatagctatttctaacagttgattatatgtttagtcagttgtaatatgcatagtatgaaatgtacgtattttaagtgtctgaaaattgttgctgtcttggagagaaattggaagtatagagtgggagtgatgaatgaatgcctctaagtgtaacaagatgtgtgygtgttcctcctacacattgctctaaagtgtagccttcttaaaattggcctacagatttcatccaggaaattttaaagaaa

SEQ ID NO: 620565 - DNA, 257 bp, Homo sapiens
agtctcaaaaaaaaaaaaaatcaatccaagtatatttattaataaagaaatgtacctcagaaaaaatattagtcagatgctaacaaaaacatatgtgtaacaatattaatatgctataaagtagaattcaagatgaacagaattggaagggagaaaaagtagaaattctatgctggccaaagtarcaatctatcagatgacagttatgaacctatattcacttaacaaaccttcaaaatatgttaggaaaatgatag

SEQ ID NO: 620566 - DNA, 490 bp, Homo sapiens
tttacagaacttcacaagctgatcttaaaatcttaataaaaagttaataagtgatcaataactaagtcagtttttaaaaaagagaataagtttgccatttatcaggattttatataaatctgtatcaataaaaacagtatgataccagcacagagacagtcaatgaaccaatgtaataatgtaacaggaaaaaaggatgaaattggatttgcctatcacactttatatgttagtaatttgcagatagattaaagacttaaacataaatattataattgtgtaattttaaaaataaaatagagaagaatatctttatgtagtgacagtaggaaagattttgtagatgagatataaaatgtacaaccaagaaygaaaaactggacaaaatcgacttcatttaaccgtatgtttaacaaacataccacattcaaagttaatagactaacctacacatgcagagaagatatctacaaattatataaccagttaa

SEQ ID NO: 620567 - DNA, 542 bp, Homo sapiens
tatattaaatgcttctttaataaatgtctgagtgaaattctatattacatttaaaacctcatgaaatatctatttcaataataacctgggaatgtcagtgtgtactacatggaattatactaagtgctttacaattaccgtcttgaggcttcaaacaactttacaaaaaagctatgatgatcattactttatcattaattgaagctcagaaaaaaataagttgcccargtcatatctttaaaggcagattcagtattcaagctggctcatgtttgatttccatttacatcatgtctactcagatagtcttcagtgaaatacccagataaaatttgttttcagtaaactgtctattggtatattatgtgcatatgcacacatgcaaaattaggttacacatatgctcatgatatacatatgtatatatgagttatatacatatatttataatgtatatagtaaattttcactaaagtgcctgtatatatatattgcaattatatatataaacttaactatatcatgtctatgtaattgtgatt

SEQ ID NO: 620568 - DNA, 514 bp, Homo sapiens
attaattgtgaacaaggagatgagacacaagcactaaaatgctgaatgaaattcataagacattaggcatttgcaaggagaaagttgttttgcagacaaagatatgatgtgactatttagagctagatgggccactttattaaacagtttccttggtgctcagggagggaaagataatctttccagagattctgtgagttggatttctgttggttcttctaatttactcaagaacctgagtgacccaggccattgatgaggaagtaagtgctaatgactgataatgggcatcaagaattgggccaggtgaaaaagtagcatagacaytgtcctctctttcttgaagctttgagtatgacagagagaacaagtcatttaactaacataaaaagaaataagaaaatattataagtgagttaaaactcatgtatcccggtttctaaagagggagctttgatgcgactggtaattggaatgatggtgactggtattaaatttttgttgttatgtttta

SEQ ID NO: 620569 - DNA, 520 bp, Homo sapiens
attaattgtgaacaaggagatgagacacaagcactaaaatgctgaatgaaatttataagacattaggcatttgcaaggagaaagttgttttgcagacaaagatatgatgtgactatttagagctagatgggccactttattaaacagtttccttggtgctcagggagggaaagataatctttccagagattctgtgagttggatttctgttggttcttctaatttactcaagaacctgagtgacccaggccattgatgaggaagtaagtgctaatgactgataatgggcatcaagaattgggccaggtgaaaaagtagcatagacattgtcctctctttcttgaagctttgagtatgacagagagaacaagtcatttaactaacrtaaaaagaaataagaaaatattataagtgagttaaaactcatgtatcccggtttctaaagagggagctttgatgcgactggtaattggaatgatggtgactggtattaaatttttgttgttatgttttattgttc

SEQ ID NO: 620570 - DNA, 585 bp, Homo sapiens
catagaactttagaaaaagaattaagcttccaatttatcatgaaaataaatggaatcttgaaactatggcagtaaaagacctgctacttgataccatcctycatattaccaagggacttccatacaatcattaaaaactggtgaatgtttgctatcaacatctttgtacttccaaactaatgttttctcttggcagggttctctccagtaaggccgtgaaatagttatcatagaatgcataaatggcacattatccaaaatatagggctccagattgttttcttggagtctaaggggcttcacaaaagtagctccatggctgttgtagttggagaagtgctgggacaatgttgagcagatgggactccagtctaaaccagtggttctgccaaaatggctgttctcttacctgattacatgagtgatgtttacatagactttgaaaaacgaattcaaagatgtattgtaactgggatgggggctaagctattgaagttaccttatacttcaatgccttaaaatatatgcatgtataacttttgcaaacctatttaagaaaaaatgaattctaaggctattgcaagt

SEQ ID NO: 620571 - DNA, 462 bp, Homo sapiens
gcgatctcaataaagtacttgccatctaagaatgttatattaggatgccaagcaaatggaacaaattgtataacaaagcaactsaattgtcttccaatatattttatgatgccccactgtcatactaattaacttttaagcacttaaactgaaatttatattgacttcctcagtttattctcaaccaaatttttaagcttcatttctccctgatcccttaaaaatattctaaacaaacacacagcaagttgaagaacaagaaactggcctttaatattgttaatactgatatatttgacacagttgcatatatttgactctgatagtgtaaaactcttgaggaagtcttgaggaagcaacgctgcgcttctgcagttatacatgtgtctgatgtaaacaaggagaatttgtgtaaaaaccttaacacaaacccttttttacttgtgggaagccaagggctaa

SEQ ID NO: 620572 - DNA, 462 bp, Homo sapiens
gcgatctcaataaagtacttgccatctaagaatgttatattaggatgccaagcaaatggaacaaattgtataacaaagcaactgaattgtcttccaatatattttatgatgccccactgtcatactaattaacttttaagcacttaaactgaaatttatattgacttcctcagtttattctcaaccaaatttttaagcttcatttctccctgatcccttaaaaatattctaaacaaacacacagcaagttgaagaacaagaaactggcctttaatattgttaatactgatatatttgacacagttgcatatatttgactctgatagtgtaaaactcttgaggaagtcttgaggaagcaacgytgcgcttctgcagttatacatgtgtctgatgtaaacaaggagaatttgtgtaaaaaccttaacacaaacccttttttacttgtgggaagccaagggctaa

SEQ ID NO: 620573 - DNA, 546 bp, Homo sapiens
gtttcttaactagaaaatgttcccaataacaaaatagagtcaaggaaagttcaatgacaacagaagaccatttgactttgaagaataggttaatgtttaaagctaggagggaaggccaggagtggtggatcacgcctgtaatcccagcactttgggaggctgaggtggrtggatcacctgaggtcaggagttcgagaccagcctgggcaacatggcaaaaccctgtctccactaaaaatacaaaaattagccaggcgtggtggcccacgcctgtaatcccagctacttgggaggctgaggcaaaagaatcgcttgaacccaggaggcagaggtagcaatgagccgagattgtggcgctgcactccagccttggcgaaagaatgagactctatctcaaaaacgaaaaacaaacaaacaaacaaaacccaagataaagctaggaggggaggctgaggatgcctcaagtgatataaataagaaaaaattcttctgtcatttttttctttaaaatcatacttaaactattttcttaaaaaaatgtatcta

SEQ ID NO: 620574 - DNA, 546 bp, Homo sapiens
gtttcttaactagaaaatgttcccaataacaaaatagagtcaaggaaagttcaatgacaacagaagaccatttgactttgaagaataggttaatgtttaaagctaggagggaaggccaggagtggtggatcacgcctgtaatcccagcactttgggaggctgaggtgggtggatcacctgaggtcaggagttcgagaccagcctgggcaacatggcaaaaccctgtctccactaaaaatacaaaaattagccaggcgtggtggcccacgcctgtaatcccagctacttgggaggctgaggcaaaagaatcgcttgaacccaggaggcagaggtagcartgagccgagattgtggcgctgcactccagccttggcgaaagaatgagactctatctcaaaaacgaaaaacaaacaaacaaacaaaacccaagataaagctaggaggggaggctgaggatgcctcaagtgatataaataagaaaaaattcttctgtcatttttttctttaaaatcatacttaaactattttcttaaaaaaatgtatcta

SEQ ID NO: 620575 - DNA, 575 bp, Homo sapiens
tgtgtgatgacagaagtcacatgagtgacctcaggagggacatgaacagaactgtccagactgccatcccacaaaatccttaaaaagaataaatgttcattgttytaaggcatcacatgttgtgatggtttcttatgcagcaatacataactaatacataatatgttggtgcggatgtggaagtagtgggtatatattttaaactattctgtaattagacttttttccccactccagtgcacctcttccagtctatctagtcattcttctgtgttggtgaaacctttctgggtttggagaagtgtttcctcttagtattatgtgggttgaagaataagtctttgtaagactcttaaatggggactgggcacagtggcccacacctgtaattccagcagtttgggaggctgcggcgggaggatcactcgaggccaggagttcaagaccagcctgggcaacatggcaaaacccagtctctactaaaaacacaaaaattagtggggcagcacactccggcctgggggatagagcaagactctgtctcagaaaaaaaaaaaaaaaaaaaaaaaaaaaga

SEQ ID NO: 620576 - DNA, 584 bp, Homo sapiens
gtcatactaaacccaatgagaagatggcatagcagactccaacactcctaccactcattaacaatgactgttayaaaataattagaagagatttcaaataaataaataaatagaatgtaaagagccaccataatgaatgttatgcttactctagttgctgtttaatcattatgaaacagcaatttaatcattattgggaactagttctttttctttctttgttttttgtttgtttttgtttttgtaactagtttctaccactgatgtttcacgaatgttggatggacagtaactactaaataaataatgaaaaatttggtccggcacagtggctcacacctgtaatcccagcactttgggaggccaaggcaggtggatcacaaggtcaggagatcaagaccatcctggctaacacagtgaaaccccagctctactaaaaatacaaaaaattagccgggcatggtggcgggtgcctgtagtcccagctactcgggaggctgaggcaggagaatggcaggaacccgggaggcggggcttgcagtgagccgagatcacgccactgcactgcagcctgggtgacagag

SEQ ID NO: 620577 - DNA, 621 bp, Homo sapiens
tttttcccagagttggaatgctctgtgccgagctggtgakagattccttgatatcacattccaaaccacagtatgtgtgttgtacctcagttctagtttagaataacatttctagatattttttaaatgaaaaatataattttttgctaatgcatatgaaacaaacactccacttggggaagatgctcaggaaacaagcatttcaatgaaacacataggcagggatatttatctactgacttatgtcagctccaaaaagaatttaaggggaacagctctacagaattgggtaattttaactgtcatcaatcacaatttaatctaaatttggtcttattcccaaactttgattaagatgcttcttccaagctgcctttaattttcctttggatgtttgctctaaacacctggagagcatggttatggtttattctttatttggccacagtgcctagtatcgttcctggtagaaaataaaggtttgttgaatgactaaatgaatgaaactttcctaggacaagctttaaatctaagccctctgaccaacttgtaatacaaataggcataaaaaatacctttctagcttttcatgggcatttcagcaagaacagtactatgact

SEQ ID NO: 620578 - DNA, 621 bp, Homo sapiens
tttttcccagagttggaatgctctgtgccgagctggtgagagattccttgatatcacattccaaaccacagtatgtgtgttgtacctcagttctagtttagaataacatttctagatattttttaaatgaaaaatataattttttgctaatgcatatgaaacaaacactccacttggggaagatgctcaggaaacaagcatttcaatgaaacacataggcagkgatatttatctactgacttatgtcagctccaaaaagaatttaaggggaacagctctacagaattgggtaattttaactgtcatcaatcacaatttaatctaaatttggtcttattcccaaactttgattaagatgcttcttccaagctgcctttaattttcctttggatgtttgctctaaacacctggagagcatggttatggtttattctttatttggccacagtgcctagtatcgttcctggtagaaaataaaggtttgttgaatgactaaatgaatgaaactttcctaggacaagctttaaatctaagccctctgaccaacttgtaatacaaataggcataaaaaatacctttctagcttttcatgggcatttcagcaagaacagtactatgact

SEQ ID NO: 620579 - DNA, 549 bp, Homo sapiens
gacaagctttaaatctaagccctctgaccaacttgtaatacaaataggcataaaaaatacctttctagcttttcatgggcatttcagcaagaacagtactatgactgtcccctttccatagccaaatgctagaatttttctccatggctctcagctgtttgtacttccaaacccccamccccgccccccgttttaaaagcgttcaggtataggaaacagaacccattataccaattttaaacaaaaagattatgtagtatcaggaattagacgcctgaaagattattgccagggctgaagcagccgaccccagactgtgcctcctagaacaactttcagaacagcacaccagaactggcccaataggggagctgctaccaaggtgggtaaatctgaagctgatgaattaaaaatccatgtggccatagccatagctggattcaggcatctgctaccaccaccaacactgccaccacatcattgcccctgacacctacaaggctggtgacagagcactggaagtctgctattgagaaacataacgtctgt

SEQ ID NO: 620580 - DNA, 724 bp, Homo sapiens
ctttaaaaataggcctaccacaaactcatctgtgcagggtggcttgaatacagggacaagagactggaccaactaatctgtcaaaatctcttctagacctatgattctgtaaaggacgaggttatcatgtgtagtgagaattattttctctttaatagttaattacataaatgtaaaaagtgaatttgcagggggtccagacaaacactaccttagtcacttgatcatcaacagtgataacttaaggtcatcatccacactcaagttgatagcttgtatccttgatatgaggtcttgaaaatagaaacttacttctgcgatagtcctccccaaaacccataacttcagtctaatcatgacaaaaacgtcacacaaatcccaattgagagacattctacaaaatacctgaccagtcctccttcaaacagtcaaggtcaaaaaaaacaaggaaaatctgagaaattgtcacagtcaagacaagtctaagagtctaaggaggcaggacgacagyaatgtagcatccctgggacagaaaaaaagacattcggcgaaaactaaaaaatctggataaagtaaggactttaatcataatgtataaatattagttcattaagtgtaacaaatgtaccatactaatgtaagataataataataaggaaaattgagtgtagggggtaagagaaccctctgtattatcttctcaatttttctgtcaacttaaaac

SEQ ID NO: 620581 - DNA, 587 bp, Homo sapiens
tttgttgaaatttaaaccattgatgccacatctcttctgaggcagggacggctggcagggatggataccatccactaaagactcctgctcctagttttagcaagaggttgctgcccaggccaagactacatttctcagcccctcttccatccaaggtagaaccccttgtatgactggttcttgttaatgtaagataaatggaagtgatgtctgttgcttttgtcccaacataattgaggaatgagtttgctttctctatctgttcttttctctctggaccctaagggatggtggagtcataagatgaaaaagtgcctagatttctgaatcatcacatggaggacatcttttttagacatgcgttagacttgtaatagtaataaataaatttctattgggttaagccactgaaattagtattatcttaatcacatatccaaccccacattcaatgtttcctctttatctgcccctttcttctcaatctcactcttgtataagttcatctttgtattttccacaccccttaacacacagtgtcttgaccatagcaggcacttaattaatrttcattaaaattagacatg

SEQ ID NO: 620582 - DNA, 567 bp, Homo sapiens
ctagctaaccgaatccaacagcatatcagaaagataatccaacatgagcaagtgggttcataccagggatgcagggatgtttaatatatgcaagtcaataaatatgacacaccacataaacagaattagaaacaaaaatcacataataatcccaacagaygcagaaaaagggtttgacaaatctaggatccctttataattaaaacccttagcaaaattggcatagaagtgacataccttaaggtaataaaagccatctatgacaaacccatagctaacattatactgaatggaggaaacatgaaagcattctgcctgaatattggaacaagacaaggatgcccactttcaccactttctattcaacatagtactggaagtcctagtcagagcaatcagacaaaagaaaaaaataaagggcatctgaatcagtaaggaggaagtcaaacagtcattcaccaatgatataatcatatgcctagaaatcatgtaatcatcactaatgatcagggaaatgaaaatcaaaaaccacaaaaaccctaaagactcatccaaaaagctcctaga

SEQ ID NO: 620583 - DNA, 634 bp, Homo sapiens
agtacagaacaggtaaatcaaaggtttacaaaaatccaattttgagaagttttcaggtccctcccagccctgaggtcctttgatgcctcaattttcaagggtttttttgatacttccccagtaaggatgggggactatcctggtgggtaagtgggctggtgattccaatcatggaaagagtctatgcctcctggcttgtgagaagcttccaagagaaaaataacatcagaggagccacaaaaaaagaaagcctgcccctcagaaagagtctgagatttcatccttaacattatgattcccataaactacaatgtcacagggagataatttttcaagcaacttcagacattatgctctagaaagaagattctttcagggcccttatggaaggttttgagtagttctgtgtcctgtggtaggagaaagaacatcagggaaaggagcagactaggaagatgccacaacaaaatagtacctcttatttgactgctcaacctcagtccccgcagccatatgacagggactgcctgcagaaatctctgcataactgatgatgcatcctcaggctacatagcacccaggaaaatgaacttctgtatacatctgtctrcatcagttatgatgcctgccagtc

SEQ ID NO: 620584 - DNA, 588 bp, Homo sapiens
aaaacaaaaacaaatcacacccaaaggtagaagtaaataaataacaaacatcaaaggagaactaaatgaaatggagactaaaaaaaaaataaaaagcatcaatgaaatgaaaagttgtttcttcaaaaagctaaagaatattgaaagactgccagctagattaaccaagaaaaaagcaagaaaattcatataagcacaatcacaaatgaaaaagacaacattactactgataccacagaaatacaaaagatcatcagaaacttctgtgagcatctctaccctcacaaacttgaaaaccgagaggaaatggatagattcctggagacatacaacttctcaaggttgaaccaggaagaaatagaaatcctgaayagaacaataatgaatagtgaggttgaatcagtaataaaaaaatctcctaagaaataagagcccaggaccaggtagatttacagctgatttctaccagacatacaaaaaagaatgggtaccaatcttactgaaactatttcaaaaaatcaaggaggagggaatccttcttagctcattctatgaagccagtgtcaccctgataccaaagccaggcaa

SEQ ID NO: 620585 - DNA, 529 bp, Homo sapiens
tctggtgcagcgaacaccaagctacaactacttccataaacacttcctcatatttttcctactttaggttctcttggctgaacaaacaacctccatctttttttttttttttttttggtataacacaaatattagataccttgactactctgtttctgtgacacaaaaccaaccacagagaacccccctgtgatgatgctacagcttgagctgggattagaatcttttgtctatgcctctgccccatcctcactagagaygaggtgagagatcaggaacttaggatcacttgagtccaaggatgacaggccacagtgacaaagtctgtttgttacagatttcagtgaaataaaaagagctgatagttgttggagctaatgaaagcacccttgagtaaggcaattagaccagatcagatgctgttctccagtcctgcataaattgtaatgttgttactgaactgaacttttaaagattctttgggtcacttttatgagtttgatatttttggtttatataagtatttgaa

SEQ ID NO: 620586 - DNA, 481 bp, Homo sapiens
agaaataccatttgaccatttgacccagcagtcccattactgcatatacccaaaggaatataaagcattctgttataaaggcacatgcatgcgtatgttcactgtagtattgttcacaatagcaaagacatggaatcaacctaaatgcccatcagtgatagactggataaagaaaatgtggtacttatataccatggactactatacagccataaaaaggaatgaattcatgtcctttgcagggacatgggtgaagctggaggccattatccttagcaaagyaatgcaggaacagaaaaccaaatactacgtgttataagtggaaactatatgatgagaacacatggatacacagaggggaacaacacatgctggggcctatcagagagtggagggtggttggagggagaggatcagaaaaaataactataggatactagacttaatagctgggtgatgaaataatctatacaacaaacct

SEQ ID NO: 620587 - DNA, 589 bp, Homo sapiens
tggggcctatcagagagtggagggtggttggagggagaggatcagaaaaaataactataggatactagacttaatagctgggtgatgaaataatctatacaacaaacctccatgacactgttttcctatrtaatgaacctgcaaatttacccctggacctaaaagttaaaataaaaaaagatttgtctttccctccttttccaagacaaaagcaaggtcctagtgagtgaagatttcctctgataccacatgcatagataccaatacctgccccctacctttattctctctctctctgtctctctctctttcattctctttatattttagtatttgtgatgtgcttatagagcctggtgtattcaatgtgtggatatgacacttcaccagaaggtgtgactatctaacacacaatatacagaaagtgacagtaaactaaaactccactgatcgcttctgtgaatttggatattgacatttgttgataggggtggtggtgagggtggtggttttgtaacaacacagacaatttggcaaaaggcagagatctagcacagtaggatgggctcccttgagctgggagggtctt

SEQ ID NO: 620588 - DNA, 597 bp, Homo sapiens
aaggaaaagctaagtattaatgacctatgcatccatctyaaaagagtggtgtaagaaaacaaaataaaaccaaagaaaattagaaaaaacaaagataacagagagtaataaaatgtgaaagagatcataaatataaatgaaaaaaagaaatataaaagtcaaacttttttggaaaatactgataacaaaaacaggtaaacaaacagatgagattgatccaataaagaagacaaaattaactaatatcagaattgagaaagaagaacattatgctttctacagactttctacaaaatgttctataaacataaaaaagttaacaagacgatataatgaataatgttttatccataaatttgaagtttgatatgaaatgcataaatttgtagaaacgtgtaacttactataactcaaaaagaggtaggataattaaatattatcataaccttaaaaaattgagtagtcaaatatctttctatgaatatctttatctggctttaacagtgggtactatcaaacattcaagcaaaatgtaattccattttcctacgactcttataaaacttgacaaaacgagtatgagaaaaaatttatggt

SEQ ID NO: 620589 - DNA, 620 bp, Homo sapiens
tagactggataaagaaaatgtggtacatatacaccatggaatattatgcagccataaaaaggaacaaaatcatgtcctttgcagggacatggatagagctagaatccattatcctcagcaaactaattcagcaacagaaaaccaaataccacatgttctcatttataagtgggtgctaaatgatgagaacacatggatacatgtcggggaacaacacacatggggggctgttggaaggtgggaggagggagagcatcaagaaaaatagctaatgaatgctgggcttactacctaggtgatgggatgatctatgcagcaaaccaccatgccacatgtttacctatacaacaaacctgaatatcctgcacatgtgcctctgaacttaaaataaaagttggaaaaagaatccaagtaccagacctgcacaacccatatgcaatgtgatgaggcatgtagcagtggggaccggggtgcttgtgcaccagaggttgggatgtgcagtggggaagagattcaaatctgcttgtgaggtgtgattatatagtagtcatgtagtgcttcctcaaagtggggcttaaattgcataccaaagacaragtataagcaccccggctagacag

SEQ ID NO: 620590 - DNA, 574 bp, Homo sapiens
ttaaccctttacaagatacatggtttgcaaatattttctcccaatccataggctgccttttcattttgggaaggtctcatggaaattgattgtaaatggagttaaagtcataggtagatagaaataacattagcaaagacatgaattcattttactctctctgaaacaaagagagtgagtgtttggataaactcagagaaactttgaagtagagagaagatacttcaaatgaagtcaaatgacttctattttctcagtaagtagaaggaggtgataatagtaacagtggtagttgctatagccatcttaggagttagcacttattgagcatctttgtagcagatacctcgttaaaaactttagctcttcaaggcagacttggctattattatttttattttataggcaagaaaaccataaaagggagtaatatttgagattgaacaatttgcmaacgtaacaaaattagtaagtggcagagctgttctgtgcagaatgaagttctgtgcaagccttacagcttctgctcttaactacattgttatcactgcttctgtgaatgaagggaaatcat

SEQ ID NO: 620591 - DNA, 612 bp, Homo sapiens
gagggaaaaatgttttcctgggctaggtccaggaccccctcccctgctctgtgcagcctcagaacttggtgccctgagtcccagctgctccagccatggctaaaagtggccaaggtaaagcttgggccactgcttcagagggtacaagcccctaggcttggcagcttccacaaggtgttggtcctgtggctgcacagaaagcaagaactgaggtttgggaacctccacctagatttcagaggttgtatggaaacgcctgaatgtccaagaagaggtgtgctgcggggtagagccctcacggagaacctctgctagagcagtgcagaagggaaatgtggggttcaagcccccatatggagtccccactggggcactgcctagtggagctgtgagaagasggccaccatcttccaggccccagaatggtaaatccaatgatttacccgtagtcctgtagtcctagaaaagccagaggcactcaatgccagcccatgaaagcagccagaaggggggttgtaccctgcaaagtcataggggcagagctccccaaggctatgggggcccacctctttcatcagcatgacttggatgtgaaacatgcaatcaaagatc

SEQ ID NO: 620592 - DNA, 512 bp, Homo sapiens
atatataccatattttctttatccggtccaccactaatgggcacttagggtgatttcatgtctttgctgttttaaataatgctgtgatgaactttcaagtgcatgtatctttttggtagaatgatttattttcttttggatataaatcccascaatgggattgctggatcaaatagtagttctgttttaaggtctttgagaaactccaaactgatttccacagtggctgaactaatttgcatccccatcaacagtgtgtaagtgtcaccatttctccacagccttgccagcattgttgtttttgacttttcactaatagtcattctgactggtatgaaatgatatcccattgtggttttgatttgcacttctctgatgattagtgatgtgaagcattttttcatatgtttcttggttgttcgtatgtcttcttttgagaagcgtctgttcatttcttttgcccactttttaatggagtattctgttccagtctatatgtctgattttgtatt

SEQ ID NO: 620593 - DNA, 562 bp, Homo sapiens
aaacctgcttcagttttattagttgcatagttgaataatgtactcaccatctctaactctcagttttctcatctgtgagatgtaaataaaaatagtacttgagagctgggtgcagtggctcacacttgtaatcccaacactttgggagkccaagacaggagcatcacttgaatccaggagtttgaggccactttgggcaacagagtgagaccccatttctacaaaaaaataaaaaatctctaataaaatttaattaaaaaatagtacttacctcatgagggtgctgagaaaatgtcatactatgcatataaagcacttaattgagagttttatatttaataggaactcaaaaaattatgtctattttgattaacaaaaggaatcatttctttgtgatattaacttattcattttggtaaacatgatatggttttgctctgtgcctccacccaaatctcatcttaaattgtattccccacatttcaggggagggacccagtgggaagtgatcggatcatgggggcagtttcccccatgctgttctcatgatagcgagtgagtt

SEQ ID NO: 620594 - DNA, 538 bp, Homo sapiens
atttccaataggatggcaacatctttgtgatacatgtccgctgattctaatgctattcctaaggtaacaataagagctaagacacattgaatatgaaatgtgttccaggggcactgcacatattatctctccacaactctgcaaggtggttttattattttcatcatatcattgggacaatttagaatgtataatctttttccacggcttttctccaaatggtgaaacacacrtatcttccagggaaaccactgtcttccaggttaagaaagtacaaattcctccaaccatgtctcacacaaattattttgttttgtaagtgaatttcaccacctatattcttgacctctaaccatggtgtcaaaaataagttcaaaataacattgcaattgtgacttggatatgcagaatagaacgtaacgattgccaacttcattctggacgctatatggctctactgacatagcctaagatcatacttgttacttcctacttaatcaaataatatccctgaggctttttaatcaatggcgtgcta

SEQ ID NO: 620595 - DNA, 458 bp, Homo sapiens
ttccattcaattccattccattcgattccatttttttcgagaaccttccattacactcccttccattccagtgcattccattccagtctcttcagttcgattccattccattcgtttcgattcctttccattccagcccattccattccattccattcctttcctttccgtttcattagattccattgcattccattccattcaattcaattccgtkctattcaatttgattcatttccatttaattccattccattagattccattccgtacgattccattccttttgaatccattccattggagtccattcacttccagaacattccattccagtcgaatccattcgagtacattccattaaagttcattacattctaatacattccattccattgcattccattccattccattcgatgccattcgattccattccatgccaaatcattgcattc

SEQ ID NO: 620596 - DNA, 458 bp, Homo sapiens
ttccattcaattccattccattcgattccatttttttcgagaaccttccattacactcccttccattccagtgcattccattccagtctcttcagttcgattccattccattcgtttcgattcctttccattccagcccattccattccattccattcctttcctttccgtttcattagattccattgcattccattccattcaattcaattccgtgctattcaatttgattcatttccatttaattccattccattagattccattccgtacgattccattccttttgaatccattccattggagtccattcacttcsagaacattccattccagtcgaatccattcgagtacattccattaaagttcattacattctaatacattccattccattgcattccattccattccattcgatgccattcgattccattccatgccaaatcattgcattc

SEQ ID NO: 620597 - DNA, 409 bp, Homo sapiens
ctaatacattccattccattgcattccattccattccattcgatgccattcgattccattccatgccaaatcattgcattcctttccattccgttcctatcaattccattccattcgatttagttcgattctattcacttccattccattcgattccattccattggagtcaattcctttcgacacccagcctttccagtcaatgattttggattccatttttttgcattccattacattctatgacattcgattccgtttcattgcattccattccatacatttttattccattcgagaccgtagcattccactttattccagrcctgtccattacactacattcccttgcattccaatgaattccattccattccaatccattcctttcctttcgcttgcattccat

SEQ ID NO: 620598 - DNA, 572 bp, Homo sapiens
aattccattccattcgatttagttcgattctattcacttccattccattcgattccattccattggagtcaattcctttcgacacccagcctttccagtcaatgattttggattccatttttttgcattccattacattctatgacattcgattccgtttcattgcattccattccatacatttttattccattcgagaccgtagcattccactttattccaggcctgtccattacactacattcccttgcattccaatgaattccattccattscaatccattcctttcctttcgcttgcattccattctattcccttctactgcatacaatttcactccattcgttcccattccattcaattccattccattcaattccattccatttgtttccattctcttcgattccatttctttatattccatgccattcgattccattctattggattgcattacattcgtgttcattccattccagaccattccatttgactccattcctttcgagccctttcaatttgagtccattcctttccagtccatttcactccagtccattactatcca

SEQ ID NO: 620599 - DNA, 572 bp, Homo sapiens
aattccattccattcgatttagttcgattctattcacttccattccattcgattccattccattggagtcaattcctttcgacacccagcctttccagtcaatgattttggattccatttttttgcattccattacattctatgacattcgattccgtttcattgcattccattccatacatttttattccattcgagaccgtagcattccactttattccaggcctgtccattacactacattcccttgcattccaatgaattccattccattccaatccattcctttcctttcgcttgcattccattctattcycttctactgcatacaatttcactccattcgttcccattccattcaattccattccattcaattccattccatttgtttccattctcttcgattccatttctttatattccatgccattcgattccattctattggattgcattacattcgtgttcattccattccagaccattccatttgactccattcctttcgagccctttcaatttgagtccattcctttccagtccatttcactccagtccattactatcca

SEQ ID NO: 620600 - DNA, 410 bp, Homo sapiens
tgattttggattccatttttttgcattccattacattctatgacattcgattccgtttcattgcattccattccatacatttttattccattcgagaccgtagcattccactttattccaggcctgtccattacactacattcccttgcattccaatgaattccattccattccaatccattcctttcctttcgcttgcattccattctattccyttctactgcatacaatttcactccattcgttcccattccattcaattccattccattcaattccattccatttgtttccattctcttcgattccatttctttatattccatgccattcgattccattctattggattgcattacattcgtgttcattccattccagaccattccatttgactccattcctttcga

SEQ ID NO: 620601 - DNA, 517 bp, Homo sapiens
atgaattccattccattccaatccattcctttcctttcgcttgcattccattctattcccttctactgcatacaatttcaytccattcgttcccattccattcaattccattccattcaattccattccatttgtttccattctcttcgattccatttctttatattccatgccattcgattccattctattggattgcattacattcgtgttcattccattccagaccattccatttgactccattcctttcgagccctttcaatttgagtccattcctttccagtccatttcactccagtccattactatccattccataccattccatccattccatcccattccattccattccattccattccattcaattgcattccattccattccattccattgcactacactccattccattacattctactctatctgagtcgattttattgcattagattctattccattggattactttccattcgattacattccattcatgtacattccattc

SEQ ID NO: 620602 - DNA, 419 bp, Homo sapiens
gtcaattcctttcgacacccagcctttccagtcaatgattttggattccatttttttgcattccattacattctatgacattcgattccgtttcattgcattccattccatacatttttattccattcgagaccgtagcattccactttattccaggcctgtccattacactacattcccttgcattccaatgaattccattccattccaatccattcctttcctttcgcttgcattccattctattcccttctactgcatacaatttcactccattcgttcccattccattcaattccattccattcaattccattccatttgtttccattytcttcgattccatttctttatattccatgccattcgattccattctattggattgcattacattcgtgttcattccattccagacc

SEQ ID NO: 620603 - DNA, 450 bp, Homo sapiens
ccattccatttgtttccattctcttcgattccatttctttatattccatgccattcgattccattctattggattgcawtacattcgtgttcattccattccagaccattccatttgactccattcctttcgagccctttcaatttgagtccattcctttccagtccatttcactccagtccattactatccattccataccattccatccattccatcccattccattccattccattccattccattcaattgcattccattccattccattccattgcactacactccattccattacattctactctatctgagtcgattttattgcattagattctattccattggattactttccattcgattacattccattcatgtacattccattccagtcaattacattcgagttcattacattacattccagtatattccattgtattc

SEQ ID NO: 620604 - DNA, 566 bp, Homo sapiens
tccaatgaattccattccattccaatccattcctttcctttcgcttgcattccattctattcccttctactgcatacaatttcactccattcgttcccattccattcaattccattccattcaattccattccatttgtttccattctcttcgattccatttctttatattccatgccattcgattccattctattggattgcattacattcgtgttcattccattccagaycattccatttgactccattcctttcgagccctttcaatttgagtccattcctttccagtccatttcactccagtccattactatccattccataccattccatccattccatcccattccattccattccattccattccattcaattgcattccattccattccattccattgcactacactccattccattacattctactctatctgagtcgattttattgcattagattctattccattggattactttccattcgattacattccattcatgtacattccattccagtcaattacattcgagttcattacattacattccagtatattc

SEQ ID NO: 620605 - DNA, 566 bp, Homo sapiens
tccaatgaattccattccattccaatccattcctttcctttcgcttgcattccattctattcccttctactgcatacaatttcactccattcgttcccattccattcaattccattccattcaattccattccatttgtttccattctcttcgattccatttctttatattccatgccattcgattccattctattggattgcattacattcgtgttcattccattccagaccattccattkgactccattcctttcgagccctttcaatttgagtccattcctttccagtccatttcactccagtccattactatccattccataccattccatccattccatcccattccattccattccattccattccattcaattgcattccattccattccattccattgcactacactccattccattacattctactctatctgagtcgattttattgcattagattctattccattggattactttccattcgattacattccattcatgtacattccattccagtcaattacattcgagttcattacattacattccagtatattc

SEQ ID NO: 620606 - DNA, 572 bp, Homo sapiens
aattccattccattcgatttagttcgattctattcacttccattccattcgattccattccattggagtcaattcctttcgacacccagcctttccagtcaatgattttggattccatttttttgcattccattacattctatgacattcgattccgtttcattgcattccattccatacatttttattccattcgagaccgtagcattccactttattccaggcctgtccattacactacattcccttgcattccaatgaattccattccattccaatccattcctttcctttcgcttgcattccattctattcccttctactgcatacaatttcactccattcgttcccattccattcaattccattccattcaattccattccatttgtttccattctcttcgattccatttctttatattccatgccattcgattccattctattggattgcattacattcgtgttcattccattccagaccattccatttgactccattcctttcgagccctttcaatttgagtccattcytttccagtccatttcactccagtccattactatcca

SEQ ID NO: 620607 - DNA, 455 bp, Homo sapiens
gaattccattccattccaatccattcctttcctttcgcttgcattccattctattcccttctactgcatacaatttcactccattcgttcccattccattcaattccattccattcaattccattccatttgtttccattctcttcgattccatttctttatattccatgccattcgattccattctattggattgcattacattcgtgttcattccattccagaccattccatttgactccattcctttcgagccctttcaatttgagtccattcctttccagtccatttcacwccagtccattactatccattccataccattccatccattccatcccattccattccattccattccattccattcaattgcattccattccattccattccattgcactacactccattccattacattctactctatctgagtcgattttattgcatta

SEQ ID NO: 620608 - DNA, 503 bp, Homo sapiens
gaattccattccattccaatccattcctttcctttcgcttgcattccattctattcccttctactgcatacaatttcactccattcgttcccattccattcaattccattccattcaattccattccatttgtttccattctcttcgattccatttctttatattccatgccattcgattccattctattggattgcattacattcgtgttcattccattccagaccattccatttgactccattcctttcgagccctttcaatttgagtccattcctttccagtccatttcactccagtccattactatccattccataccattccatccatyccatcccattccattccattccattccattccattcaattgcattccattccattccattccattgcactacactccattccattacattctactctatctgagtcgattttattgcattagattctattccattggattactttccattcgattacattccattcatg

SEQ ID NO: 620609 - DNA, 528 bp, Homo sapiens
attccattctattcccttctactgcatacaatttcactccattcgttcccattccattcaattccattccattcaattccattccatttgtttccattctcttcgattccatttctttatattccatgccattcgattccattctattggattgcattacattcgtgttcattccattccagaccattccatttgactccattcctttcgagccctttcaatttgagtccattcctttccagtccatttcactccagtccattactatccattccataccattccatccattccatcccattccattccattccattccattccattcmattgcattccattccattccattccattgcactacactccattccattacattctactctatctgagtcgattttattgcattagattctattccattggattactttccattcgattacattccattcatgtacattccattccagtcaattacattcgagttcattacattacattccagtatattccattgtattc

SEQ ID NO: 620610 - DNA, 536 bp, Homo sapiens
ttctattcccttctactgcatacaatttcactccattcgttcccattccattcaattccattccattcaattccattccatttgtttccattctcttcgattccatttctttatattccatgccattcgattccattctattggattgcattacattcgtgttcattccattccagaccattccatttgactccattcctttcgagccctttcaatttgagtccattcctttccagtccatttcactccagtccattactatccattccataccattccatccattccatcccattccattccattccattccattccattcaattgcattccattccattccattccattgcactrcactccattccattacattctactctatctgagtcgattttattgcattagattctattccattggattactttccattcgattacattccattcatgtacattccattccagtcaattacattcgagttcattacattacattccagtatattccattgtattcgatcccattccttt

SEQ ID NO: 620611 - DNA, 355 bp, Homo sapiens
ccattccagaccattccatttgactccattcctttcgagccctttcaatttgagtccattcctttccagtccatttcactccagtccattactatccattccataccattccatccattccatcccattccattccattccattccattccattcaattgcattccattccattccattccattgcactacactccattccwttacattctactctatctgagtcgattttattgcattagattctattccattggattactttccattcgattacattccattcatgtacattccattccagtcaattacattcgagttcattacattacattccagtatattccattgtattc

SEQ ID NO: 620612 - DNA, 608 bp, Homo sapiens
ttccattctcttcgattccatttctttatattccatgccattcgattccattctattggattgcattacattcgtgttcattccattccagaccattccatttgactccattcctttcgagccctttcaatttgagtccattcctttccagtccatttcactccagtccattactatccattccataccattccatccattccatcccattccattccattccattccattccattcaattgcattccattccattccattccattgcactacactccattccattmcattctactctatctgagtcgattttattgcattagattctattccattggattactttccattcgattacattccattcatgtacattccattccagtcaattacattcgagttcattacattacattccagtatattccattgtattcgatcccattcctttcaattccatttcattcgactccattatattcgattccattccactcgaatccattccattagaggacattccattccaatgcattccattccattccatagcattccattgcattcgattccattccatttgataccattccatttgatgccattcc

SEQ ID NO: 620613 - DNA, 533 bp, Homo sapiens
cttgcattccattctattcccttctactgcatacaatttcactccattcgttcccattccattcaattccattccattcaattccattccatttgtttccattctcttcgattccatttctttatattccatgccattcgattccattctattggattgcattacattcgtgttcattccattccagaccattccatttgactccattcctttcgagccctttcaatttgagtccattcctttccagtccatttcactccagtccattactatccattccataccattccatccattccatcccattccattccattccattccattccattcaattgcattccattccattccattccattgcactacactccattccattacattmtactctatctgagtcgattttattgcattagattctattccattggattactttccattcgattacattccattcatgtacattccattccagtcaattacattcgagttcattacattacattccagtatattccattgtattc

SEQ ID NO: 620614 - DNA, 509 bp, Homo sapiens
attctattcccttctactgcatacaatttcactccattcgttcccattccattcaattccattccattcaattccattccatttgtttccattctcttcgattccatttctttatattccatgccattcgattccattctattggattgcattacattcgtgttcattccattccagaccattccatttgactccattcctttcgagccctttcaatttgagtccattcctttccagtccatttcactccagtccattactatccattccataccattccatccattccatcccattccattccattccattccattccattcaattgcattccattccattccattccattgcactacactccattccattacattctactmtatctgagtcgattttattgcattagattctattccattggattactttccattcgattacattccattcatgtacattccattccagtcaattacattcgagttcattacattacattccagtat

SEQ ID NO: 620615 - DNA, 493 bp, Homo sapiens
tttcgcttgcattccattctattcccttctactgcatacaatttcactccattcgttcccattccattcaattccattccattcaattccattccatttgtttccattctcttcgattccatttctttatattccatgccattcgattccattctattggattgcattacattcgtgttcattccattccagaccattccatttgactccattcctttcgagccctttcaatttgagtccattcctttccagtccatttcactccagtccattactatccattccataccattccatccattccatcccattccattccattccattccattccattcaattgcattccattccattccattccattgcactacactccattccattacattctactctatctgagtcgrttttattgcattagattctattccattggattactttccattcgattacattccattcatgtacattccattccagtcaatta

SEQ ID NO: 620616 - DNA, 493 bp, Homo sapiens
tttcgcttgcattccattctattcccttctactgcatacaatttcactccattcgttcccattccattcaattccattccattcaattccattccatttgtttccattctcttcgattccatttctttatattccatgccattcgattccattctattggattgcattacattcgtgttcattccattccagaccattccatttgactccattcctttcgagccctttcaatttgagtccattcctttccagtccatttcactccagtccattactatccattccataccattccatccattccatcccattccattccattccattccattccattcaattgcattccattccattccattccattgcactacactccattccattacattctactctatctgagtcgattttattgcattagattctattccattggattactttccattcgattacattccattcrtgtacattccattccagtcaatta

SEQ ID NO: 620617 - DNA, 533 bp, Homo sapiens
cttgcattccattctattcccttctactgcatacaatttcactccattcgttcccattccattcaattccattccattcaattccattccatttgtttccattctcttcgattccatttctttatattccatgccattcgattccattctattggattgcattacattcgtgttcattccattccagaccattccatttgactccattcctttcgagccctttcaatttgagtccattcctttccagtccatttcactccagtccattactatccattccataccattccatccattccatcccattccattccattccattccattccattcaattgcattccattccattccattccattgcactacactccattccattacattctactctatctgagtcgattttattgcattagattctattccattggattactttccattcgattacattccattcatgtacattccattccagtcaattacattcgagttcattacattacattscagtatattccattgtattc

SEQ ID NO: 620618 - DNA, 608 bp, Homo sapiens
ttccattctcttcgattccatttctttatattccatgccattcgattccattctattggattgcattacattcgtgttcattccattccagaccattccatttgactccattcctttcgagccctttcaatttgagtccattcctttccagtccatttcactccagtccattactatccattccataccattccatccattccatcccattccattccattccattccattccattcaattgcattccattccattccattccattgcactacactccattccattacattctactctatctgagtcgattttattgcattagattctattccattggattactttccattcgattacattccattcatgtacattccattccagtcaattacattcgagttcattacattacattccagtatattccattstattcgatcccattcctttcaattccatttcattcgactccattatattcgattccattccactcgaatccattccattagaggacattccattccaatgcattccattccattccatagcattccattgcattcgattccattccatttgataccattccatttgatgccattcc

SEQ ID NO: 620619 - DNA, 580 bp, Homo sapiens
tcgttcccattccattcaattccattccattcaattccattccatttgtttccattctcttcgattccatttctttatattccatgccattcgattccattctattggattgcattacattcgtgttcattccattccagaccattccatttgactccattcctttcgagccctttcaatttgagtccattcctttccagtccatttcactccagtccattactatccattccataccattccatccattccatcccattccattccattccattccattccattcaattgcattccattccattccattccattgcactacactccattccattacattctactctatctgagtcgattttattgcattagattctattccattggattactttccattcgattacattccattcatgtacattccattccagtcaattacattcgagttcattacattacattccagtatattccattgtattcgatcccattcctttcaattccatttcattcgactccattatattcgattccattccrctcgaatccattccattagaggacattccattccaat

SEQ ID NO: 620620 - DNA, 580 bp, Homo sapiens
tcgttcccattccattcaattccattccattcaattccattccatttgtttccattctcttcgattccatttctttatattccatgccattcgattccattctattggattgcattacattcgtgttcattccattccagaccattccatttgactccattcctttcgagccctttcaatttgagtccattcctttccagtccatttcactccagtccattactatccattccataccattccatccattccatcccattccattccattccattccattccattcaattgcattccattccattccattccattgcactacactccattccattacattctactctatctgagtcgattttattgcattagattctattccattggattactttccattcgattacattccattcatgtacattccattccagtcaattacattcgagttcattacattacattccagtatattccattgtattcgatcccattcctttcaattccatttcattcgactccattatattcgattccattccactcgaatccattccrttagaggacattccattccaat

SEQ ID NO: 620621 - DNA, 597 bp, Homo sapiens
attagattctattccattggattactttccattcgattacattccattcatgtacattccattccagtcaattacattcgagttcattacattacattccagtatattccattgtattcgatcccattcctttcaattccatttcattcgactccattatattcgattccattccactcgaatccattccattagaggacattccattccaatgcattccattccattccatagcattccattgcattcgattccattccatttgataccattccatttgatgccattccatgacattccattccgttccaattcattccattccgtttcatgaaattcgagtcctttccagtacatttcattccaatcccatccaatccaatctactccattcaattcctttccattccatttgattwgattccattgatttgattccattcagtttgattccattccgtgaaatttcgttccattctattccattgcattactttccattcaattccattccatttcatttcagtccattcgcttcctttcctttcgattcaattccatttgattccactccattctatgcgatttcattccaat

SEQ ID NO: 620622 - DNA, 606 bp, Homo sapiens
tcctattatattttggaaggggtccatgttaagatttgagtgtcaccaagagaagacctgatgacccgtcccctaagacagcccaggagccttagcaaatttactgtgatctgacctaactgtatcagagatatagaactgatgggattcacccagatgacttaygcttctcaaactcacaaataaatgatatcaactgttgttaagtattcagaggagacatttttccattgaccagaatattcatgtcctccactcataacatacataatgtcctattttctttccccttttgccctgctgataggggttgacctctatagagtttatcagtagatcccagactctctgaattctggttgaggagccccggcaggagatcaaagaaaaggaggagattgaggttagggtattcattcccttactccctccccttgaggttgcctctgtctggttaggactcttgacaaagtcactgcatctctcaaagcagcccaagccccaggactctctccgtccttctagattctcataaactcttcctcccctctatccttcaagcctaggggtggtgaaaatttcatcactaacacagggtacctgcac

SEQ ID NO: 620623 - DNA, 582 bp, Homo sapiens
tattaaatctgaacaaagataatttatcactgataattttgttcatattctggaaattatttcattaatgaaatttaaagtgacatattatggctttcacttatccttatgagatatgaaaaattgccaataaggactttttcttgaaagacttgtggcctaaatggaattaagtaactaaatattaaatacagttcttaaaagttatattatttaaagatattacttaaatataagaattctacaatgatttgaattatggtataattcctaatagcttattatttaatttttttaaatgtctcaggtcaaaaataatcttcttcytaaagttatctagctatcatatgctataaattcatgatcataatctatatatttgctccttattcaaccataagaaaaatcttgagtgtttatgtaaagttaaattaacagctataacaatctacaattcatgatttatattttactttatacttcaagtgactgatagagctcaacatatgaagtgtgtaagaatacttcactaagttacatttaggttgcttagttgatgaaaagtgaatattaagatattaa

SEQ ID NO: 620624 - DNA, 648 bp, Homo sapiens
cataacgaacatcataaatattcatttgtatcctttttttcttgattagtccttctaaaagtttctccattgaattagttctttcaaatgactggttttggattatgttgatctatgtttgggggttttttaacttcagtagtatttgttctcatctttaatgttccttttaatcatttttaawcttaatttattctgttttttatttttctagtttccaaaatggaacatgaatcatttattttcacaattttttctttttaatagttacctcaaatactgccttagttgcctcctacaagttttgatatgtactacttttacttttgtacaacttttaaattgtgttttcttccttaacccataagttatttggaaatacactttaatatttccaaatacatggcaatttttcaactagcttttttttaactgacttgtggtcaaaaaaatagaaaaatatatattctctattattggagatgatatatagatatatagatggacatatagagatacatctatgcatacaatgtatgcatatagagagttagagatggaattaattttgcttttcgatgtttcttatttcttgatcttgtttttatattcttaatctatcagttttgttatgaatgaggatttgct

SEQ ID NO: 620625 - DNA, 613 bp, Homo sapiens
tggttttttctcccatcttcaaagcacatcactttaacctctgcttccatcacatttccttctctggctctgatcctcttgcctttctttaagaaaccttattattacactggtgatccaggataatcttcctatctcaagatccttaactgaatcacatctgcaaagccccttttgccatgtaaaataatatattcaaagccaggtgcggtggctcacacctgtaatcctagcactttgagaggctgaggtgggaggatcacttgagctcaggagttcgaggctagccttgacaacatggcaaaacatcatctctacaaaaaatacagggaagaaaaaaaaaaaacagttagccaggcattgtggtgtgcatctgcaggcccagctatttggtgggctgaggcagttggatcacttcagcccargaggtcaaggcagcagtgagccaagatcatgccactgcactccagcctgggtgacaaagtgagaccctgtctcaaaaccaacacaaaaattcaggagttctggggattaggacattaatattttgggggggaccattattctctctaccactatctttctataagtggatccccatagcttgctgggg

SEQ ID NO: 620626 - DNA, 635 bp, Homo sapiens
tcaattcatgtcctattagtcttggaatttaacaaggcctcacggcaaagaaggtctggaagagaacttattaactttccctcagagtaatgagtcccatatggaataaagaaagaataccaacttccaaaagacaaaagtcattaaagtcaacagagggttaatgtgatttttaataagaggcccattacaattctcaggacccataatgttggtaccacactgggcatctattgaaataaatcagagtggtttcttcattatcctccactaaagataaggtagcatctttctccctaaagtctcatatttttctcagggaattatatattacccgtcatcctttttcttgtaaataaacaagacaattatcacacttgtctttcataaaatattttcactaaagcaaaaacttcattcaattgttcattagaaaatgaatttgaatttggaattaactgactctagtgttaaaagtagtaacataaaattgacatcttacatacgtttatatcaggtatgtatgcatttaatacacaragaaatatttcttctaccataggtattgctaaacatccgtacttcatctagagcctcctctgaaaaacaccaagtttgggggtaaaaaaaaaatg

SEQ ID NO: 620627 - DNA, 562 bp, Homo sapiens
acttaaaacataaattgtcactgcattagccatcatatttacatgtctttgcaatccagtaattgccataaaagcctatcttatttttaaaaccaaaatgtaaaataatcaagttgctgtttttaactctcttgaatgagcagatttattatacagcaaaagttttaataaataaaaaaaaataaatccagtctgtaccattcagtcttgaatgacagcctgttaacaaggcaaggaaagaacaggtgagtgtttcatttaaagatttctgtaactgaaatgagcatcacgccaaccagattgggcagccacaagaaactgtatctgagaaaacaatccaaagctgcccgkgtgtgatacaactgccctgacttattttgagaaggaaaaactcctgctgtatttttccttaactcaaaaattaatcccttcctttgaaaaaaaaaacttatttataaatgaggacaggcagctttaactgtgacaataactattctaactcaccacaaattcaacggaagcctgcttttttcaccttaaattccatggattttattatccc

SEQ ID NO: 620628 - DNA, 562 bp, Homo sapiens
acttaaaacataaattgtcactgcattagccatcatatttacatgtctttgcaatccagtaattgccataaaagcctatcttatttttaaaaccaaaatgtaaaataatcaagttgctgtttttaactctcttgaatgagcagatttattatacagcaaaagttttaataaataaaaaaaaataaatccagtctgtaccattcagtcttgaatgacagcctgttaacaaggcaaggaaagaacaggtgagtgtttcatttaaagatttctgtaactgaaatgagcatcacgccaaccagattgggcagccacaagaaactgtatctgagaaaacaatccaaagctgcccgggtgtgatacaactgccctgacttattttgagaaggaaaaactcctgctgtatttttccttaactcaaaaattaatcccttcctttgaaaaaaaaaacttatttataaatgaggacaggcagctttaactgygacaataactattctaactcaccacaaattcaacggaagcctgcttttttcaccttaaattccatggattttattatccc

SEQ ID NO: 620629 - DNA, 568 bp, Homo sapiens
ctcctcacctcatataaaattctctggcagatcaccataatatttagaatgagatccaaatatctcagcagagacaacccttcaacatccrgtctctgttgactctacagtcttacctcccaccatctccaatctctaaaggaacaaaatgtctacttctgccatcagtacaaactagttgttcatgtctcagcatgctggaaaatgtggtttccaggagccaaaaatgccttcctaactccttcctgcccttctaaatgctactcatatctccgtcttcccatgtcttccctaactcctgaagtctgagtttgctccctcctttgggtagcccttgaagcctgcccttgctttagtccttatcacagagaagcctcacttctggtttgctgctcagccttacttagtagactcgaattcctgagttgagtctcttaactctgcaacctagcatcagacacccaacaactaaaactctgctaagaaggcaactaggttctaagatgaaaagtaggcatgttgatggcacaattacaaatctgttttgcaaacataaaatgttaatgct

SEQ ID NO: 620630 - DNA, 398 bp, Homo sapiens
ccttctcacttttttattttttcaactacttgtgatcatgctatatattagacttgtacagaagagaagttggactgtgatttattcttatttttaatttttgaaaagcatttgaagtaaattgaatcttacattatgtggagaagttgacctcgtgtaaaatgtattaatatttcagctgatttctggtatggttcagggtacctagaaaatatcttgtgccataaaaaatgctgaatacagactattatatgtctttatttattttctggattaggtggtttgggaaagtagaatgtasaaccatagaatgcttttgagtgatatgtgtgagtgagaaagtagaattttatggttctgattttctgttctaaaaattgatacataatattttacat

SEQ ID NO: 620631 - DNA, 630 bp, Homo sapiens
tggtggcactttatttatttatttatttccccccatattttatttactggtttgatggttcagatttcaggccagtaggggaggtatccctgggtagggaccagttgtaggtaaagcaggtggataaataaagtcccagcattgacagaggtaagtggaggagcttaagtgagttgcactgaggttttatcaagtgaagttttggaaccactttagctccctgccaggtcagtaggaaagttatccacctctcagacatgctactatcccagtgttctggttattcagatcaggcaggcacccttttcatctgtagaaatgttgaccttccaagtagagaggaattgtgactctgtctctcatgcaagcctgaacccaggtagtgctccttctgtggggatgcagtaccctgatgtgttccagaaatgctgtctatggttgcacccatactgagctcctgttggagaaacccaaactgcgcctatgatggtggataaggggggaaaggcttcctcttctccagtactcttcatggataccaggactgtctgactgttggaactgtctgactgagagctgaagaccttccctgcctagcccmgcacctcaacagtactgctgctgaaggaa

SEQ ID NO: 620632 - DNA, 416 bp, Homo sapiens
agactcagggacatggaaaagggtaaagccactgtcataaggtaaaagtcacctgagtccctaaacatcttgtgaatattggcatttaattgttatgtaactaaacaaagttttttttgtataaagctactgagattgagatattttataggagtttatgtcactttaattcatgtagaattggtatcttgaagtgaatgttgtgaaaatataagcatagacttagctgtgaggtgactggtggaagaataaactactatgggaagcagaaaatctgcagagccatacaacgttgtgataaaacatttgacagaaatgtcacctgmattatatggacaccatgtgcctgtagctctagaagaggttggaaaacaagatatgagtttttagtggtgatttttaaaactggccttcct

SEQ ID NO: 620633 - DNA, 620 bp, Homo sapiens
cttactctatgctcttcaaaaaagatttatattttcagggttgaaatatgattatgtcatctccattctcagttagaatattttaaatataccctcaaaattcctaggtaagtccaaattcccttatatggttcttgaagttctggaagtggtgttaccttgctctctggatttagctgtagttattactctccatgtgtgctaaagtatgccatttaaaactatttgtagttatctaactttatattctttcttgccttggggctttggcacatgctgtttcttgcctaaatgtacccacccctttcatgttgcttgtaaattcctccttgtcttccatgaccctagtctaagaactaaagtatctttcttaaatgctcccataaaaccatgtactcatcttatcataacactgatagtactctgttgacattgtcaactccctgtttcagatgtctatgaaacctcaactccctgattacagagactatatttttctcctttctatactgagtggctagtacagtatctcatgcatagaaaatatacgataattatttgttaaattgaaattcacaatttgtggyatagattagatgcatttgtgcctaactaaaaaa

SEQ ID NO: 620634 - DNA, 569 bp, Homo sapiens
aaaaataaaaattaaacacaaattgtgacattaaaaaatatgagtgcctgggtctcatttccaaaggttctagttcaactggtttgagatgaaactcacgaagcagtatttaaatttttttctcagatgattttaatgtacaaataagattgatgagaacagggcttgaggaaaataaattatgttgtcttttttttataatatcttaggatgggaattcatcctcattttccaagttaaaataactgtcttgctctrgcaaaactcagacagaactcatggaaaatacaaagttttcatctgtgtgtgtgtgtgtgtgtgtgtgtgtgtgtgtgcatgcacccagaaacacacatgtaagcacacatgtagcaatggtttaaaagaggacttttagagctctacagtcaggtagagacacatatctacgagagaaagcaaacttttcatcataagtcaaaggaaagggatgcaattaagagcgagcacagatctttagaaagcaataccaaatggtttgtaaaaggggatatttgtgaaaatagtgatcgtatgctaaaaattcctca

SEQ ID NO: 620635 - DNA, 656 bp, Homo sapiens
cttgtcttctatgtgtatacatgattaaagaactaatcccagatcatttctgcagtagaaagagtaggtaaatctgtttgctgtatttcagtatatgcctgcattctaaatagattttttttctagatttgcttcatcaatagtagacattttaaattttaaattacaaaactatatttgaattcttgaagtcatacatttgcagcagtgggaaagagcattctttcagagatgtggaacacacgttttataacatctatttctgaagctcagaatttctgtaayttccaaaagagtttttcagagaaaaagagatgttgatacatttcaaaaataggaggaggaggaggagaaagaaggggggaagaaatggagggagagaaatgagaagagaagaaagtggaggaaagaaggaggggatagaagcggcaggtggaggggaaaaacagttgccaaaaaagtaaatatgcttagaggaaaatattaatatttaaatgtttcttcttaaaaagttttattttttacactatgtaatttatcatacaaatatatatatagtatataagatatatactatatatatatctactttttttttttttttgagacagagtctcgctgtgttacccaggctggaatacagtggtgagatctcg

SEQ ID NO: 620636 - DNA, 586 bp, Homo sapiens
atgtttgtactaatttacattcccaccaagagtataaaagscttttcttttttccacacccttgccagcatctgtcagtaccagacttctaaataaaacaattttaactggggtgagataatatttcattttagttttgatttgcatttctccaatgatcaataatgtttttcatatgccctttggccatttgtatgtcttcacttgagaaatgtttattcaagtctttagcacatttttaaattagattaatttttccctatagagttgtttgtgctccatatacagtcttgctattaatacctttcagacgcatagtttgcaaatattttctcccattctgtgggttatctcttcactttgttgatgatttcctttgctgtgctgaagctttttaacttcagatcccgtttgctcatttttgctttggttgcttgtgcttgtgaggtattactcaaatctttttccagtcctatgttctggagagtttctctaatgtgcccttttagtagtttcatagtttgaggtcttagatttaagtttttaatacattttgatttgatttttctacatggtgagagatagg

SEQ ID NO: 620637 - DNA, 586 bp, Homo sapiens
atgtttgtactaatttacattcccaccaagagtataaaaggcttttcttttttccacacccttgccagcatctgtcagtaccagacttctaaataaaacaattttaactggggtgagataatatttcattttagttttgatttgcatttctccaatgatcaataatgtttttcatatgccctttkgccatttgtatgtcttcacttgagaaatgtttattcaagtctttagcacatttttaaattagattaatttttccctatagagttgtttgtgctccatatacagtcttgctattaatacctttcagacgcatagtttgcaaatattttctcccattctgtgggttatctcttcactttgttgatgatttcctttgctgtgctgaagctttttaacttcagatcccgtttgctcatttttgctttggttgcttgtgcttgtgaggtattactcaaatctttttccagtcctatgttctggagagtttctctaatgtgcccttttagtagtttcatagtttgaggtcttagatttaagtttttaatacattttgatttgatttttctacatggtgagagatagg

SEQ ID NO: 620638 - DNA, 586 bp, Homo sapiens
atgtttgtactaatttacattcccaccaagagtataaaaggcttttcttttttccacacccttgccagcatctgtcagtaccagacttctaaataaaacaattttaactggggtgagataatatttcattttagttttgatttgcatttctccaatgatcaataatgtttttcatatgccctttggccatttgtatgtcttcacttgagaaatgtttattcaagtctttagcacatttttaaattagattwatttttccctatagagttgtttgtgctccatatacagtcttgctattaatacctttcagacgcatagtttgcaaatattttctcccattctgtgggttatctcttcactttgttgatgatttcctttgctgtgctgaagctttttaacttcagatcccgtttgctcatttttgctttggttgcttgtgcttgtgaggtattactcaaatctttttccagtcctatgttctggagagtttctctaatgtgcccttttagtagtttcatagtttgaggtcttagatttaagtttttaatacattttgatttgatttttctacatggtgagagatagg

SEQ ID NO: 620639 - DNA, 528 bp, Homo sapiens
caaaaaagtataggtcttaataaaattaacacccatgtactcactatgccactttggaaataaaacatccccaatacaattgaagccccctatgaaccccacctcaaaakcattgttttccctttttattactatttattcaatttcctgtttgtaaattccatactttatgtatttacttaatatggatacattcttaaacaatatgtggtattgttttgcctgttttcaaactttctaaaaattgaattataacctgtagatttatttgcactcatatttgaaagttttatcaacattgatatatctagctcgtttattcatactttgattctttatggtattcaattatataaatatctaaaaacctattctccagtttatgagcatttagagtatttctaatttgtttctattacaaatattactaatataaggacccttgcacatgtacctagtagtagaattgctaaataatggcatgaacacactatcaacttcctgaagatagctagattgttctccaag

SEQ ID NO: 620640 - DNA, 528 bp, Homo sapiens
caaaaaagtataggtcttaataaaattaacacccatgtactcactatgccactttggaaataaaacatccccaatacaattgaagccccctatgaaccccacctcaaaatcattgttttccctttttattactatttattcaatttcctgtttgtaaattccatactttatgtatttacttaatatggatacattcttaaacaatatgtggtattgttttgcctgttttcaaactttctaaaaattgaattataacctgtagatttatttgcactcatatttgaaagttttatcaacattgatatatctagctcgtttattcatactttgattctttatggtattcaattayataaatatctaaaaacctattctccagtttatgagcatttagagtatttctaatttgtttctattacaaatattactaatataaggacccttgcacatgtacctagtagtagaattgctaaataatggcatgaacacactatcaacttcctgaagatagctagattgttctccaag

SEQ ID NO: 620641 - DNA, 465 bp, Homo sapiens
catgacaatgaagccctatttcagtaaatggctttgtctattttgctagctggcagctctcacgcttaaaacaaattaatgctactcttcagagtaagataaatatttttcactgttagtcagacacatgcatcactggtctgaacatcttgagtagagataggttataaataattacaattccttacakaagtaaaatgaagcaagcaataagaggtgagggtattgcttttgcagcactctttagtggtacatttctttaccctatctttagcaggccccttcaattatcaaataattgcatttaaaacagttgaaaattacagtaaaaaaatggataaatcttcttttcttgaaactccttaaagctccaagggaggatgagagccaagcgctaggctctgtgacagtggaataagccagtaaggttcttgccattgacattcatgttgggctaacactttg

SEQ ID NO: 620642 - DNA, 564 bp, Homo sapiens
cagaattttagttgattttatttcccaccctctcacatgcaaatgtcttaataagtccagagtagttgctacttcttcttcattggatccaatcagcataacattattaatgaaatggaacaatgtgataccttgtgaaagggaaaggcaatcaagatctttgtgaaccaaattgtgatacagtgctggagggttgatataatcctgatataggacagtgaaggtgtactgctggccttrccagctgaaagaaaactgtgatacagtgctggagggttgatataatcctgatgtaggacagtgaaggtgtattgctggccttaccagctgaaagcaaactgtttatggttggttttatggacaggtgtgaagaaaaaggcatttgccagattaatagctgcatacagctcccaagagatgtgttaatttgctcaagcaataaaaccacatgtggtacagtagctgaattagagtcactacttggttaaagtatagcaatctgctgtcattcctcaagaatacaccaaaccaggatattaaccactgatctagcaacaatgtggg

SEQ ID NO: 620643 - DNA, 615 bp, Homo sapiens
atagcagactcactttgattatgaccccaagggaatttcaacaagaccttcactatagtaacagggtttatttttcctgaggcagaaggagtatattgaaaaaaaaaatatgccttttgtggcaatgaggaaagcatttaatgattaggagtatttattaccatttgccttttggccamaactttattactgatgattgggggtaaatcctaatgctctacaattaatttccaaagtcacaaaataattgaaaagaatcacttttattaatctttaataattgagaattgtaacaagaatgaacaaaactttgaaagacaaacatcatgttttctaaagttaatttatgcctacttagttcattgtctaattgtaacatataccttactatgtacaagaaatagctgaacaaaatcagtaccatctgtactcaatgtttagaagatcgccttttacctttatatttaattgggtttacaacttcaaaggattattcataataaattttcattttaatgtattctttgaaattatgcacctgtaatacctcataaatttatgcacaataataataattagcatttatatgaagcttttcatcttcaaagcatatta

SEQ ID NO: 620644 - DNA, 590 bp, Homo sapiens
tgggctaacactttggtcatcagcccaagtctgtctagatttatggacacagccaataagaaatagagaatattccaagcgaattgctgccatggaatataatgccacataccacaagttaagcaaaaatgcatgtctcatttgtccttgaaatacattagtatagcacaaagatagaaaacatagcagactcactttgattatgaccccaagggaatttcaacaagaccttcactatagtaacagggtttatttttcctgaggcagaaggagtatattgaaaaaaaaaatatgccttttgtggcaatgaggaaagcatttaatgattaggagtatttattaccatttgccttttggccaaaactttattaytgatgattgggggtaaatcctaatgctctacaattaatttccaaagtcacaaaataattgaaaagaatcacttttattaatctttaataattgagaattgtaacaagaatgaacaaaactttgaaagacaaacatcatgttttctaaagttaatttatgcctacttagttcattgtctaattgtaacatataccttactatgtacaagaaatagctga

SEQ ID NO: 620645 - DNA, 615 bp, Homo sapiens
atagcagactcactttgattatgaccccaagggaatttcaacaagaccttcactatagtaacagggtttatttttcctgaggcagaaggagtatattgaaaaaaaaaatatgccttttgtggcaatgaggaaagcatttaatgattaggagtatttattaccatttgccttttggccaaaactttattactgatgattgggggtaaatcctaatgctctacaattaatttccaaagtcacaaaataawtgaaaagaatcacttttattaatctttaataattgagaattgtaacaagaatgaacaaaactttgaaagacaaacatcatgttttctaaagttaatttatgcctacttagttcattgtctaattgtaacatataccttactatgtacaagaaatagctgaacaaaatcagtaccatctgtactcaatgtttagaagatcgccttttacctttatatttaattgggtttacaacttcaaaggattattcataataaattttcattttaatgtattctttgaaattatgcacctgtaatacctcataaatttatgcacaataataataattagcatttatatgaagcttttcatcttcaaagcatatta

SEQ ID NO: 620646 - DNA, 615 bp, Homo sapiens
atagcagactcactttgattatgaccccaagggaatttcaacaagaccttcactatagtaacagggtttatttttcctgaggcagaaggagtatattgaaaaaaaaaatatgccttttgtggcaatgaggaaagcatttaatgattaggagtatttattaccatttgccttttggccaaaactttattactgatgattgggggtaaatcctaatgctctacaattaatttccaaagtcacaaaataattgaaaagaatcacttttattaatctttaataaytgagaattgtaacaagaatgaacaaaactttgaaagacaaacatcatgttttctaaagttaatttatgcctacttagttcattgtctaattgtaacatataccttactatgtacaagaaatagctgaacaaaatcagtaccatctgtactcaatgtttagaagatcgccttttacctttatatttaattgggtttacaacttcaaaggattattcataataaattttcattttaatgtattctttgaaattatgcacctgtaatacctcataaatttatgcacaataataataattagcatttatatgaagcttttcatcttcaaagcatatta

SEQ ID NO: 620647 - DNA, 590 bp, Homo sapiens
tgggctaacactttggtcatcagcccaagtctgtctagatttatggacacagccaataagaaatagagaatattccaagcgaattgctgccatggaatataatgccacataccacaagttaagcaaaaatgcatgtctcatttgtccttgaaatacattagtatagcacaaagatagaaaacatagcagactcactttgattatgaccccaagggaatttcaacaagaccttcactatagtaacagggtttatttttcctgaggcagaaggagtatattgaaaaaaaaaatatgccttttgtggcaatgaggaaagcatttaatgattaggagtatttattaccatttgccttttggccaaaactttattactgatgattgggggtaaatcctaatgctctacaattaatttccaaagtcacaaaataattgaaaagaatcacttttattaatctttaataattgagaattgtaacaagaatgaacaaaactttgaaagacaaacatcatgttttctaaagttaatttatgcctmcttagttcattgtctaattgtaacatataccttactatgtacaagaaatagctga

SEQ ID NO: 620648 - DNA, 617 bp, Homo sapiens
ttttggtggtttaaagagattgctccagtggacctgttagaggctctgacagggctcacagaattgagtaaagtgggaacgtacttcaatcactagttcctgttaagttgatacctgttttattcagtgcatctgacctttgagcttgamaatgattctttgtaagtgggagcttaaaatgtcatctgtaacataaaatataaggtatgtgggtgttacaaaagtgttctgtctctgtaatggagtggctcttgggagagttcactacctagggatcttttatctgtgagccatagttgctggcagactttacacacgggctttaaagtcaatgtgtgctctgtgttgagactttagtggacaagtacctctgtggtcaaagttcctggcacagtttgctaagacagaaatgaataagtactaatttgattctagtctagcttattatttcttctcttatgtgaacattttaggtggtaagtaaatagtggtcacacctgcactgtcaggtcatcagtgcttgtaactgagtgcagacctggcttctcagtgcttgcaaaaccagtaacattgtcaacgtgcagtgaaataaaagtgactttatttccagagctagc

SEQ ID NO: 620649 - DNA, 538 bp, Homo sapiens
ctgtgagccatagttgctggcagactttacacacgggctttaaagtcaatgtgtgctctgtgttgagactttagtggacaagtacctctgtggtcaaagttcctggcacagtttgctaagacagaaatgaataagtactaatttgattctagtctagcttattatttcttctcttatgtgaacattttaggtggtaagtaaatagtggtcacacctgcactgtcaggtcatcagtgcttgtaactgagtgcagacctggcttctcagtgcttgcaaaaccagtaacattgtcaacgtgcagtgaaataaaagtgactttatttccagagctagcagtggggaaatggttaaggcttttgccttgaatacaacatttcaggtttttgtgtcaaaggtaaaggcttaaaatgkggagtttggtataatgggcgtacaagagtgatgaggtagtgccagtctacatgattgttctaatgactatcttgaactgttgtcccatctggtaagtgggctggcacaatcttgagtacaccaggtt

SEQ ID NO: 620650 - DNA, 538 bp, Homo sapiens
ctgtgagccatagttgctggcagactttacacacgggctttaaagtcaatgtgtgctctgtgttgagactttagtggacaagtacctctgtggtcaaagttcctggcacagtttgctaagacagaaatgaataagtactaatttgattctagtctagcttattatttcttctcttatgtgaacattttaggtggtaagtaaatagtggtcacacctgcactgtcaggtcatcagtgcttgtaactgagtgcagacctggcttctcagtgcttgcaaaaccagtaacattgtcaacgtgcagtgaaataaaagtgactttatttccagagctagcagtggggaaatggttaaggcttttgccttgaatacaacatttcaggtttttgtgtcaaaggtaaaggcttaaaatggggagtttggtataatgggygtacaagagtgatgaggtagtgccagtctacatgattgttctaatgactatcttgaactgttgtcccatctggtaagtgggctggcacaatcttgagtacaccaggtt

SEQ ID NO: 620651 - DNA, 604 bp, Homo sapiens
gtggggagggaaacagagttctctcctatgtggaaaatatgaggaagggtggaaagtttcccccaaatattcagccactattggttttagatgagagtatgagcatgtgttaaaaggcagggttatttttgctcttagttagtgtaatagacagatctgtgcctgctcccaccaaacccccaaccccaacaacgatcttcaattcctaatttcagaacctgtagatacattacattacatgacagttgccaatcagttcactttaacagagagcagttatcctgggttattcaagtgggcccarcgtaattatatgagctcctaatagctggaaaaaggagtcctacaactgctaggacctgaattctacaagcccccagaaaggaatgcaacctgcagactcctttattttagttcactgagacatctaccagagttctacctacaaaaatgtaggataataagtttgtgctattttaagctcttgcatttgtggtaatttgttatagaagcattacaaaaagcagagtacttagtcacataaaaggctttgtaaagagttcgaaggtatgactcaaagattccctaaattaaaccagaaaat

SEQ ID NO: 620652 - DNA, 604 bp, Homo sapiens
gtggggagggaaacagagttctctcctatgtggaaaatatgaggaagggtggaaagtttcccccaaatattcagccactattggttttagatgagagtatgagcatgtgttaaaaggcagggttatttttgctcttagttagtgtaatagacagatctgtgcctgctcccaccaaacccccaaccccaacaacgatcttcaattcctaatttcagaacctgtagatacattacattacatgacagttgccaatcagttcactttaacagagagcagttatcctgggttattcaagtgggcccagcgtaattatatgagctcctaatagctggaaaaaggagtcctacaactgctaggacctgaattctacaagcccccagaaaggaatgcarcctgcagactcctttattttagttcactgagacatctaccagagttctacctacaaaaatgtaggataataagtttgtgctattttaagctcttgcatttgtggtaatttgttatagaagcattacaaaaagcagagtacttagtcacataaaaggctttgtaaagagttcgaaggtatgactcaaagattccctaaattaaaccagaaaat

SEQ ID NO: 620653 - DNA, 604 bp, Homo sapiens
gtggggagggaaacagagttctctcctatgtggaaaatatgaggaagggtggaaagtttcccccaaatattcagccactattggttttagatgagagtatgagcatgtgttaaaaggcagggttatttttgctcttagttagtgtaatagacagatctgtgcctgctcccaccaaacccccaaccccaacaacgatcttcaattcctaatttcagaacctgtagatacattacattacatgacagttgccaatcagttcactttaacagagagcagttatcctgggttattcaagtgggcccagcgtaattatatgagctcctaatagctggaaaaaggagtcctacaactgctaggacctgaattctacaagcccccagaaaggaatgcaacctgcrgactcctttattttagttcactgagacatctaccagagttctacctacaaaaatgtaggataataagtttgtgctattttaagctcttgcatttgtggtaatttgttatagaagcattacaaaaagcagagtacttagtcacataaaaggctttgtaaagagttcgaaggtatgactcaaagattccctaaattaaaccagaaaat

SEQ ID NO: 620654 - DNA, 604 bp, Homo sapiens
gtggggagggaaacagagttctctcctatgtggaaaatatgaggaagggtggaaagtttcccccaaatattcagccactattggttttagatgagagtatgagcatgtgttaaaaggcagggttatttttgctcttagttagtgtaatagacagatctgtgcctgctcccaccaaacccccaaccccaacaacgatcttcaattcctaatttcagaacctgtagatacattacattacatgacagttgccaatcagttcactttaacagagagcagttatcctgggttattcaagtgggcccagcgtaattatatgagctcctaatagctggaaaaaggagtcctacaactgctaggacctgaattctacaagcccccagaaaggaatgcaacctgcagactcctttattttagttcactgagacatctaccagagttctacctacaaaaatgtaggataataagtttgtgctattttaagctcttgcatttgtggtaattygttatagaagcattacaaaaagcagagtacttagtcacataaaaggctttgtaaagagttcgaaggtatgactcaaagattccctaaattaaaccagaaaat

SEQ ID NO: 620655 - DNA, 637 bp, Homo sapiens
tgggtaatttataaagaaaagaagtttaattgactcacagttctggatggctggggaggcctcaaaaaacttataatcatggtggaaaggaaagcaaacacatccttcttcacatggtggcaggaaggagaagaatgagagcaaagagggaaaaaccccttataaaaccatcagctcttgtgagaatttactcaccatcatgagaacagcagcatggatgtagcagcccccatgattcaaatacgtcccattgggtccctcccacaacatgtggggattatgggaactataattcaaaatgagatctgggtggggacacagccaaatcatatcaccctagtttaaaacacacttatgactattctagggccactttcaaaatactataccacttcatggatagtgcaggtgccttatgacaggatattcttgcttcttccctcccatcccttataacattgtgctcattcatttcacttactcaaaaactataattactaaaytgctgctatcattatcttgaacaaacttgttagataaactaagaataagaaaagtaaagtactttattttgattttaccttcatttttcctgctctagtgttccttctttctttgcatagacctaagtttttga

SEQ ID NO: 620656 - DNA, 463 bp, Homo sapiens
acactatactgtttacaacatttctatcccacctcctgaactcgtttcatcagacatctcctgccctaggcatgaccttgacatataagtgtcttgttcagccaataagtgtttgactgcatggtttgtatccacctctgtgccaagaactgtcacaagatccaaagaacaacaaaaacaatcatagagctttccgtttattttagataggtaaaacgaaagcttacaagctaattggagaattattaagaactgaactatgagaatgaaggcaggtaaatattactgaagaataaaagagtcatcagtttatttgaacacytttgaggaaattcacagctacaataagacatgatctgcagcctgaaagaataaacagactggtgaatgaggaaacaggaatgggcattccagatagggaggcaagcatgagctcagtggttgaaataatctctgagtctca

SEQ ID NO: 620657 - DNA, 573 bp, Homo sapiens
cataaccatagttatatctgcaaagtatctttttccacgaaaggcagtatagccataggtttcatgcattaatgtatggacatcaccataggccattattctgaccatcacaaattgtcctctaaaaatttattgaatctctgcatttgcttgtattcccctcctattctcctgtgtaatgtatatacttttatattattttatgatcattttactgtggttctgtgaggaaaagaagctaaatgaatgagcttagtttggcatcttgaatcagaagactttcsccaggagtttcttttgttcattatttgaaaaccattgtcatatagtcttgagtagggaaatgacacaataaaactttttatttttaaaatacatttttaaaattatctaacatgttcatcatttttattgttctcgtatatctttatcattttaaagtattctatacatgttcaaatgctgacactcttttttgtatttgtgtgtgtgtgtgtgtgtatttatatgtatgtgtctatatgtgtatatttctatggggagattttatgttaaagtggtatcagttatttt

SEQ ID NO: 620658 - DNA, 542 bp, Homo sapiens
aatctctgcatttgcttgtattcccctcctattctcctgtgtaatgtatatacttttatattattttatgatcattttactgtggttctgtgaggaaaagaagctaaatgaatgagcttagtttggcatcttgaatcagaagactttccccaggagtttcttttgttcattatttgaaaaccattgtcatatagtcttgagtagggaaatgacacaataaaactttttatttttaaaatacatttttaaaattatctaacatgttcatcatttttattgttctygtatatctttatcattttaaagtattctatacatgttcaaatgctgacactcttttttgtatttgtgtgtgtgtgtgtgtgtatttatatgtatgtgtctatatgtgtatatttctatggggagattttatgttaaagtggtatcagttattttgctagagaaaaaaaaactttctttccaaataactttcaaattgaggaagaaatatgatttgtcataaaatatttagtctaaccttacagtttaattattttaaa

SEQ ID NO: 620659 - DNA, 573 bp, Homo sapiens
cataaccatagttatatctgcaaagtatctttttccacgaaaggcagtatagccataggtttcatgcattaatgtatggacatcaccataggccattattctgaccatcacaaattgtcctctaaaaatttattgaatctctgcatttgcttgtattcccctcctattctcctgtgtaatgtatatacttttatattattttatgatcattttactgtggttctgtgaggaaaagaagctaaatgaatgagcttagtttggcatcttgaatcagaagactttccccaggagtttcttttgttcattatttgaaaaccattgtcatatagtcttgagtagggaaatgacacaataaaactttttatttttaaaatacatttttaaaattatctaacatgttcatcatttttattgttctcrtatatctttatcattttaaagtattctatacatgttcaaatgctgacactcttttttgtatttgtgtgtgtgtgtgtgtgtatttatatgtatgtgtctatatgtgtatatttctatggggagattttatgttaaagtggtatcagttatttt

SEQ ID NO: 620660 - DNA, 480 bp, Homo sapiens
catgttaaaaaaaattcaaaggcaatcattaagtaaacgacataaaatgtgtaacttccattccagaaaaagagaaacaaagcaacaaaataatctggataatccaatacgaggaaggaaaggaaaaaaaaaaaaagaagyaaagaaatgtattatcagtgatgttctagagccagcttatagtctttcagcagctttcaagagctgctatgcacatctcttttcatcttttcaaatctacttcagttacttcatgtcggttgcttgaattctgccatcttgacagtatttacatcaaggaaataatcaaatgctacaaattaataatcaaatgcttttgtttcagagagcctgtgttttgtatttgtttagaagatatccacataaaaatagtagagttgaaaaaatatgaacttgatgttgagaactagtgacactgagcagagacaattcttataaggaggtagcttcaattgcgta

SEQ ID NO: 620661 - DNA, 657 bp, Homo sapiens
ctcttgctgaattaactcatttatcattatataattactttctttgtctctttatagttttggtcttgaaatctatttcttctgatataaatatagctagctgtgttctttttcagtttccatacgaatggaatatcattttctatcccttcattttagtctatttatgtctttatagatgaagtgtatttcttgtaggcaacaggtgattgagtcttatttttttaatccattcagtcaatctatgtctttttattggagagattaatctttttcatggattaattcagtgttattattgataagtaaggacttacttattattattgatacattcagtgttactattgataagtaaggacttactcctactattttttaaatttgttttctcattgttttgtgatttttctctactgtctttccttccttcctgtctttcttttagtgaaggcattttccaaggtggtatgttttaatttcttgctttttattttttgcgtatatgctgaatattttttatttggggttaccatgaggcttgccaataataccttataactcattattttmaactgacgacaacttcacactgcataaacgaactcacaaataagcaaagaaataactatgtaactctgcactttaacttcatcc

SEQ ID NO: 620662 - DNA, 514 bp, Homo sapiens
aaggttttcatcttcataattccacagaaacggggaacactcatgttgccaaattcaatagctacctctctaacctcttcttattccatctcttagcacacaacacagttgaccagttgctcatgccctgtttctttaaaaactcctttttcttggcttttttgaaccacacttgtctgtgacagccaccactccttgacagctgtgctgtctccatttgacctctaaatgttaggactgatttgtgttaatagaattataggttacggagatggagccctcacaaattggattagtgtccttataagggccaaggaaaccagagctcttcccctcaactatgtgaggacagagtgagaaggttccttctgagtcatatagtgggtgttcaccagataccagttttgctggtgacttgatcttggacttctyagtacccagaactgtgggaaaaaaaatttggctgtttataaactactccacttatgctattttgttataattgctcagagta

SEQ ID NO: 620663 - DNA, 522 bp, Homo sapiens
cacgtggcttgtcagttttcccagcaccatttattaaataaggtattccttcaccaacttgtgtttttgtatgctttgacatatcacttggctgtacatatttggctttatttctgggttctctgttctgygccacgagcctatgtacctacatttataccattgccatgttgttttggtaactgtacccgtgtggtacaatttggagtccagtaatgcgatgtctctaagtttgttcatttgcttaggattgctttggctatccagcctctttttaggttctaaattaattttaggcttgctttatttttctaattctttgaaaaatgctgttaggtgtttgatgggaattgcactgaatctgtagattgctttggcctgcatggtcattatcacgatattgattcttccaatgaataaacatgggatgcatttccatttctttgtgtcagctatgatttctttccagagtgttttgtagttctccttgtagtgatctttcacttccttggttaaggtata

SEQ ID NO: 620664 - DNA, 583 bp, Homo sapiens
ggcttgtcagttttcccagcaccatttattaaataaggtattccttcaccaacttgtgtttttgtatgctttgacatatcacttggctgtacatatttggctttatttctgggttctctgttctgtgccacgagcctatgtacctacatttataccattgccatgttgttttggtaactgtacccgtgtggtacaatttggagtccagtaatgcgatgtctctaagtttgttcatttgcttaggattgctttggctatccagcctctttttaggttctaaattaattttaggcttgctttatttttctaattctttgaaaaatgctgttaggtktttgatgggaattgcactgaatctgtagattgctttggcctgcatggtcattatcacgatattgattcttccaatgaataaacatgggatgcatttccatttctttgtgtcagctatgatttctttccagagtgttttgtagttctccttgtagtgatctttcacttccttggttaaggtatattcctggatttcttttttatttatttattttttattattgacagctgttttaaaagggattgaatt

SEQ ID NO: 620665 - DNA, 595 bp, Homo sapiens
tacaagaaattttaaaaattagctgggtgtggtggtgtgagtctgtagccctagctacttgggaggctgaggtgygaggattgcttgagcctagaagttcaaggctatagtgacctacaaatgtgccactgaacttcagcctgggtgacagagcaagaccttatctccaaaataaaaatgaaaataaatagggccaggcgtggtggctcacacctgtaatcccagcactttgggaggccaaggcaggtgggtcacttgaggccaagagttcaagaccagcctggccaacatggtgaaaccccatctctactaaaaatacaaaacttaacagggtgtggtggcacgtgcctgtaatcccagctactcatgaggctgaggcaggagaatcgcttgaacccgggaggcagaggttgtagtgagccaagattgtgccactgcactccagcctgggtgtcagagcaagacttggtctcaaaaaataaaataaaataaataaaaattatttcttctgcccttaattatgtgtcacttttactcctcacttaattctttccattattcaataatagaaataggatagcacaaggagttgagg

SEQ ID NO: 620666 - DNA, 595 bp, Homo sapiens
tacaagaaattttaaaaattagctgggtgtggtggtgtgagtctgtagccctagctacttgggaggctgaggtgtgaggattgcttgagcctagaagttcaaggctatagtgacctacaaatgtgccactgaacttcagcctgggtgacagagcaagaccttatctccaaaataaaaatraaaataaatagggccaggcgtggtggctcacacctgtaatcccagcactttgggaggccaaggcaggtgggtcacttgaggccaagagttcaagaccagcctggccaacatggtgaaaccccatctctactaaaaatacaaaacttaacagggtgtggtggcacgtgcctgtaatcccagctactcatgaggctgaggcaggagaatcgcttgaacccgggaggcagaggttgtagtgagccaagattgtgccactgcactccagcctgggtgtcagagcaagacttggtctcaaaaaataaaataaaataaataaaaattatttcttctgcccttaattatgtgtcacttttactcctcacttaattctttccattattcaataatagaaataggatagcacaaggagttgagg

SEQ ID NO: 620667 - DNA, 421 bp, Homo sapiens
acacacgtacaaatgtatgcacaactagacataacaaacacttgtttacggctctataggcatcagaaattctgttaattaatggaaatcccaaaagctaataatgacttgcatcaaggcacatcgagtttattaaaaagagatattcaatacatatttgaagaayttcagataaaatggtagaaacataaagaatatactgagattcaaagataataatatgactttagggaaaagagggcagtgtatgatgtatatgggacagtcaagagggaagtcttgggagattgagtttgacttgaatactgaaagtggtgtgtctgtaaaagtaaagtgagaataaatgacattcacaaaaaatgaaaattgtaaaaaaaaaaagtagcagtaggaatgtaaaggaatacatatgaaatttgtt

SEQ ID NO: 620668 - DNA, 554 bp, Homo sapiens
aggagttggagaccagcccggccaacatggcgaaaccccgtctctactaaaaatacaaaaagtagccaggcatggtgacrggtgcctgtaatcccagctacaggaggctgagacaggagaatcgcttgaacccaggaggtggaggttgcagtgagccaagatcatgcaattgttctccagtctgggggacagagcgagactccatctcaaaaaaaaaaaaattaggaaaaaaaaaatcacctagcctaaaaagaaggaaagataagaattacagttggcccttgaacaatgcaggagttagggacaccgatgcccccacacagtcaaatctacatataacttttgactctaaaaatttactaatagcctactactgaccagaagccttaccaataatataaagtcaattaacacatcttttgtatgttagtgtgtattacatactgtattcttacaacaaagctacagaaaataaaatgttactaacaaaatcataaggaaggaaaatacatttacagtaatgtactgtatttatcaataccataaatttatat

SEQ ID NO: 620669 - DNA, 530 bp, Homo sapiens
tttttattaaaaattttttttgtgtgtgagaagacaaggtatcgctttgtggcctacgctggtttcaaactcctggactcaagcatttcttctacctcagcctcccaaaatgctgggtttacaggcatttggtaccatgttcagcctgtttttattatatttttttagagatagggtctccttctgttgccaagggcagagtgcagtggcatgatcatagcactggagcctcaaattcctgggcgtaagtgatcctcctgcttcagcctcccaagtagctaggctgaacagcatgagccamcacacctggctaattaaaaaaatttttttttgtagagatgggtctcactatgttgcccaggctattctcgaactcctgggttcaagtgttcctcctgctttggcctcccaacaccctggattacgggcatgggactacatctggcccatttctttacattttaaacatttttatatcacagtgctccacatgaggttcttttaaaccaccaaaaggtggtgtttttttt

SEQ ID NO: 620670 - DNA, 640 bp, Homo sapiens
atagtccttcatcactttaaatatgtcatgccgccttcttctggcctgtaacgtttccactgaaaagtcttctgccrgacatattggtactccattgtgtggttatttgtttcttttctcttgcggcttttaggatcctttctttatccttgatctttggtagtttattaaatgctttgaggtagtcttctttgggttaaatctgcttagtgttcagtaaccttcttgtacttgaatgttgatgtctttctctgatattatgcctttgaataaactttctactcctatctgtctcaatctccttttaaaggccaataactcttagatttgcccttttgaggctatgtttttgatcttttaggtatgcttcattctttttcttttttatttatttattttgtatcctctgtatattttctaatagtctatcttcgagctcattatgtctttcttttgtttgatcaattctgctgttatgagactctgatactttcttcagtatatcaatcgctttttttttttttgagacaggatctctgttacccaggctagagtgcagtcatgtgatcttggctcactggaacctccacgtcccgggttcaagcaattctcctgcctcagcctcctgagtagctgggaa

SEQ ID NO: 620671 - DNA, 584 bp, Homo sapiens
ccaggcatggtggctcacgcctgtaatcccaatacacccgaggcaggtggatcacttgaggtcaggagtttgaaaccagcctggccaacatagtgaaacctggtctttactaaaatacaaaaattagctgggcatggtggtgcacacctgtaatcccagctactcagaaggctgaggcaggagaatcacttaaacctgggaggcagaggttgcagtgagctgagatcatgccactgcactccagcctgggcaacagagcaagactccgtctcaaaaaaaataaaaataaaaaaaccaaaagaaaacaaaaaaaaaaggctaggcaaggtggctcatgcctgtaatcccagcgctttgggaggccaaggcaggtggatcacctgaggtcaggagttcgagaccagcctgaccaacatggagataccagtctctactaaaaatacaaaattagttgggtgtggtggcrcatgcctgtaatcccagctacttgagaggctgaggcaggagaatcacttgaacccaggaggcagaggttccagtgagccaagatcatgccattgcactccagcctgggcaacaagagc

SEQ ID NO: 620672 - DNA, 302 bp, Homo sapiens
tgtcacacattttacctatacgcatgttataaacccctcaatacgctgttgttatttttgtttaaaaagtcaattatctttataagagattttaaaaataattaaaactctcatatatttattaacaaagttaccacttacagtgctttttattcctttgtgtaaatctgtatttctacctggcgtcacttccttccagtataaaaacgttaacatttcttktagtgaagaaatgctggtaataaattatttaagtttttgtctatctgaaaaggtttttattttgccttcattttttaaag

SEQ ID NO: 620673 - DNA, 563 bp, Homo sapiens
gagctggcagggcaggtgccccaaaccccttggttcatcacctgatataacataaaagaataaaaagaaatatccctggacctctggtcatttccctagactcaggatagcccctcactctctggcctagccctgattctctttgcaagagtgggctcttaaaagagtgggttctcagctggctgagcaagggcatgggaaggtgagtgggtgttgaaaaggaaatggatgaacagtgtgaaatctgcattacacttctacccagcatgggcaggaaagaaggaaataagttttcgcccaagttcccaaacccatattttccttcctgctctatagatactttataatggcaatcatgcctcgccagatgaaaaaatagattcaytcattcatgtgttaattctataaacataactactatgtaccaggcatggtactagatactagagatactaacatgaataagacacagattctggcctcagagagcacacactctagcagggaagactgaaaaattaagaaatcatgacatagtgagctaagttctatgacagggatga

SEQ ID NO: 620674 - DNA, 509 bp, Homo sapiens
agataatatgtccatgtgtgctcaataatttgaaaggaattgctctttatatcaagaattaaaagaatggaaataaagcccagaaataaaagtttaaacatttttcaaagtactgtctttgtgaaaacagttttcttagggaattgcacaggttaaaacaattaatgaatgcttacttcacaaaaagataacatttagaaaaaaatattaatggtactacttcaataaaaaataaatgcaactgggttaatgaattctttctaaaaattaagcttgagtattactttagaaatttttaccatgtcttaaaactaaaacacatatttaaattgttttattattgaatgcaaagttatatttactttytgtaatttttcctttaaactaattgaaagccttcatatataatattatagtttttctagatgacaaaaatctagtgagttgtcattgagcctctgtattttataaaaacaactacagtgaaacttaaaatgttctgtgaacca

SEQ ID NO: 620675 - DNA, 614 bp, Homo sapiens
gtattactttagaaatttttaccatgtcttaaaactaaaacacatatttaaattgttttattattgaatgcaaagttatatttactttctgtaatttttcctttaaactaattgaaagccttcatatataatattatagtttttctagatgacaaaaatctagtgagttgtcattgagcctctgtattttataaaaacaactacagtgaaacttaaaatgttctgtgaaccaaattcttatgtcatttggttcagagtctaggtccagaatctgacatttgtgtcctgaggttagcaattccccggtagattagacacaaatagcaaaatcaataccaacacacaaagtgaataccttacaaaatgagtgtattaccatgtattcaaatttcayatttttcctgaaattcttaggactaaaggctttgtattgtagcagcagttaaactgagatatttgcaacacaagagaaaatcactactaagccattatcttgcaacggtaaaaatcagaacagccataagcaaactcacaaccaatcagagctgagtaattctacaccataagacaagaacccagccacttcccagccccctcccccaattactgaattc

SEQ ID NO: 620676 - DNA, 614 bp, Homo sapiens
gtattactttagaaatttttaccatgtcttaaaactaaaacacatatttaaattgttttattattgaatgcaaagttatatttactttctgtaatttttcctttaaactaattgaaagccttcatatataatattatagtttttctagatgacaaaaatctagtgagttgtcattgagcctctgtattttataaaaacaactacagtgaaacttaaaatgttctgtgaaccaaattcttatgtcatttggttcagagtctaggtccagaatctgacatttgtgtcctgaggttagcaattccccggtagattagacacaaatagcaaaatcaataccaacacacaaagtgaataccttacaaaatgagtgtattaccatgtattcaaatttcatatttttcctgaaattcttaggactaaaggctttgtattgtagcagcagttaaactgagatatttgcaacacaagagaaaatcactactaagccattatcttgcaacggtaaaaatcagaacagccataagcaaactcacaaccaatcagagctgagtaattctacaccataagacaagaacccagccmcttcccagccccctcccccaattactgaattc

SEQ ID NO: 620677 - DNA, 553 bp, Homo sapiens
catctcaccccaatgagaatgactattatcaaaaagaccaaaaaaaataaaaataacaaatgctggcaaggatgtggggaaaacatactctcatactaggctggtgcaaaagtaattgtggtttttgccattaaaattaatagctacccactcccaaaaaaagayacctaggaataaatttaaccaaggaggtgaaaggcctctacaatgaggccactgccattacttttaatggcaaaaactgcaataacttttgcacccacctaatagtatagccattatggaaaacagcatgaggggttctcaaaaaactaaaaatagaactaccatacaatctagcaattacagtactgggtatttatccaaaggatagaaaatcagtatatccaagggatacctgcagccccatgtttattacagcagcactattcagaaaaactaagatgaaatcaacctctatgtccatcaatggaaaaatggataaagaaaatgtggcatacatacacaatggaatattattcagtcatgaaaatgatattctgtcattcatggc

SEQ ID NO: 620678 - DNA, 553 bp, Homo sapiens
catctcaccccaatgagaatgactattatcaaaaagaccaaaaaaaataaaaataacaaatgctggcaaggatgtggggaaaacatactctcatactaggctggtgcaaaagtaattgtggtttttgccattaaaattaatagctacccactcccaaaaaaagacacctaggaataaatttaaccaaggaggtgaaaggcctctacaatgaggccactgccawtacttttaatggcaaaaactgcaataacttttgcacccacctaatagtatagccattatggaaaacagcatgaggggttctcaaaaaactaaaaatagaactaccatacaatctagcaattacagtactgggtatttatccaaaggatagaaaatcagtatatccaagggatacctgcagccccatgtttattacagcagcactattcagaaaaactaagatgaaatcaacctctatgtccatcaatggaaaaatggataaagaaaatgtggcatacatacacaatggaatattattcagtcatgaaaatgatattctgtcattcatggc

SEQ ID NO: 620679 - DNA, 553 bp, Homo sapiens
catctcaccccaatgagaatgactattatcaaaaagaccaaaaaaaataaaaataacaaatgctggcaaggatgtggggaaaacatactctcatactaggctggtgcaaaagtaattgtggtttttgccattaaaattaatagctacccactcccaaaaaaagacacctaggaataaatttaaccaaggaggtgaaaggcctctacaatgaggccactgccattacttttaatggcaaaaactgcaataacttttgcacccacctaatagtatagccattatggaaaacagcatgaggggttctcaaaaaactaaaaatagaactaccatacaatctagcaattacagtactgggtatttatccaaaggatagaaaatcagtatatccaagggatacctgcagccccatgtttattacagcagcactattcagaaaaactaagatgaaatcaacmtctatgtccatcaatggaaaaatggataaagaaaatgtggcatacatacacaatggaatattattcagtcatgaaaatgatattctgtcattcatggc

SEQ ID NO: 620680 - DNA, 601 bp, Homo sapiens
catttattttcaagtgttaactcccttccagtttctgtctgcttttggccactctctagtaccttcagttagtttttttaaatgtcgaatccagagcttatagttgttatatttggtatgttatatatgggaggagctgccttattattaccagaagttttattatggttgttgcttctagtgtatgttcacagtttgttttttttttttaattttttttggcaaaccaataaaaaaggaagataatttttttttatttgcaaaacatgctttactaggaattagcctaaggattctcaaaagtactggtcaaagtcgatgctttggagctgcagactgcttattaatttagtttgatcttatctagatatccttctggtgctactgacctgggccaggggtgtctaatcttttggcttccctgggccacactggaaggagacaaattgtcttgagccatacagaaaatacactaacatgaatgatagctgatgagctaaaagaacaaaaatcacacaaaaaaacttatrttttaagaaagtttgcaagtttgcgtttggccacattcaaagccatgctgggccacaggttggacaagctt

SEQ ID NO: 620681 - DNA, 384 bp, Homo sapiens
taagagtaatattttttattgtggtttttattagtgtaacaataacaaatgcttctgtagttcattattatgaacagtaaactcatgtacctgattatgctttttgtcgagatgaggaaactgtggtaggggtttgactggtagcaggttgcaggcaccctgcgctccgtctctatgttcttgttcttccctcagcctttctgccccctcccagtcatagcctccctcctgagctctgcatccatcagcaaagactttaaccatttaggtttagatcatcattacttctgactattcgtttttgattgtgttgtcagaagactttttgttataaagaagagaattataaaacatagatttgamgcaagcgtagcatatttgtac

SEQ ID NO: 620682 - DNA, 526 bp, Homo sapiens
gtataatttaggatctcgtcagaaaggaraaactacccttagtatttcagacaaagagaatttaattcagagttggttacaggaatgttggggagaggagttagagaaacaagaggggaaagtagttttaccagatgcttagtaactgtggactccagagttgaaggagcaaaagagaagcagatctttcccagctcttgaggtcactgctgttacaagttcctgctgttagcactaggacctgccctcccaggcctctggcattgtgtctcctgtcattaatgctaatcctgctcccctgctgctgaagatgacactggaaactgggaagatgaagaaagtcactcttctgtctctcttttcttcaatctcccaacagtgcctttcattggcagaactgaaacagaaactaatttttaagggagtctgggaaatagaatctgtagatttctagccactaaaatagagagaagagcacatcaaaacaagaaattggctaatagcaccaaaataattgaccagcata

SEQ ID NO: 620683 - DNA, 598 bp, Homo sapiens
tcatagtgcatctcagcaattattaaaaaatgtcatctttttcaatcgtagtctgttactttaaaagattaccgccaaaaattatttaatctcatttcattaaaaatacatttttttgctggtataaataatacatacataaagttgacccttgaacaacacagggattaggggaccaacacccccacacagttgaaaaatctacatatgactttgcactcacccaaaactttactattaatagtctactgttggcygggcacagtagctcaccactgtaatcctagcactttgggaggccgagtcgggtggatcacttgaggtcaggagttctgaaccagcctggccaacatggtgaaaccatgtctctactaaaaatacaaaatatattagctgggcttggtggcaggcacctgtaatcccagctacttgggagactgaggcaggaaaatcacttgaacctaggaggcagaggttgcagtgagccaagatcacgccactgcactgcagtctgggcaaaagagtgagactccccctcaaaaaaaaaaaaaaggaaaaagaaaaaaaggcctactgtttgctggaagccttactgata

SEQ ID NO: 620684 - DNA, 598 bp, Homo sapiens
tcatagtgcatctcagcaattattaaaaaatgtcatctttttcaatcgtagtctgttactttaaaagattaccgccaaaaattatttaatctcatttcattaaaaatacatttttttgctggtataaataatacatacataaagttgacccttgaacaacacagggattaggggaccaacacccccacacagttgaaaaatctacatatgactttgcactcacccaaaactttactattaatagtctactgttggccgggcacagtagctcaccactgtaatcctagcactttgggaggccgagtcgggtggatcacttgaggtcaggagttctgaaccagcctggccaacatggtgaaaccatgtctctactaaaaatacaaaatatattagctgggcttggtggcaggcacctgtaatcccagctacttgggagactgaggcaggaaaatcacttgaaccyaggaggcagaggttgcagtgagccaagatcacgccactgcactgcagtctgggcaaaagagtgagactccccctcaaaaaaaaaaaaaaggaaaaagaaaaaaaggcctactgtttgctggaagccttactgata

SEQ ID NO: 620685 - DNA, 640 bp, Homo sapiens
acattggcatttctgctgtttgagggttgctagatatgtagccagaggaatttagtaaatgcaaatgtgttgacataaatgagataaatgattttgtcgaaaggttgtggatgtccaaagtgacatgagcaaaaactaaaaaaactgaaaaactctcaaagatattttatgacattgaaagcacataggataaaatgttggaaattgatccaaatgtagaaaggagtatgacaatttgccaaggcatgaaaaaggtacttggtctgtagactatawgaagagaaggtgggcattatgcaaacaactgctgataacatttttgcaaagaaattaaaacactttaattttcgatgtttctaattacattatactaaataaatattagtttcatggttgttttcatttttttgaacgtttgtaagtgaccaaaatagttttttaatcttttgagaaacctttgaaagattatgaaattatctaattttttcccacaattatgaaaattgccttgcacgatttcagcatgagtgatcatttcttagtcttatactacaaagccaacaagtcctaacctccaatctcttttctcctgttattactccaatggagaaacaacaattaaagtaatagtctaacattt

SEQ ID NO: 620686 - DNA, 450 bp, Homo sapiens
atgtgcattcttcatgatccttttgaaagagatcttggtttagataatattcttatgtaactaaagaatgatttgtccattcttatgttttgtcttcgatcaaccaatacatgatgaaaagaatatcttratgaaagggagaactgtgtcattgcagagtgaaatatgggtgattcatatcttaatgaaagggagagctgtgtcattgtagagtgaaacacaggtgattcatatctttgtgcggactatccatggcatatttaaaagcttagatcagctgctctttcctttccagcaggattctttgctgtcttctcagagtgtgatgaaatattcaattcttttaacattagcttgaacaaaacaaaattggagaaatagcctgtcattaaggccttctataacccaccattgttaaccatcttggattttctgtgtaatattagcaca

SEQ ID NO: 620687 - DNA, 528 bp, Homo sapiens
ggacaggctccacgcgaagcggctattcctgaatttgccctcggccccccgcccccgcgggcctcggtgttgagggctctgccctctgggcagcggmtcttgggggaggggtgcaggggggcttggccagcggggaactttgccggaggggcggccattcatggttccggatgaactgtgtgattctcgccgttggggtttatttgacacgcgcgctccgcggcggtaatgagcagagccgggcggcttctccgcttgacaatgcgtttccgcagacccctgcgcgcggcggagagagagggggctgcctgccagggtgatgtgcctgcggctcccactgcgcctggcgcgcgggcgcggggactccctatgggctgtatctgagcagatctctgactatgggtcgcgtgtgcgggtgagtgcgtctgaatggagggtatacccaggtcgtgtgacactttaagtaggtgcctggtctcgccgtgccaccgagcggcccgacatccacggaacccctgccatcgtgcc

SEQ ID NO: 620688 - DNA, 528 bp, Homo sapiens
ggacaggctccacgcgaagcggctattcctgaatttgccctcggccccccgcccccgcgggcctcggtgttgagggctctgccctctgggcagcggctcttgggggaggggtgcaggggggcttggccagcggggaactttgccggaggggcggccattcatggttccggatgarctgtgtgattctcgccgttggggtttatttgacacgcgcgctccgcggcggtaatgagcagagccgggcggcttctccgcttgacaatgcgtttccgcagacccctgcgcgcggcggagagagagggggctgcctgccagggtgatgtgcctgcggctcccactgcgcctggcgcgcgggcgcggggactccctatgggctgtatctgagcagatctctgactatgggtcgcgtgtgcgggtgagtgcgtctgaatggagggtatacccaggtcgtgtgacactttaagtaggtgcctggtctcgccgtgccaccgagcggcccgacatccacggaacccctgccatcgtgcc

SEQ ID NO: 620689 - DNA, 461 bp, Homo sapiens
ggatgcttggtccagcaggaacagggcatgtgtgagttcaatgcagatttgatgcagatgagcccccaataattcagaggcctagggctgctacagagggtgcaggatgtcakgggtggagcgctcaaggccccttcccggtctccaacacccccacacccccaccacctactgggggtagccaggcagcctcagttcccccatggaagccctgacagggcaactgctctcccccgggcctgctaggtgtgcccagtgctgtgctgctgcttgggaagaagctggggcaccttatgacatgggcatccatctctgtttcctctcattgatctggaaactctagttcctcgtaggacaagacacagaaggcagtaaagaaccgggctggggatggtacctgcattcttatctcagctccgtaaccagctgtgagctctcagcctgctacatcccctgtgtgg

SEQ ID NO: 620690 - DNA, 461 bp, Homo sapiens
ggatgcttggtccagcaggaacagggcatgtgtgagttcaatgcagatttgatgcagatgagcccccaataattcagaggcctagggctgctacagagggtgcaggatgtcatgggtggagcgctcaaggccccttcccggtctccaacacccccacacccccaccacctactgggggtagccaggcagcctcagttcccccatggaagycctgacagggcaactgctctcccccgggcctgctaggtgtgcccagtgctgtgctgctgcttgggaagaagctggggcaccttatgacatgggcatccatctctgtttcctctcattgatctggaaactctagttcctcgtaggacaagacacagaaggcagtaaagaaccgggctggggatggtacctgcattcttatctcagctccgtaaccagctgtgagctctcagcctgctacatcccctgtgtgg

SEQ ID NO: 620691 - DNA, 461 bp, Homo sapiens
ggatgcttggtccagcaggaacagggcatgtgtgagttcaatgcagatttgatgcagatgagcccccaataattcagaggcctagggctgctacagagggtgcaggatgtcatgggtggagcgctcaaggccccttcccggtctccaacacccccacacccccaccacctactgggggtagccaggcagcctcagttcccccatggaagccctgacagggcaactgctctcccccgggcctgctaggtgygcccagtgctgtgctgctgcttgggaagaagctggggcaccttatgacatgggcatccatctctgtttcctctcattgatctggaaactctagttcctcgtaggacaagacacagaaggcagtaaagaaccgggctggggatggtacctgcattcttatctcagctccgtaaccagctgtgagctctcagcctgctacatcccctgtgtgg

SEQ ID NO: 620692 - DNA, 445 bp, Homo sapiens
ggaattcgtttctgaaactttaaatctgttctaaaatacaaagttagaagaaaaatctcacatcwagagcaagcctcccacaggcacgcagtggcctctgcgaccgggccctggcctcctgttgagttatgtctcccttctctcccttctaggtacctcccattcctgccatatctgcaagtcaaaatttctagacagccccatgatattcagttctctgggctgttgaaaattatgcacacgccgccccaccaccaccacctgccccgtgaacacttcctactcaagaacaaactccaagataaaggcttcctctagagagctctcctcttgcctctgaccccagcccaggctggctcggtgcccagtccctggcacctccagaacggcttccccagcttctcaaggttgtgaagtggaaactgggtgtgggagctatcttagt

SEQ ID NO: 620693 - DNA, 423 bp, Homo sapiens
aagaaaaatctcacatcaagagcaagcctcccacaggcacgcagtggcctctgcgaccgggccctggcctcctgttgagttatgtctcccttctctcccttctaggtacctcccattcctgccatatctgcaagtcaaaatttctagamagccccatgatattcagttctctgggctgttgaaaattatgcacacgccgccccaccaccaccacctgccccgtgaacacttcctactcaagaacaaactccaagataaaggcttcctctagagagctctcctcttgcctctgaccccagcccaggctggctcggtgcccagtccctggcacctccagaacggcttccccagcttctcaaggttgtgaagtggaaactgggtgtgggagctatcttagtttcctgtgactgctgtatggaattc

SEQ ID NO: 620694 - DNA, 421 bp, Homo sapiens
agaaaaatctcacatcaagagcaagcctcccacaggcacgcagtggcctctgcgaccgggccctggcctcctgttgagttatgtctcccttctctcccttctaggtacctcccattcctgccatatctgcaagtcaaaatttctagacagcyccatgatattcagttctctgggctgttgaaaattatgcacacgccgccccaccaccaccacctgccccgtgaacacttcctactcaagaacaaactccaagataaaggcttcctctagagagctctcctcttgcctctgaccccagcccaggctggctcggtgcccagtccctggcacctccagaacggcttccccagcttctcaaggttgtgaagtggaaactgggtgtgggagctatcttagtttcctgtgactgctgtatggaatt

SEQ ID NO: 620695 - DNA, 423 bp, Homo sapiens
aagaaaaatctcacatcaagagcaagcctcccacaggcacgcagtggcctctgcgaccgggccctggcctcctgttgagttatgtctcccttctctcccttctaggtacctcccattcctgccatatctgcaagtcaaaatttctagacagccccatgatattcagttctctgggctgttgaaaattatgcacacgcygccccaccaccaccacctgccccgtgaacacttcctactcaagaacaaactccaagataaaggcttcctctagagagctctcctcttgcctctgaccccagcccaggctggctcggtgcccagtccctggcacctccagaacggcttccccagcttctcaaggttgtgaagtggaaactgggtgtgggagctatcttagtttcctgtgactgctgtatggaattc

SEQ ID NO: 620696 - DNA, 594 bp, Homo sapiens
cgggaaccgtgttagtcagtttgtcttattctgcagagcccatatcccactgtgaattctcagcaagacatcataattatccataattagataaagtctgaacattaaacccgtccttctaaaaacaaaaactggtggtttgcaacacactagatcttctgcagtccaaagttgcggctggaaggaagctggcaaactccttaaatgcaayggtgaataaagtttttgaaatgacaatgggccaatactttaaaaataaatctgtttcgaatgaaaagtaatttaggatttaagactccagtagtgatgcaaaaaggaagggaaaggcctcaagacaccttttgctaagtcggagcgattgaattcattcccaccagcttgatcctttcctgaaggcagccagggattgcgtccagtcaccctcaaacatctcatcaatctcctgccacaaaaatgaatcagcattgcacacagaccctcatcctacagcccctcagcaaaagcacctgccaggctgggttagaaaggagtgacacggccggccacagatggaagtccccaagctgcagcactagggggccagcgggaggagcg

SEQ ID NO: 620697 - DNA, 461 bp, Homo sapiens
aagctggcaaactccttaaatgcaatggtgaataaagtttttgaaatgacaatgggccaatactttaaaaataaatctgtttcgaatgaaaagtaatttaggatttaagactccagtagtgatgcaaaaaggaagggaaaggcctcaagacaccttttgctaagtcggagcgattgaattcattcccaccagcttgatcctttcctgaaggcagccagggattgcgtccagtcaccctcaaacatctcatcaatctcmtgccacaaaaatgaatcagcattgcacacagaccctcatcctacagcccctcagcaaaagcacctgccaggctgggttagaaaggagtgacacggccggccacagatggaagtccccaagctgcagcactagggggccagcgggaggagcggagcagcccccaccgtgagtgcctcgtctcctccgggacctgtcggtctcac

SEQ ID NO: 620698 - DNA, 609 bp, Homo sapiens
ggtcacaaaactccctgtactttcatatgtggttaagaaaaattacatataataggaggcctctgagagaaatcaggagccatcgagaataacgaacaagagagttatttccatagtcagggcatagctaaggaacccttatgacatctgcctaacaggattccagaagtgttacaaacaagtaactgaacagtgtctctactttttccctttctgaagggtacttattgtggttatcctacctctgttccatcattgtatactggggggaagggaatataacttttttatttcatgagttgccaggcttaaaaaagcaacatttagatatgatggaaaggatgactgtacaactatcaggattcttgaactttaagctggatgcagggacttgagggagggggttttggtgatgcccttggagagcatgtcctatgtataaaagcaagaatgaaagagacttctctgatcagatgggcagttcatgaagaggcttgctagctgtccactatcaaacctgtttttctcaagcacacagaagcctgcattttccagtataatttgcagttaygttggaacaataagaatgggttctggcaagtgggatgt

SEQ ID NO: 620699 - DNA, 529 bp, Homo sapiens
aacaaacctgcacattttgcacatgtatccaagaacttaaagtaaaataaaaaaaaaactgagctcatgatggggtgcagagcaaaggtgagtatgggaggtgtaaatcataaaacagaaaggatgtttaaagtctggaggtacaataaatgtaagtaatgtagagttcaattagtttgtatatactaggataggatagaaaaatgrggagggatacattcaaaggcatctgtgtgactgaatgtgtaaatcaaaggacatgttctatgggtagaggataacttgcaatctttacacatttaccttttattgttttagagtgatttttgatcctctgatgcagatacctcctgtctccatgttttatctattacatcagactatggctctagctttttaggcaataagaaattttttcaaactatggaaaaggggaaagggcataataaacactttggacttcagtcattgtgatggattatcttgccacttggtttgaaatctaagtttgcaaatcagaaaggtaaaa

SEQ ID NO: 620700 - DNA, 604 bp, Homo sapiens
ttccagaatattttatgaaaacatttctctgatttgggattctctcttctggacaaagcaaatgcaaatctgcctcaagctttaccactaatggtaccacccaccaagtctccatatggccccgtgactaaggacatttgttttaactttaaagtggtccctaactgtgccataggcacagtagtacatgatatcaagctactagagatatggcttgkgggggaagagagagaaaggaaaagcaggcagaaatgctgctttgtgctacactgatgacagatggatcacctatggcatgtggaacatttcctaaaccacagctcgcttctaacaagaatgcagaaagaagggctctctctgcccttcttccaatatagtgttaacagagatgacatttgatttggaagaggagtaaataaaaatgaaacaaaaatgtggggagactgtgggattggaggaaggcaactgatgagcaatcagaccacaaggtgataacactgagcacatgtaaattagagagaatttcagtagagatggattcaatttcaaatccagggaaatcaaatgcccactcctgctaccccccatatgtgtggcagcaggc

SEQ ID NO: 620701 - DNA, 482 bp, Homo sapiens
gataggactatatactggagctcctgccaggatgaaaatcctaatcacatcaaccttccttctatcttccttccttttgacagcaatttactcctacctctaactcagactagataaaatgatctcattttccagagtaccctctttaccttcctatttgctctttgcctatgtatccctcctgcttccttggatacctcacacaatcacccctccccttccactagctcctaattacctctacaagkctctcaacttaactcgctctctgttaaaccagtccaatccttccctggcaaatgactgttggctttgtatctctatcaacttctgcctacattgccactcccattcctgcaaaaaactgggtctttaccaacttaacctatcaccctcattatgaaggaaaaagaccctttctgacttctaaatatgcaatcattagctgacttccccatatctgatggaccaagaatacccta

SEQ ID NO: 620702 - DNA, 575 bp, Homo sapiens
agcttactagtaacaaatatgaattcctttgcatggggtatgtcgccctgtcatcaccaggccagctttacctgtggctacaagttccttagactctggacaaaggtaactacctgcagtactgagacgagccttgcttcttctaagtgtccccccacttttctcctccaccccacaatatacttaatcaacacaaactccactggcagattcagcacaagctatgaatttttgtcttactgcaccctctctttctctaccccaataccaataggatttgacattttttcctttgggttcccactgtacccaagtgatgtctccaaactagctatagcactccaaggccatttccccctttaattagtgaggaagtataatggggtagttaamtagctgctggaaccagactcactgggttcaaatcctggctctaccatttattgactgtgagatggtgggaaagtcccttaaatgctctgtgcctcagtctccccatctagagagaagaggtgataatacttcctacctcactgggaggaaaagaggattaaataagttgatgttaataacta

SEQ ID NO: 620703 - DNA, 559 bp, Homo sapiens
tactttcaaaaaattttctggttctcagaaattccccttgtcttttaattccctcaacacactaatcaaagctattttaaagtctgttatagcttcccttataacttccttatatatatttttcatggatttgtttttattgtctgcttttattttctytttgttttcacttaagtgttctgttttcatatacctggctatatttgactaagttctgaaaaccattaatgaaaaattttataaatagttgaggctttggatgatatttttatcttccttcaaaaacagcttatattttcttcccatgggccacgactctgggagtactaacaatcccagatcacttactaccatcagatatttagatgattcaaaggtagtcttatgtctctctgggagtcgttcctaattcatgatttcccatagggtataaatcttaactcagctgcttttgaaattgacaaatgtcttacgaggtaagatgacacaaaatgctgggcttatccccttaagtttttctttccagattgtagcctcacaaattctcattgacttggaa

SEQ ID NO: 620704 - DNA, 599 bp, Homo sapiens
atctgtgaaatgagacattacttgttctattttctctgtggggttttaattatgaaaatggttaacacctattgagtgctcactatgtaccagatgatgttaaaagtgcatgtgtatatatttatacacatatatatatatgtgtgtgtgtatatatttgcaataaagtgcacaaatcttaagggtaaagcttagtgagtttttatatatttatacacttgtaaaaccactacccagataaagatatagatgacaagcactccagaagagactttcatgccttctcccaattcaaagcctccaaaggtaattgatatttggcctccatcacaatagattagtgatagagtttggctgtgtcctcactcaaatctcatcttgaattgttccyataatcctcacttgttgtgggagggaccaggtagagataattgaatcatgggggacagtttgcctcatcctgtccttgtgatagtgagttctcatgagatctgatggttttataaggggcttcctccttcactaggcactcaatctctcacctgccaccctgtgaagaggtgccttctgccatgattgtaagtttcctgaggcctctc

SEQ ID NO: 620705 - DNA, 623 bp, Homo sapiens
ggttctgcatttccaacaaaatgtacctggttcacctcattgggactggttagacagtaggtgcagcccacagagggtgtagctgaagcaggtgaggcgttgcctcagcccagatactgcaaagggtcagggaactccctcccctagccaaaagaagctgtgagggactgtgccatgaggaatagtgcattctggcccaaatgctatgcttttcccatggtctttgcatcccacagaccaggagactccctcaggtgcctaaaccataagggctctgggtttcaagcacaaaactgggcagccatttgtgcagacacagagcccagcgatgtctggaatgccagtgagacaaaaccattcactcccctggaaagggggctgaagccagggagccaagtggtctagctcagtggatcccacccccttggagccagcaagctaagatccactggcttgaaattctcagcgccagtatagcrgtctgaagtcgacgtgggatacttgagcttggtggagggagggacatccaccattactgaggcttcagtaggtggttttcccctcacagtgtaaacaaagccgcttggaagttccaactgggtggagcccaccacagctcagta

SEQ ID NO: 620706 - DNA, 592 bp, Homo sapiens
gtgtcgcccaggctggaatgcagtggcatgatctaggctcactgcaaactccactttctggattcaagtgattctccttcttcagtctcctaagtagctgggattacaggcacatgccaccatgcctggctgatttttgtattttttgtagagacggggttttgccttgttggccaggctagtcttcaactcctgagctcaagtggtccagctgcctaggcttcccaaagtgctgggattacaggtatgagccacagcacttggcttaagattggttttaaatagaaataatttatgtatctaagtccacaaagtcccttggtggggatgggggaactatgtgttattttcatgatgttgctaacaccagaaactttccagaagttctctttgtgaaggcagaaagcacatgttcaaaacatcaacctgagttcaagttctaaattactacctggctgaccttagcagttcatctaatctttttgggtgtttccttggctgtaaaatgacaataatactactacttatgtaatgttgtgagaattaaytgggccaacaatgaaaaatgcttggtttaggactaggcgtattt

SEQ ID NO: 620707 - DNA, 547 bp, Homo sapiens
ttcagggctcagagctcccagtccctgtgtaaatgatcctaatgtttccttcagatctccattcaacctctcagacatgttgaaggagcctcctctgtttcttttctttcctttcatttctttttttctctctctctcccctccctttttcccacccttccttccttccttcctcctactttctggggtttattcaagatccaggctgattttcagcctgctactcagctgggagcccctgcaaatgaaacccctcactgctctcccagcaaaagcacagaggcatgtgaaatcatgrggggcaggtgggggtggccgtggcgcactgagcactggaactggaaagagggcagacatcaatcaagctgctgtcataaaacatgcatgaaaagcaggggtggggtctgggggagggttgccaaagcctgtttttcagctcacagctggggacttgaggaggagactggctgacgggaggcgaggcgaggcgtgaaggagagaggagaagggagctggagggtgcggcactgcatagacaagatgaaag

SEQ ID NO: 620708 - DNA, 571 bp, Homo sapiens
atcttggctcgctgcaacctctgcctcctgggttcaagtgattctcctgcctcagcctcccgagtagctgggattataggtgtgcaccaccacacctggctaatttttttttttttaatggagtctccctctgttgcccaggctggagtgcaataatgcaatcttggctcagtgcaacctctgtctcctaggtttaagcgattatcctacctcagcctcctgagtagctgggattacaggctcccaccaccacatccagctcatttttttgtatttttagtagagatagggtttcaccatgttggcaaggctggtttcraacttctgacctcaggtgacctgcacaccttggcctcccaaagtgctggggttataggtgtgagccaccgcacccagactatttttatttttttaaaattgacttatgttataaattgtgtttcaattttggtaatttctattgacctatcttcaagtttaatgatttactgattcttccatcagctatgttaagtctactgaagaacccactgttaacatttttatctctgtttctgtgtttttgatttct

SEQ ID NO: 620709 - DNA, 518 bp, Homo sapiens
  misc_feature 389: n = A,T,C or G
gaattcaaaatgagatttgagtggggacacagccaagccatgtcacatggtttacactgggcagaacaccagggcgtgtgtgtgtgtgtgtgtgtgtgtgtgtgtgtgtrtgtagggactggacgtgtgatgtgaactgcacaactcttttcttaactctgttctgagaagcccacttcttggatcctgtgtgagaaaagtaaatcagtaactagatttcatggtggccattaatcttcagggttgtaaagcagaaccctgagaaggggtaggcaggtcctgttagggagcttgactggggacaggcctctttgtccatccccaccattttcactttcaggagaaaataaccttcccagtgccaagacaccagtgcaattagctttacntaattattacctaatactgttttgaatctagaaaatgaaagactgctgaaaaatccttttactgcttcttttctgaattattccctcacagtttttcataaagaaccagttaattaattagggcctgta

SEQ ID NO: 620710 - DNA, 619 bp, Homo sapiens
acatttaaattgctgagtatatggtttatctgcattgatgttacctgttcgtgaacatctgctatgaaagccacaaagaccatrtcggcagagtcatttttggcccattgagcaacacgtgcacagaggtctttaattctctgtaatgtagcagcttttccatgggcaaggttctctctgtgttgtaggtatgactgtaggtattctccagttggcagaaaataagaattgcctactagcacatggtgaaagactaaatattaacagtgttagagaggatgaacacctggggtgtcaattattatccacaactgcctgaaatccaccaaatcttacttagttattggttaagaggccaagctctgaagtcagcctgactggattcaaatcccagctctcccacttacttactatgtaaccccaaacaatgtacctacttttctaagccacactttcctaatctataaaatgggggtgataattcttatgaggattaaattaggttttacatgaagcttgcctagcacggttcttggcacttagtgttctctaaaagttcactattattcagtgttaaatacaacaaaatgactgttacatactgtattagtttgctagg

SEQ ID NO: 620711 - DNA, 619 bp, Homo sapiens
acatttaaattgctgagtatatggtttatctgcattgatgttacctgttcgtgaacatctgctatgaaagccacaaagaccatgtcggcagagtcatttttggcccattgagcaacacgtgcacagaggtctttaattctctgtaatgtagcagcttttccatgggcaaggttctctctgtgttgtaggtatgactgtaggtattctccagttggcagaaaataagaattgcctactagcacatggtgaaagactaaatattaacagtgttagagaggatgaacacctgkggtgtcaattattatccacaactgcctgaaatccaccaaatcttacttagttattggttaagaggccaagctctgaagtcagcctgactggattcaaatcccagctctcccacttacttactatgtaaccccaaacaatgtacctacttttctaagccacactttcctaatctataaaatgggggtgataattcttatgaggattaaattaggttttacatgaagcttgcctagcacggttcttggcacttagtgttctctaaaagttcactattattcagtgttaaatacaacaaaatgactgttacatactgtattagtttgctagg

SEQ ID NO: 620712 - DNA, 579 bp, Homo sapiens
aagcttttcttaggctcagagtccagggaaaagttaatttttggttctcggcatgtggacttaggtttctgtaccggcgaggagtaaggatgtggaatgagtaaactccctgggaggtggggggtggggaggggatggggcctccctggagcctcgggccattagtaatctgctttgtgaatggagttaaaggaggagggggctgcacatacttggaattccttcatctgggtgggctccttctctccaaactttcaggatgtgggaaatataagatgaaagaagctgcatttccagcctatcaggttacagcgtggaaaatggagagggaaagaagtagggggtggagagkggggcgggagaaggcctccccgagaggggccagggaaacccagtttgagaactggctggggagagtgagaaagaaagagtgctggggcggtcagatcacgtttcacatcacatcagagctgtggaatttcctctcttctagggggagccctgtgaagatgaagttggtttaaggttagtcggtgatgaataatagcccaaaggcgactgatggagggtgttactaag

SEQ ID NO: 620713 - DNA, 574 bp, Homo sapiens
aatagcatttactcttaatacgagaatattgcatctttcttgtattccagtctagtctgttccattctattcctttttgacctgcttaactgatttcacaatactctaatggatgaattacaacccttaccactgccccagagaaaagtgcaaactcagcacagcagtgggggctgggggtgatgagaggggcgggtggcggaggggagtccccttcaagaaatggcagctgctcactctccagcctcccctccagctgctacccactagcactgctgcaacccaactgagctcccgctttctgcaacacatcatcctgttccacaccaccttgtctttgcacttgccgtgcccttcatctggaatgccttctgccctaaccctgacccttgacccaccctccaccccacaacaattggacttgcagaccatcttcatttacatttttcaaaacccagcttgtgtgtcacctctccaaagaaggctttctkaccagtaagtcacctacaaagagttaacctaccccttggtacccccaaaccccttattattccgtatcacaattaatgtactt

SEQ ID NO: 620714 - DNA, 449 bp, Homo sapiens
tgtcctgcaaaaacacacaggcccccgcccccgccctccccggcccggctgcttccccagcctccacattaggtctgggactttccacctattttcagctcttctcggtccctccatgacccctgccagtccccgttttggagaagacaagggcatacccccaagtacacaactgggaaagccggggcactggcagcacagtggccctgggccaggtccttttttccctaaatgttttcactgtccctgctgagcctgggagaagtggtgcccttggccttgggtctggtgccctgacccatcctggtaactcaggagagtcgtggccgagatgccacatgcccggcagagcaggcccttcgaagcccaccacattgctgtttgtytatttgggagaagcaattggcaggcagggtggtcttgccctagttaccatcgggatgcctgga

SEQ ID NO: 620715 - DNA, 653 bp, Homo sapiens
tgatctcactaaatcagccccaaacctgccagtgaggcaaaagaagttgtttctatttgaattatccagattgcctgtcagcatggatcacatccactggataattgctgatcttttctctttgctctgcttgcatggccacagtctacaagtcattgttcagtggaaaccacctattactgacatgtttctgtcatggcaatgatcctgaaataagccagggacattaaccagagctgatagtcatgtgtggctgtgtctaccatcatcaaaagtgggtctaatcaatggtgcgacacagaaagagatggtcaggctagtcacaaaacaggtttgcaatatatagttccatatctggataatattaataaaaagaaaattgtaaaaaaaaattaaccagaaaacaaggaaagcgacccaagtcctaraattcaatattattatccaataaaatcagaaaaagaacaaaatgggataaaaatttccagtctttggctatacaggttggaagaactatggatctgagtgctatagattagctgactatgttgatcagattttttggatattctttatgcaggtctggttaacttgtccgacagtaaattgcacatggtaaacgtcacaacatgggaaagagttgactctcctgt

SEQ ID NO: 620716 - DNA, 597 bp, Homo sapiens
agatgctcaagtcccttatataaaatggtctagtaggccatgcatggtggctcatgcttgtaatctcagcactttgggaggccaacatgggtgaatcacctgagcccaagagtttgagaccagcctgggctacacagtgaaacctcgtctctgcaaaaagatacagaaattagtcaggcgtggtggtgtgtgcctgtggtcccagctactcgggaggcttaggtgggaggattgcctgagcctcagaggtcaaggctgcagtaagcaaagactgcaccactgcaygccagcctgggtaacagagcaagaccctgtctcaagtaagtaggtaagtaagtaataaaataaaataaaagtaaagaaaagtggtatactacatactgtttactgtttttttcctacccaaggcccagggagcatggaaggactagccaaaccttggttacatgggaaaaggacgaggaaggagactagcataggaagacaaaggaaaagccagaaaagaaatataaagaagagacagaaagatgttgcaagttactgcatcaagtgattcttgtattgccaaatccaccatgcagctagagagatttcagc

SEQ ID NO: 620717 - DNA, 654 bp, Homo sapiens
tcagagaatcatattgatggaagtactattatacttctaagtgttggaggaaggagcagaaattacacattttttggcagatatggaaatggaagtctagggaaattaaatcgcctgtggtcatattctcccttgcagacaaatattttagagaataaagtctcagaagaaattcctcatcactgacaacaacaacaacaacgattccaagaagaagctagaaaatgggaaatgaaatgatgtggagaaaccaatgaggaacaacggtgttttttaaaattaaaaactgaaatatacacctgctaaaacggggaaattaaacaaacactgtatgatggagggtaataaaagaaaatatttcaccaagaaaaaatttcaggattatatcaaagtgttcctttgaaattgataaaaatccttttcttcatttcttctctctccctcrgaagctttatcctttcattagaagtcagccatgtgcgggaattattgatagctgcaatatttcatcttgtctttttaaataagtcactgcaatgcatgcacatcctgtgatctgtgctgaggtttctaagaaatgttctccgtttcttggtgcagctgttccatggttgaccccagttgcattagtgatattaggagaggtgggttgag

SEQ ID NO: 620718 - DNA, 602 bp, Homo sapiens
gttgttttcacatcctgacatctcccaattgacaaggaaatgcttagcatgccatgaaatgaacaggagccagagctgagcagacgcggctgccgggcaatggcggggattgccgcctgtctgcttattcatcctgctcccttcaaaacaggtctcactctgcctcgctgtctctaaattgttttccatagaacttagaaataacatacagatgtgggcatgtattatttatttacttatttataggttatatctgtgcgtattgtgtaagtatttaaaacctgacttgacccagtgcaaaaagaatgatgtctcaattgcaggaggggacacgttgtacaggtttaagtawgatagatgggacgacctcccttgcttagtaaactgcagtgagagaaactgaatagccctgaaattagaaggagggtgggagggggagggtcatgctggtgtaatattactggaacaagatgcagagaaaagtaatttactctgaagtgacagtctgaaggcaaaaaataaactaacaggagggagtttaggcttattagcagcctggtctcaatatttcattattaatgataataaaaagaagaaaggag

SEQ ID NO: 620719 - DNA, 450 bp, Homo sapiens
ataccagcttacgtagtatcttcaacagagagaggtaaacttttagagaagtgacaagacaaaggaaaaggactgagtttctggggacagcaattggtgggaagacaaataaatggcagacaaaggctgttagtaaagcttattaatgtagattcctctagtaccatctctagaccaagaagcacccaaagtggtctccagtgcttaacctttgttcwctccctggtaggaggaggagcagggaaccttttgtctctgtcagtctaagtcctgctttttaggcaaatagagggaaggtagagagcttttctgcatctgcctcttccaaattgccttcagctggataatccttcatgttttcaggtggcatattccagcctcccactgttttagtctgtttgtgtcactataacaaaatacctgagactgggtaatgtataaaccatggaa

SEQ ID NO: 620720 - DNA, 450 bp, Homo sapiens
ataccagcttacgtagtatcttcaacagagagaggtaaacttttagagaagtgacaagacaaaggaaaaggactgagtttctggggacagcaattggtgggaagacaaataaatggcagacaaaggctgttagtaaagcttattaatgtagattcctctagtaccatctctagaccaagaagcacccaaagtggtctccagtgcttaacctttgttctctccctggtaggaggaggagcagggaacyttttgtctctgtcagtctaagtcctgctttttaggcaaatagagggaaggtagagagcttttctgcatctgcctcttccaaattgccttcagctggataatccttcatgttttcaggtggcatattccagcctcccactgttttagtctgtttgtgtcactataacaaaatacctgagactgggtaatgtataaaccatggaa

SEQ ID NO: 620721 - DNA, 602 bp, Homo sapiens
gcctcatctacaagcccaggacatgttctgaaccgactggccacccggaggccttaagaccccttgggagagcaaggaaagatttttttctctctgacatcccacattgaatccacctgcaaatcctgttggttctactttcaagatacattcaatcyacttttggcatctcctctgttatcaccttgtatatggtccaaactgccctcatctgtcacctatattactacaataacttctacctggtctccttgctcccacctttgtccccacttgttctgcataagacagcctaaggtagtgggagaggtcctccactccacgccaccacacccggcctccttgttttcttgattatcctgtttaaacttgcaatgaccccccactgccttcactatccacattccctactttatgtttctctatagcacttatcatggtcccatacactatatattttactcattctatatctgccaacctgtatgttccatcagggcaggagttttgtttctttcatgcctgcatcctcagtgtctaaaacactgcctggtacataataggtgttcaataaatatttgttgaatgaatattatgctcat

SEQ ID NO: 620722 - DNA, 602 bp, Homo sapiens
gcctcatctacaagcccaggacatgttctgaaccgactggccacccggaggccttaagaccccttgggagagcaaggaaagatttttttctctctgacatcccacattgaatccacctgcaaatcctgttggttctactttcaagatacattcaatccacttttggcatctcctctgttatcaccttgtatatggtccaaactgccctcatctgtcacctatattactacaataacttctacctggtctccttgctcccacctttgtccccacttgttctgcataagacagcctaaggtagtgggagaggtcctccactccacgccaccacacccggcctccttgttttcttgattatcctgtttaaacttgcaatgaccccccactgccttcactatccacattccctactttatgtttctctatagcacttatcatggtcccatacactatatattttactcattctatatctgccaacctgtatgttccatsagggcaggagttttgtttctttcatgcctgcatcctcagtgtctaaaacactgcctggtacataataggtgttcaataaatatttgttgaatgaatattatgctcat

SEQ ID NO: 620723 - DNA, 644 bp, Homo sapiens
atatctgccaacctgtatgttccatcagggcaggagttttgtttctttcatgcctgcatcctcagtgtctaaaacactgcctggtacataatwggtgttcaataaatatttgttgaatgaatattatgctcattctgaggccaaaattctttaaaattggggataaaggctgtgtcagcattggagctgttgtgccaaacccctattaacctcaatagggaaggtgttagggtcaagaggccaaagaaaagaaccaggaacagcaagcaagacatgaggttttattaatggattacatagacaggagagattccagtggtggtgagttggacaagagatttgccttacatacagagacagatcagtggcagcagctggacaaaatgtctgccttaccgccttacctacagtcaacaaagcccagtggtggtgggctaggcaggaaaaccccaaccatttgcaaagagcatgcagtttatatagcatttcacttaatatcctgcccttaacaacctccacctggcaatcttcatccaacccaaaactcagggcttcaatcctctatacagcccatgttccacaggatgggctggggtgtgtacgtagggatggggctcagatgttcctcattgacaaggaatgaa

SEQ ID NO: 620724 - DNA, 644 bp, Homo sapiens
atatctgccaacctgtatgttccatcagggcaggagttttgtttctttcatgcctgcatcctcagtgtctaaaacactgcctggtacataataggtgttcaataaatatttgttgaatgaatattatgctcattctgaggccaaaattctttaaaattggggataaaggctgtgtcagcattggagctgttgtgccaaacccctattaacctcaatagggaaggtgttagggtcaagaggccaaagaaaagaaccaggaacagcaagcaagacatgaggttttattaatggattacatagacaggagagattccagtggtggtgagttggacaagagatttgccttacatacagagacagatcagtggcagcagctggacaaaatgtctgccttaccgccttacctacagtcaacaaagcccagyggtggtgggctaggcaggaaaaccccaaccatttgcaaagagcatgcagtttatatagcatttcacttaatatcctgcccttaacaacctccacctggcaatcttcatccaacccaaaactcagggcttcaatcctctatacagcccatgttccacaggatgggctggggtgtgtacgtagggatggggctcagatgttcctcattgacaaggaatgaa

SEQ ID NO: 620725 - DNA, 519 bp, Homo sapiens
tggaattagttgctacaggatatctgtagcaacttcacagaagttcctcagaaggagatttcatggcacaaattcccagtggctgaagtggaagagctcagcagtcaagggctttgtattaattaccctgccctggcttccttcccttaatgctcaggtggcctggttaaaatgaatcccatcctcattcttccatttaagcccaatgatagtcatagttctagcaaggagggtgcagtagggacgtccacaccctgaacctgccctggattaggacaatacactggctcctctctgctattcttagaattggaatcaaagtgtggaattgtccactctctttccatgtcaacacaagacctcaatctctgatccagcctgactttcagaagtccacagtagacacaggagtgatayggaactgacccttcagggcagggtttaaaactaagtgttatctcaaaaacagtgtccagggttaggtatggcaaccgaagagaagctccagctgtaaatggt

SEQ ID NO: 620726 - DNA, 494 bp, Homo sapiens
ttatatttggagcataaccaacttgtttcttattcttagctctgcctccctgccaggccagacatactcacggacaccaaagccatgggcaccagccctgattgtagtggatatgagttatgagttagaatgaatgcatttggagactggagctaacagaatttgtaaactatgcaaatcatttcttatccttcttactttaaaaawggactattctgctactctcagcagatttcagcctattcactgagtacttcagagtttacaaaatactctcatatacatcatctcatcttgtccctgtccctgcaggaagcaatggggtgaaaaaaaagggggggattacttcagatcagtctcaaaacatcaaaacatgacttagctggtcctagtcccactctgtcatggtttggtttttagctcaaataaacacattcactgatttacaaaactaggtaataaaacattcatccctaccttcttttttttttttt

SEQ ID NO: 620727 - DNA, 399 bp, Homo sapiens
cttttttttttttttgagacagtcttgctcggtcgcccaggctgaagtgcagtggtgtgatctcagctsaccgcaacttctacccctcaggttcaagcgaaactcctgccttagcctcctgagtagctgggattacaggcacctgccaccacacccagcttttttttttttttttgtatttttagtagagacagggttttgccatgttggctgggctggtctctaactcctgacctcaggtgatccaccttattggcttcccaaagtgccgggattacaggcatgagccaccgcacctggctgattcatcccagccttctgaccataggatagaactctttcttaactagcggattcctgggggcaggaggtgggaagagagtgtgacaagtacagcct

SEQ ID NO: 620728 - DNA, 399 bp, Homo sapiens
cttttttttttttttgagacagtcttgctcggtcgcccaggctgaagtgcagtggtgtgatctcagctcaccrcaacttctacccctcaggttcaagcgaaactcctgccttagcctcctgagtagctgggattacaggcacctgccaccacacccagcttttttttttttttttgtatttttagtagagacagggttttgccatgttggctgggctggtctctaactcctgacctcaggtgatccaccttattggcttcccaaagtgccgggattacaggcatgagccaccgcacctggctgattcatcccagccttctgaccataggatagaactctttcttaactagcggattcctgggggcaggaggtgggaagagagtgtgacaagtacagcct

SEQ ID NO: 620729 - DNA, 593 bp, Homo sapiens
cacccctatacctcaccgatgggtcataaagcaatggactttcagatattagcaacagatctcgctcacctgtggttttcagagctttggttaataacctgagttrccctggcctccaggcttgtctctttccccaagaatcgacccagggctacttaaggcagagagatccatttcctggaatgagctgctctgaaccaagacaagttcatggtctctgagtcctcatttgtggcctgctgtcttgataacagctctcttgtcagtcctccataagctctggtccagcctccccgttgcaggacattttttcatcttcagaagattctgagactttaggaatgaatcattgctggtatgcaaagttacataagaaaagctagggacaaactaggcaagtaaagaattctagtttttccaaaatggaaattttagaaaaatataaaaaataatcttatcaaagcatgtgcttcctctggcaaagcatacctctcctatccacaaggagccttgggtgcaggggaagatgaaataatgatattgctcattagagacaaagaggaaactagatgggtctacagggagggctcctt

SEQ ID NO: 620730 - DNA, 593 bp, Homo sapiens
cacccctatacctcaccgatgggtcataaagcaatggactttcagatattagcaacagatctcgctcacctgtggttttcagagctttggttaataacctgagttaccctggcctccaggcttgtctctttccccaagaatcgacccagggctacttaaggcagagagmtccatttcctggaatgagctgctctgaaccaagacaagttcatggtctctgagtcctcatttgtggcctgctgtcttgataacagctctcttgtcagtcctccataagctctggtccagcctccccgttgcaggacattttttcatcttcagaagattctgagactttaggaatgaatcattgctggtatgcaaagttacataagaaaagctagggacaaactaggcaagtaaagaattctagtttttccaaaatggaaattttagaaaaatataaaaaataatcttatcaaagcatgtgcttcctctggcaaagcatacctctcctatccacaaggagccttgggtgcaggggaagatgaaataatgatattgctcattagagacaaagaggaaactagatgggtctacagggagggctcctt

SEQ ID NO: 620731 - DNA, 559 bp, Homo sapiens
gctgatttgacacagcacagagctgccacagccagtcctaagcaatatacaccaaagagaatgacttgatgccagtggtaatctctgatatacagagaacagataagtgtcactcaatgaagacccaattcttaagagatggtgggaaaatttaggctgaaagacttatgctctcagtaaatattgtaaggtgcccatgactacccatgcccagtgaactttactaaaatagaaaaaaaatttattttagaaaccatacagcatttccctagcccatgaactctttcactttaccatacagtgtttccctagcccaygaactctttcactttctttgatgcctatttcatttattcttccctatgtctcctccccaccctcagctaaggactgattcttgcttcactgaggaaactgaagtattctgaacatcccagactcccattaccatgactggtttcctaagcacatctgcacccatctactgactttcatttgtatattcatccttattgtgaaaccagcatcacctcctgattctctctcttgcatacataag

SEQ ID NO: 620732 - DNA, 587 bp, Homo sapiens
atctttttctttatttcctatgttcttgggaaaaaaatattaaaagtttcagaaaccggaagccttgcttgactttctttgtaattttacatagtccccttaactaccctgtatcttgctttgtcatctgtttaaagggaatgattggccgggygtggtgactcatgcctgtaatcccagcactttgggaggccgaggcgggaggatcaccagcggtcgggagttcaagaccagcctgaccaacatggagaaaccccgtctctactaaaaatacaaaattagccaggcatggtggcacatgcctgtagtcccagctactcgggaggctgaggcaggagaacgcaggagacagaggttgcagtgagccgagattgcgccattgcactccagcctgggcaacaagagtgaaactccatctctgaaaaacaaaaaaaaaacaaacaaaaaccaaaaaaaaaaaaaaaaaaagggggggaatgattatatccactcacaagacattagtgagaaccatatgaaatgcatgtagaaaactgaaaactactgaactgcctacaaatataagggtagtgtcagaaatggccgtg

SEQ ID NO: 620733 - DNA, 587 bp, Homo sapiens
atctttttctttatttcctatgttcttgggaaaaaaatattaaaagtttcagaaaccggaagccttgcttgactttctttgtaattttacatagtccccttaactaccctgtatcttgctttgtcatctgtttaaagggaatgattggccgggtgtggtgactcatgcctgtaatcccagcactttgggaggccgaggygggaggatcaccagcggtcgggagttcaagaccagcctgaccaacatggagaaaccccgtctctactaaaaatacaaaattagccaggcatggtggcacatgcctgtagtcccagctactcgggaggctgaggcaggagaacgcaggagacagaggttgcagtgagccgagattgcgccattgcactccagcctgggcaacaagagtgaaactccatctctgaaaaacaaaaaaaaaacaaacaaaaaccaaaaaaaaaaaaaaaaaaagggggggaatgattatatccactcacaagacattagtgagaaccatatgaaatgcatgtagaaaactgaaaactactgaactgcctacaaatataagggtagtgtcagaaatggccgtg

SEQ ID NO: 620734 - DNA, 587 bp, Homo sapiens
atctttttctttatttcctatgttcttgggaaaaaaatattaaaagtttcagaaaccggaagccttgcttgactttctttgtaattttacatagtccccttaactaccctgtatcttgctttgtcatctgtttaaagggaatgattggccgggtgtggtgactcatgcctgtaatcccagcactttgggaggccgaggcgggaggatcaccagcggtcgggagttcaagaccagcctgaccaacatggagaaaccccgtctctactaaaaatacaaaattagccaggcatggtggcacatgcctgtagtcccagctactcgggaggctgaggcaggagaacscaggagacagaggttgcagtgagccgagattgcgccattgcactccagcctgggcaacaagagtgaaactccatctctgaaaaacaaaaaaaaaacaaacaaaaaccaaaaaaaaaaaaaaaaaaagggggggaatgattatatccactcacaagacattagtgagaaccatatgaaatgcatgtagaaaactgaaaactactgaactgcctacaaatataagggtagtgtcagaaatggccgtg

SEQ ID NO: 620735 - DNA, 553 bp, Homo sapiens
aataaataaataaataaaataaaatctacttcatctgattgttgtgagatacctggaccattgaggggcttcaaccatgttggttttctttatagttctctttcctgtttaaggagagccaaatgagtgaatctttgttcaattattccaatgtctytccattttcctctcttttcctcctagatgacagaatcagacatccaaagtaaatattcacagctattccaccaccacagccctctgattttattgtcaccatgtagaacaatcacattctctagccctctcttagagctcagtaacagttcaaagcaccctgtcctaggctaagcaagcctagaaagagagaaagagaaagaatgaaagagaaagagacagagagagggaaggaagggagacagtaagagggaggtggaaagaaagtaaccacccagtgaggtcatcgtgcctgctgcccaaatagagctgatttactgagacagaggaattgtaatggggaaagagtttaatacacatacagcccattaagtgggagaccggaattttattatta

SEQ ID NO: 620736 - DNA, 635 bp, Homo sapiens
actcagtctaattcagtgctatccaatagtatgttctatgataatggaaatgtgctctcctgcaccttccagtatggtaattactagccatgtggctattgagcattttaaatgtggccagtgtgactgatgaactgaattcttaatgtcacttaatttaacttagtttaaatttacataaccacatgtakctagctagcgacaataatatcagacagcccagttctaatttgttgttattggaaatatagatttgtgagtgctggaatagctaccagaagatgactttaatccatatactctcttttctggcattagcagagttaccaaagctgttgatgttatgctactggattgtggagagagtaggaagacattcaatgtatccaaatccagccaaatgaataatacaccaagcaaacctccatttataactgcctgtcaaggatgctgaccaggtttcattcggacatggtatatcagcttctgtttttaggacggctgttcagattgtgtctgccagttgtcatctgagaagtagacatagaagaaattcctgctgaagtggcagtaaaaatgatccataaacctgctgctgatccttaaccttctgcatcctttctaagaggattcct

SEQ ID NO: 620737 - DNA, 588 bp, Homo sapiens
accagaagatgactttaatccatatactctcttttctggcattagcagagttaccaaagctgttgatgttatgctactggattgtggagagagtaggaagacattcaatgtatccaaatccagccaaatgaataatacaccaagcaaacctccatttataactgcctgtcaaggatgctgaccaggtttcattcggacatggtatatcagcttctgtttttaggacggctgttcagattgtgtctgccagttgtcatytgagaagtagacatagaagaaattcctgctgaagtggcagtaaaaatgatccataaacctgctgctgatccttaaccttctgcatcctttctaagaggattcctcgcacagagctaatccttcaaaatcttctttttatgtgcttttgaaacacaccaacaacgatttgagactgagcctattatttccagaaaaattttcaagaacaaagtggttgagaattaaagtaagtttgtaaagacaaagagatttaattgaatatgcactttgttctcagagtgatgttaattatcctgtgggatatgctaaaataagttaaggttatattct

SEQ ID NO: 620738 - DNA, 588 bp, Homo sapiens
accagaagatgactttaatccatatactctcttttctggcattagcagagttaccaaagctgttgatgttatgctactggattgtggagagagtaggaagacattcaatgtatccaaatccagccaaatgaataatacaccaagcaaacctccatttataactgcctgtcaaggatgctgaccaggtttcattcggacatggtatatcagcttctgtttttaggacggctgttcagattgtgtctgccagttgtcatctgagaagtagacatagaagaaattcctgctgaagtggcagtaaaaatgatccataaacctgctgctgatccttaaccttctgcatcctttctaagaggattcctcgcacagagctaatccttcaraatcttctttttatgtgcttttgaaacacaccaacaacgatttgagactgagcctattatttccagaaaaattttcaagaacaaagtggttgagaattaaagtaagtttgtaaagacaaagagatttaattgaatatgcactttgttctcagagtgatgttaattatcctgtgggatatgctaaaataagttaaggttatattct

SEQ ID NO: 620739 - DNA, 588 bp, Homo sapiens
accagaagatgactttaatccatatactctcttttctggcattagcagagttaccaaagctgttgatgttatgctactggattgtggagagagtaggaagacattcaatgtatccaaatccagccaaatgaataatacaccaagcaaacctccatttataactgcctgtcaaggatgctgaccaggtttcattcggacatggtatatcagcttctgtttttaggacggctgttcagattgtgtctgccagttgtcatctgagaagtagacatagaagaaattcctgctgaagtggcagtaaaaatgatccataaacctgctgctgatccttaaccttctgcatcctttctaagaggattcctcgcacagagctaatccttcaaaatcttctttttatgtgcttttgaaacacaccaacaacgatttgagactgagcctattatttccagaaaaattttcaagaacaaagtggttgagaattaaagtaagtttgtaaagacmaagagatttaattgaatatgcactttgttctcagagtgatgttaattatcctgtgggatatgctaaaataagttaaggttatattct

SEQ ID NO: 620740 - DNA, 597 bp, Homo sapiens
cactttgttctcagagtgatgttaattatcctgtgggatatgctaaaataagttaaggttatattctacattaaagaactagacatctactttaaggaaaataaaaataaaataaacacagacagtgtgcaaggcagcttttgcaaacgctatccactgctgycttctttagaaccacgttgacattcttcatccttatattctgtcttcactctttctgcccaaaccaccactgagcagggcaagctctattccacctacaggttgggtctataatgagtcttattgccatagatcctgcagttaatgtgcttggtgcctgctctacaaacagttctctatgccactgttctcccaattccacttgtattaaacttttttgttaaacaaatttcagtattctagtctcctaggagaatcccaaattttttggtgagcctgtacatctgcttagtttgcattcatctcttgccctgatagactgaactgtttctttttctcccagctgaaagctgagaattttctccaactcgagccatcctgttcccatgcatttgacttaaagttttcccacatcctggccactctcaccgtggc

SEQ ID NO: 620741 - DNA, 576 bp, Homo sapiens
aaccaatgctttggtttctctaatgatttggtctatgatctctgagctcactctttctgcaaggcmagcacacatttaatgagtatagtgcccatgtgcattacccatgaaaatgtgtctaaaaaagataaattggacactatgattggatagcgagttttttccaagaagtcatactatcatactattagtgaacaatattattagctaactttaattgctagttatctttatttttgtatgactttttttttccaatttgaacaccaactgcttacattttagtgtatcatttgatatccttttaccaagcccatagtagttgttgtatataatggactccgaatcattataaaaatatattcactgacttgtgacaaggatgctgaattttgtgtcagaacaggacagataaaaccatatccccagaaaatgaaagacatatacagaaggaattgagtatactgcctggcctcgctactactcatcctaataactaccatgccaatgtttggaatcttccagatatgttttcatcatccccccacttgttgttaatgtctgagtttaatcttt

SEQ ID NO: 620742 - DNA, 514 bp, Homo sapiens
gatgcctactaagtatgcttatccaaagtcctacgtcaccttgagcagacatgactaaagggagaaatattgcaggtggtttcaagctctttctaagcagcaggctttctctctggggaagatagacaaataagtgacttaaagcattcagaagcaggagacagagaatgatgagatgagttccacagggttgaatgagaaaaggaagatgaagggcgctgaaagagccttctccctcagctctaaatttgcagtcccctttgaattcaccatgctttgaccttctttgccactacaatttgagaccctacrtgcctccactctgccttctagcaaatagtcacagccactgtcagatctgtgtaaaggtgcataattcaacatggcatcaaaaacaaaggactctttgcatcagacgtgtttatttttcttgtaaggctttgacacgtcaatggttgtcacctgtggttgagtgaaatcttggcatgaaatcaatttgatgtccaacgtcaag

SEQ ID NO: 620743 - DNA, 569 bp, Homo sapiens
gggtccagttaggaagttccctttgaaggtgcacttatatataagaatgaagttcaactatggtttaccaaacaaaataaccaggcttagcaagaagcaacagaggataaaagtaaactgttaaagtccagtcagcaatgaaaatatgcccacaaaatgagttttcccagtcactccaggagagacagtgaaattatcatgattgtttgaatttgccaaactccttyggatatttgtagatttagtctatagtcagcagagataaaagagggtacaagttttttttggccatgcttattctgaaaagatctatcctaggatgcataatttagtgaacaaaaatgtggccatataactaattttcttttaaaaagttcccaaatgtagatcatcaagaatattttggaaacaatgatgtatctagccataggtccttggatgccatcaaaaaagttaattggactgagatactttatctcagctaactctatggaccctagttttgagaaactgcatctttggaagcccttgcatccttgttgaaggagttgctatccaaagttcctttg

SEQ ID NO: 620744 - DNA, 441 bp, Homo sapiens
atcagagaatcaaagaggctaacagtggtagagttctattccatttgatcgagcatgatcacactagagttwcgttacaaagctattggaaatgtttgtgcttctaggcctgcagaactgctttgcttcagtcccatttccatgcctgattcttgggtatctcctggattgtatagagccttaatgtctttccagcaaattaatttttgcttaatttagcccaaattttttttgctcaaaatcacaaagtccacaatgatatacaatctcacttagcactaacacaattctaagatgttgccattataaccatttctcagaggagaaaggtttagcaaagaatggttaaatgacatgcatacacgcagctagtaatggatacagccaggactcaagcaaggtgagttcgacccagagtttcaaatttttaacctacattat

SEQ ID NO: 620745 - DNA, 594 bp, Homo sapiens
  misc_feature 386, 387, 388, 389, 390, 391, 392, 393, 394, 395, 396, 397,398, 399, 400, 401, 402, 403, 404, 405, 406, 407, 408, 409,410, 411, 412, 413, 414, 415, 416, 417, 418, 419, 420, 421,422, 423, 424, 425, 426, 427, 428, 429, 430, 431, 432: n = A,T,C or G
  misc_feature 433, 434, 435, 436, 437, 438, 439, 440, 441, 442, 443, 444,445, 446, 447, 448, 449, 450, 451, 452, 453, 454, 455, 456,457, 458, 459, 460, 461, 462, 463, 464, 465, 466, 467, 468,469, 470, 471, 472, 473, 474, 475, 476, 477, 478, 479: n = A,T,C or G
  misc_feature 480, 481, 482, 483, 484, 485: n = A,T,C or G
ctgaaaacaggcacaataacatccatgtcataaagtggttaaaatatttaaatgaggtaaggtataggaaagtacatgtttgggccgggcgcggtggctcacacatgtaatcccagcactttgggaggccaaggcgggcggatcacaaggtcaggagatcaagaccatcctggctaacacggtgaaaccccatctctactgaaaaaaaacgaaaaaacttagctgggcgtggtggcrggcacctgtagtcccagctactcgggaggctgaggcaggagaatggcatgaacccgggaggtggagcttgcagtgagccgagatcatgccactgcactctagcctgggcaacagagtgagacaaaaaaaaaaaaaaaaaaagaaagtannnnnnnnnnnnnnnnnnnnnnnnnnnnnnnnnnnnnnnnnnnnnnnnnnnnnnnnnnnnnnnnnnnnnnnnnnnnnnnnnnnnnnnnnnnnnnnnnnnntttgtcacaaagcaagtactccagagtttggatgatgtttatatttagtcagaggcttcatgatgtgtgagtgcacagtcagcaactctgagatcactttgactatcac

SEQ ID NO: 620746 - DNA, 544 bp, Homo sapiens
aaatttggttttgctatactggttatatagacaagaaaactgagctagaatgttcaaaagacttttccaagatcacacagctattaaataacaaacctattcgtaacaccaaaccagtccctcattcaatcatctcctcaaaaaatatttattgaaaaccaactatatgccaagtacttttcttggcactgagaaacagacaaaatctttcctyttataaagccttcattttaggacaaagagacataaaataaatacatgtatttttaaatatcataatgtttaaaacataatattgtgtgaataagtgctatggtgaaaaataaagttcagaagaggatggggtgggaggatatgggcgagtggaggttacagtattaaataaggtggtcggggagacctgagacagtgaaatttgagtaacttccttaactagataagagagtgaactatgtagataaccagcaagggcaaaaatgctgaggtgggaacctgtgggtcccaattgaggaataatgaggtcagtgtggttggagtaaagtgg

SEQ ID NO: 620747 - DNA, 491 bp, Homo sapiens
gtgtgtggcactcacgtgtgtgcatgtgtgtatgtgttacaaatatagtgatacaggaacaaaggaattgctgtaatgaaacagattcctaaccaactgctggagtagttcatcatccacttttaccctaagagatgtgctatgggagtacgatattattatcactgatttcaattcagaaaaaaaggcattcatttattttgcttacagcttgatatgattttatcagtgacgaatttgtctaggttcttcaacccattaccaagtcaggaccatatgtgataatattttatgaacttacatattcaaatggtcattatccatttcagagcagtcastctgaaaagctatgtactttttttccaagatgctcttaattcatggtgtagctagaagaacactggattaggaggtagacagtcaggctcctatgtgtgagtccactaccaatgatcagtgtgtcttttatcaaagcatgtccccttccctcc

SEQ ID NO: 620748 - DNA, 491 bp, Homo sapiens
gtgtgtggcactcacgtgtgtgcatgtgtgtatgtgttacaaatatagtgatacaggaacaaaggaattgctgtaatgaaacagattcctaaccaactgctggagtagttcatcatccacttttaccctaagagatgtgctatgggagtacgatattattatcactgatttcaattcagaaaaaaaggcattcatttattttgcttacagcttgatatgattttatcagtgacgaatttgtctaggttcttcaacccattaccaagtcaggaccatatgtgataatattttatgaacttacatattcaaatggtcattatccatttcagagcagtcactctgaaaagctatgtactttttttccaagatgctcttaattcatggtgtagctagaagaacactggattaggaggtagacartcaggctcctatgtgtgagtccactaccaatgatcagtgtgtcttttatcaaagcatgtccccttccctcc

SEQ ID NO: 620749 - DNA, 617 bp, Homo sapiens
aagttgaggttttcagccttccatactatacttgatataatcgtgcaaaccacagaattgatttttttttttttttttttgagtagcaacaaccactgctacaagatcacagacaaactgcaaagtacacagtttatttggctggtccttccacctctctggatttctatcctctttgtgtttttctgtctgtccaatagcatagaaagaaacaagttttgagtgccactggtggcctaactctggtacaatgctaccatacccatcagaaaagctctgacttgtccttggctgcaaagacctgaggtcttctctttctaaggctcctaraaagtgtcttcttgcagcatcttggccaattctcactggagttctatttggaacaagtactaaaatgcaagccagagtcaacagaagagtatctttatattgaagcaatattcaagctttgatgccagctaaattcactatctttcatattcttgtcatcatgagatactatcaaaaaattcaagacccactggtcattcacttttccacttcagtcttcttattatgaattctgtatttttttattcccaatttgccctacctctgctttcatccaaataccaccc

SEQ ID NO: 620750 - DNA, 617 bp, Homo sapiens
aagttgaggttttcagccttccatactatacttgatataatcgtgcaaaccacagaattgatttttttttttttttttttgagtagcaacaaccactgctacaagatcacagacaaactgcaaagtacacagtttatttggctggtccttccacctctctggatttctatcctctttgtgtttttctgtctgtccaatagcatagaaagaaacaagttttgagtgccactggtggcctaactctggtacaatgctaccatacccatcagaaaagctctgacttgtccttggctgcaaagacctgaggtcttctctttctaaggctcctagaaagtgtcttcttgcagcatcttggccaattctcactggagttctatttggaacaagtactaaaatgcaagccagagtcaacagaagagtatctttatattgaagcaatattcaagctttgatgccagctaaattcactatctttcatattcttgtcatcatgagatactatcaaaaaattcaagacccactggtcattcacttttccacttcagtcttcttattatgaattctgtatttttttattcccaatttkccctacctctgctttcatccaaataccaccc

SEQ ID NO: 620751 - DNA, 228 bp, Homo sapiens
caattattgatatttaactgaagaaagaacgtcatggccatcagggctcaataagtcttacaagctrtcgtccagcccttgcagcttctttggtcaccagaaaaatgacagagggctgactaatagtgacttcagtttgcagagattgtttcatccatcatagtggtgattctagtttctctttataatattatggatgatcagttggtggtattactcatgatggat

SEQ ID NO: 620752 - DNA, 523 bp, Homo sapiens
tccatcagatttatttctaagatagatttttgaatggcataaagctaatgctctttttgcattctcccttgcctattatataatgaaaaaaaaatacagtatgtgccatgcacatatgactaatggcccttacagaaagcccatcctagctttgatttttgggagatgaggacatcataatctaatatrgctaatcatgtcaaaggcacaatcaataagaatacactgatctcatggtataattaagtctgcataagttcatttctaagccaaatcaatcaagagtggtcaatctaaccaggaattcacaagtatcattaatgaaaaaaaatcaagatttatttttcaaaatattagcatcttgctatttaaaaatttctacctcttcttagttccttagaatgtccttatataaatacactgaaataaaacttggagtcttttcttgaaaagaatatgacctttcatcactgcaaaaataacttagtaaaagtatttccttcagtttcttcccagaaacacc

SEQ ID NO: 620753 - DNA, 582 bp, Homo sapiens
ccttgagttgatggtgacagagctcaatacatactacccccaaatgtggcaccttgatacattgaggtttttttgttttgttttgtttttgacatggagtctctctgtgttgcccaggctggagtgcagtggtgcaatctcagctcrctgcaacctctgtctcccagtttcaagagattctcctgcctcagcctcccaggtagctgggattataggcatgcaccaccacacccggctactttttgtatttttagtagagacggggtttcaccatgttggccaggctggtctcaaactcctgacctcaagtgatgcacccacctgggtctcccaaagtgccaggattacaagtgtgagctactgcacccagcccaatacactgagtattttaagctacaggaaattaagaaaactgcagaagcaggaagttctctttaaccttttctcactcttctctcctcgagcaggtcatagaccccattgtgagaggtgccctccctataccaggaggaaggggacaaccttatccttgaaggtaaagtgtcacagagaagcatctgaaccaacaggcctggcaaagtt

SEQ ID NO: 620754 - DNA, 582 bp, Homo sapiens
ccttgagttgatggtgacagagctcaatacatactacccccaaatgtggcaccttgatacattgaggtttttttgttttgttttgtttttgacatggagtctctctgtgttgcccaggctggagtgcagtggtgcaatctcagctcactgcaacctctgtctcccagtttcaagagattctcctgcctcagcctcccaggtagctgggattataggcatgcaccaccacacccggctactttttgtatttttagtagagacggggtttcaccatgttggccaggctggtctcaaactcctgacctcaagtgatgcacccacctgggtctcccaaagtgccaggattacaagtgtgagctactgcacccagcccaatacactgagtattttaagctacaggaaattaagaaaactgcagaagcaggaagttctctttaaccttttctcactcttctctcctcragcaggtcatagaccccattgtgagaggtgccctccctataccaggaggaaggggacaaccttatccttgaaggtaaagtgtcacagagaagcatctgaaccaacaggcctggcaaagtt

SEQ ID NO: 620755 - DNA, 567 bp, Homo sapiens
cacagaattgtgattttcacccttggcttttccagctgtttctcaccatttagctacatccctgtctcttccccacccccagggagaggaaagttaaatgatgttaatctgccaaatatttctaatcattaggaagccatgaaaattaacataaccatcagaggaaattaattgccaaagaagacaaggttagaactggagagtgaggactggggagaggaggcaggcagaagggcactttgtttctcctttgtggttttgacagaggggttacagctggaggacgggaggaggctaagcacagagctgcttcctactcttaattatgagaacagccccagaatttcaagtggtgccagtggtgaaagactarcagagggattccctcgattcctttctctttttcctctccctgctccactgggggagatttctggttattttttaattccagttcaaaatagaggttgggggaaaagaagcccacacaggcctcctgcaggaaataccattaataattaatacccaataataatcaaatccatgggagactcattacaagtaaag

SEQ ID NO: 620756 - DNA, 550 bp, Homo sapiens
tgagcacacataagcaatgacaaaaaaaaaggataaatagcaggtttgttcactgaagaggcttattcatccctataggatttttttcattttaggtttatggcttggtggggaatttctctttaattgggattgtaatataacgatggaacctgtcgacatttacaagagagatgggagggcaattcttcctaacttgtttgttgttattattacaacactggctcctttaggagattctgtataaaggaagcagacaatcasgctgattagagacaaagcagccagtaagagaagaaagagaagagagactacgagccacaggattgatctggggctagcaactgcttggaagtcaggctattcagagagcactttgcacatggaatgtgtgctttaatcttcacactaaggtcagtgttacagccccattttctagatgaggaaactgaggaaaagggaagttaggtaatttcccccaacatttcaattcataaatggcagtgttgggattctatccctggaagctggctgagaagtcagctctgat

SEQ ID NO: 620757 - DNA, 550 bp, Homo sapiens
tgagcacacataagcaatgacaaaaaaaaaggataaatagcaggtttgttcactgaagaggcttattcatccctataggatttttttcattttaggtttatggcttggtggggaatttctctttaattgggattgtaatataacgatggaacctgtcgacatttacaagagagatgggagggcaattcttcctaacttgtttgttgttattattacaacactggctcctttaggagattctgtataaaggaagcagacaatcaggctgattagagacaaagcagccagtaagagaagaaagagaagagagactacgagccacaggattgatctggggctagcaactgcttggaagtcaggctattcagagagcactttgcacatggaatgtgtgctytaatcttcacactaaggtcagtgttacagccccattttctagatgaggaaactgaggaaaagggaagttaggtaatttcccccaacatttcaattcataaatggcagtgttgggattctatccctggaagctggctgagaagtcagctctgat

SEQ ID NO: 620758 - DNA, 562 bp, Homo sapiens
ggtgcccacggttgctaggggcgctagcgtcttggggctgccagaatggctccagctctgtgcgcggcgccagcgcatgtcacgtcccggctgtgcctctggctcccacgaccccctcctcacgtagcaactattgtggctactcgtccaggcggctcagcctctggagtgggtccaggacccgctgcagctgatctccgatgccctgtggccgatgagcccttgttttcccgctcctctgatctcccaccsgaatcgcccccatgcgcttaccctccccccaccacgcagacccggggcctttgaatacctggggtcctctgcttcctcccagatgtcagctctgcctcaggaatcgactgagactttcaccaagactttggttccattcctggacacggatacagctggagagctgcccccgtggccagagcagttcgttgctgcacaccaggatctgaatgacaagctgactcggcaagaaaggctcccagaggtggtcccaatgctggactgggatcagaaccaggccctagctcggactctttgcctcaaaagtaag

SEQ ID NO: 620759 - DNA, 588 bp, Homo sapiens
atttttaattactgttttattttcttacttattcaccattgttcttgcccactagactataagatccctaagagtctggaaccatagattttgttcattagtaattacccagcaccctgagcagtgctargcacagagtagaaggtcagcaatagggcaattgatggagaaaatgattttaatataagatatgcaggagataaaatactaaaagtatatgtcattaatcaccttttttggtaattaatttgacaagcttaataaaatggacagttttattaaagaaaatgtgaattgctaaaaataatttaagagggaatagaaaatttgaataatcacagaataaattaagaaggttgttaaagaactaactctgaagaaaataccaggtaaagaatattttaaggataattttccccaaaccttcaagaaaaaagcaatttctgtattattttaaatgttattgagcttaggaaaagatgaattgatccccaattcaaattttatgaataaaaaatatagccagttcacttaagaacaaagattcaaaaatcctaaataaataatagtaattccaatatagactgt

SEQ ID NO: 620760 - DNA, 608 bp, Homo sapiens
aaaactcactggtagtattaagtacctagaaaaacaccactgtaactgtggtgtgtaaactactctgatactaattacaaagactaaatgaagaaccaatcaaaaataataactacaactttataagacatagtacaataagatataaatacacttaacaaagttaaaaagcaagggaataaagttaaggcacagagtttttattaattttctttttgcttrttaatacaaactgtgttgttatcaggttaaaataattagttataagatggcatcttgcaagcctcatggtgccctctaaccagaaaaatatacaatagatacacacacaaaaaaaagaaattatatcaccagataaaaatcacattcactagatgaagacaggaagaaaagaaagaaggaagagaggaccacagaacaaccagaaaataataagatggctagagtaagtctttacttattaataataacactgaatgtaaatagactaaactctccaatcaaaagatacagagtggctgaatggatgaaacaaatgaaaccctttaatctgttgcctacaagaaacactttacctaaaaagacacacatagattgaccataaaagg

SEQ ID NO: 620761 - DNA, 619 bp, Homo sapiens
aattcagcaggaggatataacaattgaaaatatatatgcacccaacactggagcatctagatatataaagcaaatattattagagttaaagagagagataggccccaatacaataatarctggagacatcaacacccaactttcagcattggacagatgttccagacagataatcaataaagaaacaccagacttaatctgcattacagaccaaatggatctaaaatagatatttacagaatttcattcaacagctgcagaatacacattcttttcctcagcacatggatcattctcaaggataggtggtatgttaggtcacaaaacaagtcttaaaacattgagaagatagaaataatatcaagcatcttctctgaccacaatggaataggacaagaaataacaagagggattttggaaactatacaaatacatggaagttaaaaaaaatgctcctgaatgaccagtgggtcaatgaagaaattaggaaggaaattgaaaaatttcagaggggcattatgtaatgataaaaagattagtccagcaggaaaataccagaatcctaaagatagattcagctaagactggagatcccaaattcataaagcagttactacat

SEQ ID NO: 620762 - DNA, 495 bp, Homo sapiens
caatggttacaacagcaaatctagagagatggggcaaaggatgtcaggtggacagaagcccccacttttttttagactgtaacagaggacttgaggactgggaacaacatcctatgcccagagtggcaaaacttagtcttacaggtttgaaaggataaccacgcttaagtcagtaatctcctcactrtggaaacattggagaatggggtcgagagaatcagaaaacagatccacctttaaaagcttaccaagccactaggaccagtccatgatgaaggaacaggcaaggaaattaacatttctggacacttactatgttctgcataatacctttcctactgatattgtagtgccgtagtcaaatggatctaaaaaatgagattcactctgacttctagtctactaaaaactctatgaagtcctacagcagagaaaactggttaatttcacttgacacagtttcccagagtacttttcatacataaccccttttaa

SEQ ID NO: 620763 - DNA, 418 bp, Homo sapiens
tcaaatagacaaacagaaaataagagaaaatttctactaggaaatgtaatactagaaacagagctggtattgcaaataattggagaaataataaagaatgaattttcaaacccattggatctagataataccrtttagtgtgtggcttctttcagtcctcacaataatcaaggaaacccagtttccccttcagtcaatgaaccatagttcactatgagccagtgaactgatatgtatctaaaaacagaatgaagaatcacaattttctactgtgccagtgggggtcagccttctgctcatcactttacagggttcttactgttatcattactattattataaaagttgagccatattctattcactaaccatatatcccacccaaggacataatcatgatctattactcattaccata

SEQ ID NO: 620764 - DNA, 417 bp, Homo sapiens
tttttttaaagtgagtagttaaatgttttaatgaaaagtgctttttgaactagctaatatagcaagcaatgtaatgttcctttactttttatgaatatatatttattttcattatttttgaatcacaggaaaaggctgtaaggtttgaatttgcctgtggcttagtagtttggtaaactcatacttggcataagcattagtcaaacagtacatgaattgcttatataatggaaaaaaaaawattcttaacattattaattgaaatgtctcatgcaatttacaacttagagcttaaagaccaggatctaaaatacaccgctccaaaatccattgccctgcttccacaagacatccaaaccttggctaggttttcaggtgactgccaaaatggcaaggaagataagattgttgaaaagt

SEQ ID NO: 620765 - DNA, 626 bp, Homo sapiens
gtctctgttcattccaaggtatttatagacaataaacaactattgttgtttttctgttttagagagaggaatattatgttactaatacaatatgtgagttaagacatgaagatgtgctcctttaggagtgtctgatcttcctgaggctagcccaggcagagccagggtccaaaagggaatagaagcaaacaggcctcttgaggcctaggctcagaattcacacatcatttctctatccatattctattggccaaagcaagtaacaaggataacctagattcaagaggtaaaaaaacagacttcacctcattggatgagcctcagagggtgttgatacagggagaagtgaaccattggggatgtcttcacaatctaattataatagtatttgatctctttccttttctagatgaatcttgaggcactctggacgcagctaaaggaacatcccagtatccaggggaggacagaggtagagtgccatgatgcctatgttagtcatcaatacagctcaaaatcaagtgactcctccacgaataatgtaagctctayaaaggcaggtggctcttctctttctctcttcctctctcctttcctccctactgaatgcctatattttcagaaca

SEQ ID NO: 620766 - DNA, 614 bp, Homo sapiens
tgtgagagtgtctattgaaggagagtctgatgaagaaagtgaaccaaactcagcagagactggggaaagcaataatgaagtgatgcaaaagcaaataaggaaagcccaccctggagaagaaactcctgagctcaagtgaaatgacagtggtgatggtatttttgaggttcatgctgctgctgacttggccatgctgggaatatttaaacaggaggaatgaatccactgcaacgaataagttgaacaggaaaaaaacagattatgtagctcattgttctagaaagcagctaattccaggtgactgaraaagaaaggatatggtgactctctctggggtggatctggggtgggttttacttactgacctggggggcctgggagaccccaaaaatgtagagatctgtcattaatgtcaaggtccctgccactgggagcagtttagaaacagacttgtgacacacaaactgcagcccactaggaggaaaggaaaggaaagctatcacatgacaagagataggccttgggaatctgaaccagtaaagagaaactggtggcaatcaccaaaggagggccaaggagaagtgaatctttagtgcctcagggattccccagat

SEQ ID NO: 620767 - DNA, 605 bp, Homo sapiens
gatagaaaaaacagtcctgaattgtggatgccacccaccttcccccgaggcagctgcagcagtggatggtgtggagaacatctctgggcactgggggagagagaacacagcacttatgagtcattgaactccgtgctgtcctgtaagagcagaagggaaaactagaccaaactcagctgctgcctgcccattgagggagcatttaaatcaggcctggccaaagtggaatcacagtggtccgccaaacttgagctttcattaaccttaccaccatgggctacagtgccctgtgtctctaaatgaacttgaaaggcagtctaggccataaggactgcaactccaactcctaggtgcttcctagtgctgagctaggctcagacacagtggactggggtcgggggcacatgacatamtgagacatcacctggggcaacaaagggagtcctggcattaccctttctctaaccctgggctgcacagctcacagctccaaaagagacctctttcttccactttaggggaggagagggaagagtcaggaggactttcttttgcatcttggatatcagctcagccgcagggcaccagtcagagttgtgaggccc

SEQ ID NO: 620768 - DNA, 600 bp, Homo sapiens
tcttattcgccactccaacatttactgaggtcctattatcccctagtcactgtattaggaactttatacaggctaattatctcatttagcctagccaaatacctttcaaagaaggaagcagtaaatacatcctacaagttaaaaaattaaggagtatggcagacactcttagtgcccttcgaatatcccctcagctcttacattcttgcagactgacttggattgctttcagctataagaacctgtgactctgccagggagcagcctcagtcattgagtaataaacatgatgtaatgaatactcattgagtaatgaacatgatgaacaaacaccttatctcccctgcccctggaagtgggagatgtaggctaagtataacactaaagggtgatcggccgggtgcagtggttyatgcctgtaatcccagaactttgggaggccaaggtgggcagatcacaaggtcgggagtttgagagcagcctgactaacatagtgaaattctgtctctactaaaaatacaaaaattagccaggcatggtggcatgcacctgtaatcccagctacttgggaggctgaggcaggaaaatcacttgaccctg

SEQ ID NO: 620769 - DNA, 584 bp, Homo sapiens
tttgctacagcagcagagctgtattgctgatgagtggtataacctaaagggagcatgacagtccaacctagacacctatttacaggcagttacatagtcaccaaaatccagcagtaccattggttggattagggtcaattgggatggccctgcatcatcctaagattaaccataaaaacttgagacatgtttattcagtaagaaaagggaatctcagttctcagagtaacaaaaacagccatatagagtaytgtggattgactttggtctcaatgttttattcttctgacacatacctgtgtcattgattcacagtgggtagaaaatacctctctccccttgacgggggattggccatgtgacttgctttggccaatggagtgttggaggccatgcaatgaaaaaatgtttaaaattttcatgcacagttgagctggttctcctgtgcccaggccttttgccataagaagaaaatgtctccagtagctgctagtccaagaaggatgagagacactatggcacaaagcccaactgaatcctcctatatcacgtgagctctaattatatacagatgtgcaaacaag

SEQ ID NO: 620770 - DNA, 610 bp, Homo sapiens
attttttttataaattctgttggcctgcccaagactctgaagcataatacaaacagaaaagactttgacttaattaagagattcaaaatgaatgaaaggaaacactaccactaccagaaggaaacccaggttatatttaacaataataatttactgaaaatagtaccaagttatatctaggcatttgtttctttaacagtttcctctaaaatcctttataaatatattttaagctagaattagacttagttgcttaataaaagttgtttttatacaaaaggaaaattaaatttaaaatgtggtattatctctgttgagaaagttataagaatmcttgtttgttagactataagaccattgttcaactaatatcaaatatattccagttatcaagaaagaatatcatgagtataaacaaagacaccaatcagaataatctattctttcaatatacttttatctgctgattttctcctaatacatttgtagcacttggatgttgtgtaaggtctgttttcaatgttctataaataaatcaggtatatgttgagtttggaaactagttgaatgtctacttaagttctgatagtcaatgaggcaaaactctcag

SEQ ID NO: 620771 - DNA, 588 bp, Homo sapiens
aatcaaagaggttccaggcatagggaaagaggataggagaagctacatgctggataatgtgtgaagagggatccagtggagaatactgtccattgatccaaaagaaccagaaagaggcttgggactcagcaatatacatgctatgtggtcagggaggggtaagtgagcacggcagtgagatatagagttgaaatagaagattaattggaagtctgtatatgaaattgtcaacagctccatcctgcccattccctcaatacagaataaatttgagttcgaacatcaaaaagttgtaggccttctctaaagatatcagatgacagcagaagagacctccacattcagtcataaggagkattcccaattcaccagtcttctgccagaccattcactccaaagagaatatagatattctcgccaatgtattcaaatctgctgataatcttttaccatctcactcttaaatatgaactgataatcatggatacgtagacatataaggaaagctcttacagagaaagagaaaaagaagaagcagaaacagacaacttagaaattaaagatagttcagggattttataagaagtt

SEQ ID NO: 620772 - DNA, 520 bp, Homo sapiens
agaataatgactagttcaaagtgaaaaacaatcaggtatacaaggaaaaagggtatagaaatagagagtagagacaaatctgcagactttagataaactgaaaaaataattattgaactaaaacatatataagaagaaattactgagaacttagcmcaaagagatagaaaatagaaaacaagataaggaacatgagggattaacgggagaagggttatcatacatttaataggaggtccagaagaaaaggtgagaaaaagagacagcggcaatatctgaagaaattacaagtaacaatttcccagaattgctgaaagacaccaatcttctgattcaagaaatcaaacatagtctagacagtttaaaaagaaattcgcaactagacatttcatagtgaaactacagaaaatcaagtcaaagagaacaattttaaagcaaaaaaaaaaaaaaaaaaaacccttcaaagagtattactatttttcagtggcaataaagaaaaccagtagacagcagaatggta

SEQ ID NO: 620773 - DNA, 520 bp, Homo sapiens
agaataatgactagttcaaagtgaaaaacaatcaggtatacaaggaaaaagggtatagaaatagagagtagagacaaatctgcagactttagataaactgaaaaaataattattgaactaaaacatatataagaagaaattactgagaacttagcacaaagagatagaaaatagaaaacaagataaggaacatgagggattaacgggagaagggttatcatacatttaataggaggtccagaagaaaaggtgagaaaaagagacagcggcaatatytgaagaaattacaagtaacaatttcccagaattgctgaaagacaccaatcttctgattcaagaaatcaaacatagtctagacagtttaaaaagaaattcgcaactagacatttcatagtgaaactacagaaaatcaagtcaaagagaacaattttaaagcaaaaaaaaaaaaaaaaaaaacccttcaaagagtattactatttttcagtggcaataaagaaaaccagtagacagcagaatggta

SEQ ID NO: 620774 - DNA, 520 bp, Homo sapiens
agaataatgactagttcaaagtgaaaaacaatcaggtatacaaggaaaaagggtatagaaatagagagtagagacaaatctgcagactttagataaactgaaaaaataattattgaactaaaacatatataagaagaaattactgagaacttagcacaaagagatagaaaatagaaaacaagataaggaacatgagggattaacgggagaagggttatcatacatttaataggaggtccagaagaaaaggtgagaaaaagagacagcggcaatatctgaagaaattacaagtaacaatttcccagaattgctgaaagacaccaatcttytgattcaagaaatcaaacatagtctagacagtttaaaaagaaattcgcaactagacatttcatagtgaaactacagaaaatcaagtcaaagagaacaattttaaagcaaaaaaaaaaaaaaaaaaaacccttcaaagagtattactatttttcagtggcaataaagaaaaccagtagacagcagaatggta

SEQ ID NO: 620775 - DNA, 520 bp, Homo sapiens
agaataatgactagttcaaagtgaaaaacaatcaggtatacaaggaaaaagggtatagaaatagagagtagagacaaatctgcagactttagataaactgaaaaaataattattgaactaaaacatatataagaagaaattactgagaacttagcacaaagagatagaaaatagaaaacaagataaggaacatgagggattaacgggagaagggttatcatacatttaataggaggtccagaagaaaaggtgagaaaaagagacagcggcaatatctgaagaaattacaagtaacaatttcccagaattgctgaaagacaccaatcttctgattcaagaaatcaaacatagtytagacagtttaaaaagaaattcgcaactagacatttcatagtgaaactacagaaaatcaagtcaaagagaacaattttaaagcaaaaaaaaaaaaaaaaaaaacccttcaaagagtattactatttttcagtggcaataaagaaaaccagtagacagcagaatggta

SEQ ID NO: 620776 - DNA, 363 bp, Homo sapiens
ggagactgaattctgacaggagttatttccctctggccaaagctttgtgggagtttcccatcttccccaatcacagagaattgaagcaggcttaagattgcagtgagaggctgaagtgggaggatcscttgaactcaggttgaggccgcagtgagctattattgcgccattaagctccagcctgggtgacagacccctcatttttaaaaagtaaaaattaaaagattgcaatgagtggtttaggttggatataagaaaaacttagtgggttgtgaggatggttaaataccaaaggagacacagggtgagtgagcctttgtgaagggctgcacagggaactgcagtggctctgccctggggagt

SEQ ID NO: 620777 - DNA, 518 bp, Homo sapiens
ttttgcagttgtaagaaaaaaaccacaatttttcctttttaaagaagagttgaaatgaaaatattttatatctrtaggaaagaaatcaggtgtcaatcttagacacagagtaagtgatcatttgcactcctcccagcaatgcctggcgtgagtgttttacaggtgaatctcaggctcagaaagatgacttgttctttttcatctcatctgtagtaacttttaaagctgttaggaaattaagttatagaaatagccagtttcgtgtagaatatagttgagtattttaaatattgagtcatttcatcttgtacctgttaaagtatttctgttttgtgagctaaaggtcagaaggctacaagttccaactctttttttcgttcccaaactccaaggaatactgtttctgaaatatctcccccacctcagcatacacactcagacacatgacttatttgatcgggctttgtactaggaacatggcagttaatgagacaaaactcctgcccctatagagctta

SEQ ID NO: 620778 - DNA, 584 bp, Homo sapiens
tttcacaaaccagcatgaccttactgttaattttctgaaatatttcttttaaatctttttccccctatgtacaacagtacaatttaaaaactcacatataatcaggatatgtagatactggccaatattctgcttttaaaatctaatatttctgagccttttcctatgttttctaggaataagattatttttaatttaatttttatttatttagtaatgattttctaagataaactcacaaggcttacaaggtacaacaaagagtagaaaatggtaaaaggctagtgagagaaaagttttcctcccccacccaatgttatcagcttcttgtgtatcattccagagtccataaatttacaagcacatttattcctttctttctttttccttttcacatactgttttccatcttgttttatttctctttaaatattgtatcatggagactgctccgtgccatattttctttttagtaaactgcattgatttttattgcagtgatgtgtcataayttctttgagtcctctattgatgatcttttaatgctattacatcctctactaagaaataatattttgctatta

SEQ ID NO: 620779 - DNA, 610 bp, Homo sapiens
agtcttcagcctgagacccatccctaagtaaatatctgaattggggttttggcttggtaaagtttaacaatcagctgatcttaatttctccttacattagagggctcagtaatcatataagttgtgcaattagtttcttttgcttaactgtttttttgttgttgtttcggtcttttttttttttgagacggagtcttgttctgtctcccaggctagagtgcaatggtgcgatctcrgctcactgcaacctctgcctcctgagttgaagcagttctcctgcctcagcctcccaagtagctgggattataggtgcccaccaccacacctggctaatttttgtatttttagtagaaacagggtttcaccgtgttggccagactggtcttgaactcctgacctcaggcgatccacctgctttggcctcccaaagtgctgcaattacagacatgagccacctcgcccagctgtttgggtctttttcccattgggtttgaccaactctatccaacttgatcaaatacgaaggaaagttccaaattattgttacaggaaaggggtcccgatccagatcccaagaggaggttcttagatctcgcgcaagaaagaattg

SEQ ID NO: 620780 - DNA, 659 bp, Homo sapiens
ctcaggggagaataatgcgtgagagacaagaggtcaggagaagggcagagagagacttttcttctggggtcttcatgttagggtatcattttctgaaccccagcaatggcatgtctctcctttaaattcccatagtgctgtgtgtgtgccttccttgtggcacttacattattctgacttggagcaaagaaagttatgtaggtattttatttccattacttgaatacagtctacaggagattagtaagtgtgcaacctgagaccrggcatggtggctcacgcctgtaatcccagcactttgggaggctgaggcaggcggatcacctgaggtcaggtgtttgagaccagcctgaccaatatggagaaaccctggctctactaaaaatacaaaattagccaggcgcggtggcacatgccccagctactagggaggctgagacaggagaatcgcttgaacccaggaggcggaggttgcggtgagccgagattgtgccattgcactccagctgggcaacaagagcaaaactccatatcaaaaaaaaaaaaaaaaaaaaaaaagtatgcaacttgaacctagtaggtgctcagtaaatgtatttttaatagaattaaaattttagcttcaattctctgcactgaccagatatcccagagaattc

SEQ ID NO: 620781 - DNA, 659 bp, Homo sapiens
ctcaggggagaataatgcgtgagagacaagaggtcaggagaagggcagagagagacttttcttctggggtcttcatgttagggtatcattttctgaaccccagcaatggcatgtctctcctttaaattcccatagtgctgtgtgtgtgccttccttgtggcacttacattattctgacttggagcaaagaaagttatgtaggtattttatttccattacttgaatacagtctacaggagattagtaagtgtgcaacctgagaccaggcatggtggctcacgcctgtaatcccagcactttgggaggytgaggcaggcggatcacctgaggtcaggtgtttgagaccagcctgaccaatatggagaaaccctggctctactaaaaatacaaaattagccaggcgcggtggcacatgccccagctactagggaggctgagacaggagaatcgcttgaacccaggaggcggaggttgcggtgagccgagattgtgccattgcactccagctgggcaacaagagcaaaactccatatcaaaaaaaaaaaaaaaaaaaaaaaagtatgcaacttgaacctagtaggtgctcagtaaatgtatttttaatagaattaaaattttagcttcaattctctgcactgaccagatatcccagagaattc

SEQ ID NO: 620782 - DNA, 586 bp, Homo sapiens
atgtaaaaaaaaaaaaaatcaattgccccccaccatggaaaacttaaattaaactctgtcttcctttttactagaaagatgctttaaaaawtttagcaaatttaattaagttgttctcttttacctgcttttcctcttgagcaactgttttactgaccctgcccctcaggtcccagaagtgaggagggtagaatgccaaagagctggggctgggctcagaaaggtctcagccatttcctccccattatcgctctgttcagctgctcaggctctgacagcctaacaaggtgctaatgggccatacgttctagcccagttcacagcaggttgtttcaaatgagttgaggaggttgatttgcattcaaaatcttctctccctcacttgcttttttgtttggccccttgatttctactccccagacacccttggaggttgacttagaatggaacaaaatcacattggttcagaatttgaattgcctgagtttggattttaaatgtgccccattatttcatcaagttgtggtggagtggggaggagtgaagggaaagaaaagagagcaaagagattttaaaatgaaaggga

SEQ ID NO: 620783 - DNA, 586 bp, Homo sapiens
atgtaaaaaaaaaaaaaatcaattgccccccaccatggaaaacttaaattaaactctgtcttcctttttactagaaagatgctttaaaaaatttagcaaatttaattaagttgttctcttttacctgcttttcctcttgagcaactgttttactgaccctgcccctcaggtcccagaagtgaggagggtagaatgccaaagagctggggctgggctcagaaaggtctcagccatttcctccccattatcgctctgttcagctgctcaggctctgacagcctaacaaggtgctaatgggccatacgttctagcccagttcacagcaggttgtttcaaatgrgttgaggaggttgatttgcattcaaaatcttctctccctcacttgcttttttgtttggccccttgatttctactccccagacacccttggaggttgacttagaatggaacaaaatcacattggttcagaatttgaattgcctgagtttggattttaaatgtgccccattatttcatcaagttgtggtggagtggggaggagtgaagggaaagaaaagagagcaaagagattttaaaatgaaaggga

SEQ ID NO: 620784 - DNA, 563 bp, Homo sapiens
gtatttctgctctccaccccaacacatacacacaaaataagacaaagcactagttttagatgcaaatattgtactctttccttaatagatacatttgttgtttaatggaacctattattttggaagtgaatcctttagttcttaagatggtatcaagtataacattgacttgcatttcagaaaacagtggtacatgtatgactggagagaggtatgactctctccaggcccttcaggaagaaatttaaamcaagaaccacagtcagaatttagttttcaattcccccttatctaaggtctatgtgaattgaaaataagaaaaagaagaagaaggaggaggagaaaaagctttaaaaggaaaagtcttactaaaggataaaaaaaaatctgcaaataattggacaatacaaaataaaatccttatctcctataaagcacaaccaaacactacctggttcttgatgaagtctctctaacggcagaaatatgtgaatgaatataaaataagttagcaaatgccttcgttactactggcatattagagagaatggtggaggggaact

SEQ ID NO: 620785 - DNA, 654 bp, Homo sapiens
cacagtggctcacacttgtaatcctaacacttggagaagctgaggcaaaaggattgtttgagcccaggagttcgagaccagcctgggcaacatagggagaccctgtttttacacacatacacacacacacacacacacacacacgccaggcctgatgtcgcacacctgtggtcccagctactcaggaggctgaggtgggaggatcacttgatcccaggaggtaaaggttgcagtgagccatgatcacaccactgcactccagcctgggcaacagagtgagatcctgtctcaaaaaaaaaattrtgtgccaggtaacatctcaaactgttactctatcacaccattatcacgtcagaaccaaggctgctgatgctgaaatatctgaagccatccagtgttcatttcaaagaggaccaacccaaatcaatgacacagaggcagagaggcaagcatggaacctgagggttgcacaaagtgggattcatccagctttggagtcagtttttcttgcctaaattcaagaggatggatgagttgacccctcaaagggactttctgtttccagcaagtttctcttaaagcagagaaaaagtgcttttctgatttattttttttttttattccaactcttctggttttacttaaaacataagt

SEQ ID NO: 620786 - DNA, 426 bp, Homo sapiens
aggaatagctattcttatatcagacaaaacaaactttaaatcaacaacagttaaaaacgacaaagagggacattatatgatgataaaakgactagtccaataggagaatatcacaatcctaaatatatatgtacctaacactggagctcccaaatgtataaagcaattactactagactagacctaagaaatgagatagatagcaacacaataatcgtgggtgactttaatactccactgacagcactagacaggtcatcaagacagaaactcaacaaagaagcaatggacttaaactatatcctacaacaaatggacttaaccgatgcttacagaacattctacccaacaactgcagaatatgcattctattcatcagcacatggaacattctccaagatagatcacatgatagaccacaaaaca

SEQ ID NO: 620787 - DNA, 551 bp, Homo sapiens
cagctgaattctatcagatgtttgaagaattggtaccaatcctattgacactattccacaagaaagcgaaagagagaatcctcccaaaattattctatgaagccagtaccacctaataccaaagccagggaaagacataaaaaaagaaaactacagaccaatatccctgatgaacatagatgcaaaaaatcctcaataaaatactagctaaacaaatccaacagcatattaaaaagaaaatgcaccatgatcaagtgggttttatatcagggatgcagggatggtttaacatccacaagtgaataaatgtgatacaccacataaacagaattgaaaacaaaaatcatgtaatcatmacaatagatgcagaaaaaacatgtgacaaaatccagcatcccttaatgattaaaaccctcaggaaaatcagcatagaagggatataccttaaggtaataaaatccatctatgacaaacccatagccaatattatactgaatgagaaaaagttgaaatcattccctctgagaactggaacaagacaaaaatgcaga

SEQ ID NO: 620788 - DNA, 367 bp, Homo sapiens
atccacaagtgaataaatgtgatacaccacataaacagaattgaaaacaaaaatcatgtaatcatcacaatagatgcagaaaaaacatgtgacaaaatccagcatcccttaatgattaaaaccctcaggaaaatcagcatagaagggatataccttaaggtaataaaatccatctatgacaaacccatagccaatattayactgaatgagaaaaagttgaaatcattccctctgagaactggaacaagacaaaaatgcagactttcaacacatctattcaacatactactggaagtcctagccagagcaatcagacaagagaaagaaatcaagggcatccaacttggtaaagaggaagtcagactgt

SEQ ID NO: 620789 - DNA, 515 bp, Homo sapiens
ttaggaagctaaagtaagaaacaagggacacctacccaggggcatcagatgtgaagaaaagaagcattgtgggagaaatgctgggcagaactagcaggagctggagataaggggagaagagaggaatcaaagattacttcaataataggagtctgggcacctgggaggatggccagtcattgacaagagtgcagcttgaggggcatgttggggtgcaaatagggagcawaataaatgtgatactgatttgaaggtgctgatagaaccaaccgctgaaactgctgcaaatacagtcaaaattgccaggatagagctcagaagatgggtcaaggcattttgaaatcattaagaaacgggaaaagccgggagggaatgagaagagacaggagaattgagggaagattttcaggaagtttatcggaaggtgaggcagatgcctggacttaacttgcttgctgaattttatgctttccttcaaaactttttacctttctcccaagataagaaggagtaaa

SEQ ID NO: 620790 - DNA, 515 bp, Homo sapiens
ttaggaagctaaagtaagaaacaagggacacctacccaggggcatcagatgtgaagaaaagaagcattgtgggagaaatgctgggcagaactagcaggagctggagataaggggagaagagaggaatcaaagattacttcaataataggagtctgggcacctgggaggatggccagtcattgacaagagtgcagcttgaggggcatgttggggtgcaaatagggagcaaaataaatgtgatactgatttgaaggtgctgatagaaccaaccgctgaaactgctgcaaatacagtcaaaattgccaggatagagctcagaagatgggtcaaggcattttgaaatcattaagaaacgggaaaagccgggagggaatgagaagagacaggagaattgagggaagattttcaggaagtttatcggaaggtgaggcagatgcctggacttaacttgcttgctgaattttmtgctttccttcaaaactttttacctttctcccaagataagaaggagtaaa

SEQ ID NO: 620791 - DNA, 564 bp, Homo sapiens
aactgttgggaaggcataattgtgttttgaaatgttagaaagatgagattttggaagggccaggagcagaatgatatagtctggctcacatgtccccacccaaatcttatcttgaattgtaacccaaattgtaatccccatgtgttggggtaggaaccttgtgagaggtgactggatcatgggggtggttccctcatgctgatcttgtgatagtgagtgagttcttacaagatctgatggttttataaagtgctcttccctgctttgctctgcacttctcctccttgcttccttgtgaaggacatgtttgcttccccttctgccaagattgtaagtttcctgagccctgtggaactgtgagtcaattatacctctttcctttttaaattacycagtcttgggcacttccttttagcagcatgaaaatggactaatacagttggtgtggatgtggtaaaaagggaacacttttacactgttggtgggaatgtaaactagtacaagcactatagaaaacagtgtggatattccttaaataactaaaaatatatctaccatttgatc

SEQ ID NO: 620792 - DNA, 429 bp, Homo sapiens
gaattcacatgactttaaaagatgagtggaatttcaacaagtggagggagcagagcaagaggatatgtcaagacaatctgtcaggtggagggaataacattaatcaaggatggagatggagaaatgaagtcttgcttggagaacatcaaggagtcaacttcaattgcactaaagcaagagatacatgtatttaagtagtgggagaaaaagcagcaggggtgggttgtggccatattgtggatgctttaaatgttggggatggagattaactcaatttgaaagagccaatgagacattttgaacagggggcaatatgattggagttttcatcagagtccattaatcatgtggtaaatgatactcacatcttgggaaatgayaaaaattaaatgagtccaaagcagtgaagtatctaactaaatttagtag

SEQ ID NO: 620793 - DNA, 586 bp, Homo sapiens
cttggtgtcctctcaatccttccaatctacaaatatggcttttccttttgtgtgtgtgtcctcttcaatttcattcattggtgttttatagttttcattccaagatctttcacttcttcrgttgtttttcctacttatttttttgtagctattgtacattagcgcactttctgggtttctttttcaggttgttcactgttggcatataagaaggctattgattttgtatgttgattttgtatcctgcaactttacttaactgtttatctgtcctaagagttttctgatgaagtcttgaggttttcccatatagaagatcacatcatcttcaaagatgatttgactttcttattttccattgaagaatgccctttagattgaatatgaccagttgcagtaagtttaagccagttttcaactggccaaaattggttttgcatagctatgacaggacacaaccagtttagactggttctgaccatagctatgacaggccacaaccagtttagactggttctgaccatctgtaattggttttggctggtttgggccaacctcaacctgttcataccagttctgccaggtt

SEQ ID NO: 620794 - DNA, 586 bp, Homo sapiens
cttggtgtcctctcaatccttccaatctacaaatatggcttttccttttgtgtgtgtgtcctcttcaatttcattcattggtgttttatagttttcattccaagatctttcacttcttcggttgtttttcctacttatttttttgtagctattgtacattagcgcactttctgggtttctttttcaggttgttcactgttggcatataagaaggctattgattttgtatgttgattttgtatcctgcaactttacttaactgtttatctgtcctaagagttttctgatgaagtcttgaggttttcccatatagaagatcacatcatcttcaaagatgatttgactttcttattttccattgaagaatgccctttagattgaatatgaccagttgcagtaagtttaagccagttttcaactggccaaaattggttttgcatagctatgacaggacacaaccagtttagactggttctgaccatagctatgacaggccacaaccagtttagactggttctgrccatctgtaattggttttggctggtttgggccaacctcaacctgttcataccagttctgccaggtt

SEQ ID NO: 620795 - DNA, 630 bp, Homo sapiens
actcatatatttttttttaactgttcttaccttggtaagcaaaagcaaaatgaggaaaaaggcatgtctattccctacagaccccaaaattttctgaaaaagacctccaaatggggtttgtctatcaagtgcataaagttgaaggaggccaaggtgttgctattcacatcatckgcttaagttagcacacaccatgtggtctttctttaggcaattttcgagttgtctccttggatgccttacgctagaagtgcatacacaacaaaaatgaggaatgtataatatctagggaaagggaagaagaaagagggagtcagtcccctgcaaatccattgacgtgaggcattcttcctggatggtccttcaccttacatttgcttcatgttgtcccttacagcccaggcaaattctccacagcattttgcccataagatcattaccacattgcttggttcccctttcagagatgattagtcagccagtccatatttagctcctgttgctatttcccggccaagtctttcattccctaaacatttctgatgtggttcttggaactgtattcaatgtgctaagcctcggctgccccaagcagaatgccttgtccatctgtgcccagaagatgcttgc

SEQ ID NO: 620796 - DNA, 541 bp, Homo sapiens
cttaacccaactccctgcaaattgcaagactaatctccagtgaattcgtttcttactcaacttttggctgactcttgggaaaaaaggaattggggaaagtgtttcaagtcaaactgagaactgaacatacagatactcacctgtaagcggaaaaaaggtattgaccagacaaaaaaaggggaaggtggaggtctccatcatgggtgacaaaagagaaacagatttagtcttataactgtcaattgaagaatgatgggttcgtaaatttaggaaggagagcttcatttctcataaatggttagtctgcagggtggccaatgtgataggctggaaagcatagcctttggacagaagccagaaacagacactttgagggaaggataaatggaatagaaatttataatatataaagcagagtggttttatatattttatttagagatatgtgcatgtatatatatattatatgtatataaatatatattatatatmtataagtatatataaagcaatttatataaatatatataaagccattctg

SEQ ID NO: 620797 - DNA, 548 bp, Homo sapiens
ctcacctgatgtgacaaatgaatgagaatccaaaagaatgattgtaatggaattttgggccctcatgggccaccgttgaggtgttttttatataaagtttgaatatatgtccctgccaaatctcatgttgaattataatccccagtgtttgaggtggagcctgatagaaagtgttttggtcatggggggtggattccttatggcttggtgctgtccttgcaatagtgagtgagtacacatgagatttgattaagtgtgtaacacctmcctccactaccctctcttgcacctgcttctgccatgaaacacctgctcctgtttccaccttccactatgattgtaagtttcctgaggcctccccagaagcagattctggcaccatgcttcctgtacagcctacagaaccatgtgctaactaaaccccttttcttataaattacccagtcacaggtatttctttatagcaatgtaaaaacggcctaacacatttttaaaaggagcaactatgttgacactttcttcacagcacataaagaaaacacctaccc

SEQ ID NO: 620798 - DNA, 477 bp, Homo sapiens
ggagctggtaatttagttaccccaaatgcactaataagccaagtcttgctaggggaataattccttagcatgcctctatgtgacttctcaggagaggcttcagtggatgagggactaggggagcagaagtaacaaacagaagctaacagccttgggctctgctcttcatctcacacataccctctggatagacagtaaaattcartgtcagtttctccataaaaatttcctgtttagaaaaaaaccacctcttctgctttcttttctcattaaaatgtcacttctaagtcatttagaaagggtcaggttgcatgttggctcaaaaacctttgacagctactgtaattgcctagaggttaataacagtgatgtctctcacaagttcaattttgaagtttctgccaagccattacatgtaaccagggtaaagaaatcaaaggacattagagagaagagaagaaaacccaatctcatcta

SEQ ID NO: 620799 - DNA, 618 bp, Homo sapiens
gttgctttggtcctgttaaaggctcttacctaaacattaagggaagaattatgggcagagattttcctttaaccaaataagccatttcacaggaggcttacatagattcactagacatcagtaaaacaagagtaagcctccatgccacccctaatctgccagcacccaaagggaggaaagggcagcatccctggtccagagtgatagctctcacagtgccaaacagtgtgaggaccatgcaagaatacagatgaacagacattgtcctagcagcatgtgttttatgaaaaagtaccgagtcccattttggtcagaaaggtcatcaatcctgttgctggttttagcatggacaagtgtgctaggatcccccagagagaagcggccacttggaagtaagcatggcccttaggaggtgtggctagatattcaagtgctggacmtcatgccaagaatgcactgcttctttcaaattacatccctaaaaccagtcacatctttccaaatctaatataacatttgcacctaaattcaaatacaactctttcttacagttgaatgaatcactttgtgccttggttttttcacttaaaaatactgaaaagaggccaggtgtggcag

SEQ ID NO: 620800 - DNA, 414 bp, Homo sapiens
tcaggggatgtatggaaatgcctgaatgtccagacagaagtctgtggcaggggtgcagccctcatggagaacaacagtgcagaagtgaaatgtgggktccaagccccaacacagagtccccactggggcactgtctagtggaaatgtgagaagagagacaccatcctccagaacccagaatggtagatccaccaacagtttgcatcgtgtgcctggaaaagctgtagacaataccagccatgaaagcagccagagggggctatattctgcaaaaccacaggagtggagctgcccaaggccgtgggaacccaccccttgtatcagcatgccctggatatgagacatggaatcaaaggagattattttggagctttaagatttaatgattgccttggtggattttggacttgcgta

SEQ ID NO: 620801 - DNA, 597 bp, Homo sapiens
aatccaacttcctttttaactctgttcttctctctgtgccttcttttttcccatcaccccctaaatgccctgcaaaataacttccttcttcagtacagcagtgactctcacagcttagctgttataggccactgggttcctttctctagactctgagaaaattccatgaacagagatgtttaggcttaattcttgctagacttaaaagggacaccacgaaattcagaaaatcacatctcaagacaacatcacttgtttagatgcaaattcaattattctttctaccaacaatagcagacttttaactctttcttacttctgttaaaaataaaaaaatctcattatcctccagggcaaaggatctcctggaaaaattttttaaaaagaaaaacatagaacagcacattgaaacacatgacagatgtttcacaagcttctatcttcaaargagcccggcattattctgcagaagatgaaaccaaggcacagaactgtaaagagacttgctcaaggccacacagttcacaggcccagctcttcacttctaggtctcttgcaccttccataacatcatagtatatctaaagtgaagaccac

SEQ ID NO: 620802 - DNA, 554 bp, Homo sapiens
tgaagaccacaattgggagctcaggaaaataggaccagataggaagagcagggctggaaactaggcagagaagttaagaatgaataaggcaggaatggaaggctatggaagatttatagggaaagggatgggggtcaggatagaatcagtgtttaaggataatttcccagagatcagctgcaggaggtttcttttccttaccacackggggaaggaagctgcttgttgcagaacatctcaggaggagtgtttccggagatctctcctcctgggctccttctctgtgaatcccttgctgatgagcagcacaggcaaacctgcagagagggtctgaagccacccagtcccttccttactcagggtggggtggagtggagctgtggaaagaccctctgtcctgctcagggacctcagctgctcctcagctttcacagtgataacccattctccctggcgccttggtgcagcagaggaggcaagcactatataaatgctaaacagatgaggccgtgcttgtcccaggaataaatacaccatccactcctgctgtcagt

SEQ ID NO: 620803 - DNA, 554 bp, Homo sapiens
tgaagaccacaattgggagctcaggaaaataggaccagataggaagagcagggctggaaactaggcagagaagttaagaatgaataaggcaggaatggaaggctatggaagatttatagggaaagggatgggggtcaggatagaatcagtgtttaaggataatttcccagagatcagctgcaggaggtttcttttccttaccacacgggggaaggaagctgcttgttgcagaacatctcaggaggagtgtttccggagatctctcctcctgggctccttctctgtgaatcccttgctgatgagcagcacaggcaaacctgcagagagggtctgaagccacccagtcccttccttactcagggtggggtggagtggagctgtggaaagaccctctgtcctgctcagggacctcagctgctcctcagctttcacagtgataacccattctccctggcgccttggtgcagcagaggaggcaagcactatataaatgctaaacagatgaggccgtgcttgtcccaggaataaatasaccatccactcctgctgtcagt

SEQ ID NO: 620804 - DNA, 552 bp, Homo sapiens
agatttctcccaaggtcacacagtggtttactggtagaacgaccacttcccagtctatcactctgccctctaggccgagtgaatgacaccattattgttttctattatagagttcatgaaagcaacactggacttatatatacatgcatcagaataaagggattttagggtttgaaaaaagccttataaatcaccaagcctggtctgctgggtgggtgatcaattgtccaggtttgcctggaackgaggggctgttcaacacacggaacaggagagccctgggccaacagattagttggtcaccaagcctacccccaaatgacacttaaatttattctccaaccttcagcatcctaacatgaatctctttagcactagagcatttatgacattctcatttagtaaattgcattgctggaactgtcacctataactataggtctttattctgccatgtgaggtcccactgaacaatatagagggtggctctgtagaaaactggccacagccattccaacatgggtcctctctgccgtattagaatctgaaaag

SEQ ID NO: 620805 - DNA, 533 bp, Homo sapiens
tgcaaccgagataacatttccagccacatatatctaatagggcaacaactcctcccagatgagaatggcttttttttagtactctgattggatgagtgactgctgcaacctcgccatttatttcctgggaaactatcttgacgggctattagttctgttcaaggaattggtaattaccttcatcccataggacaatggtcatttgggtgatttttcagsggatgaagacaaagagttgagtccacacacacacacacacacaaaattacacgaaggaaaaattttggttgggccttctcttcttccaatcttcagcttttcccttatccttctcactttttcagggagcagtgtttttcagctccccttcagcttcccaaagcttccccactttctcattgaattttctctcctaagtgttacatggtccgagtcactattaccacccaaaaaaattaattaaaatgaaaaaaaaaaaatctgttcgtgattctaagtattcaaaagaaagcaatttaattgtctgattaaag

SEQ ID NO: 620806 - DNA, 618 bp, Homo sapiens
tcttctggtgcctcagaaaagaagaggatcagagagaggagtcagggggtcagaaatagagtttgtggctgctgctttaagccagcatgtcaaagcaacatattttagggcattgttttctgagccccaacaatactatatatacacatatgtatatagcatgtatatgttttgccatatgttatattttgtgtgaaaatagaaaaaaattgcttgtttttgcatagaatatctgaaatgtacgtaagaaactggtaacattggttgtcttcaaggagagttgtgggatggttagcagaaagggttgggaaaaaaaattcattgtatacttttggattttgtgagggtaaagtttctaaagtcaaatgacacaatrgtcaatgtatattgtattttccttttggaaagatttttatgagtgttgtagcatatgtactcattaatttggggataaatatgtatggagtgctactctgtgccagacattattttgtgatagcttatgcatgtatggcacttttgttacagaccagaagaaaccagagggttcttatggcctgttgcacagaagaagccaatacactgagacagcaggtgttgcagtagggaaagagttta

SEQ ID NO: 620807 - DNA, 618 bp, Homo sapiens
tcttctggtgcctcagaaaagaagaggatcagagagaggagtcagggggtcagaaatagagtttgtggctgctgctttaagccagcatgtcaaagcaacatattttagggcattgttttctgagccccaacaatactatatatacacatatgtatatagcatgtatatgttttgccatatgttatattttgtgtgaaaatagaaaaaaattgcttgtttttgcatagaatatctgaaatgtacgtaagaaactggtaacattggttgtcttcaaggagagttgtgggatggttagcagaaagggttgggaaaaaaaattcattgtatacttttggattttgtgagggtaaagtttctaaagtcaaatgacacaatggtcaatgtatattgtattttccttttggaaagatttttatgagtgttgtagcatatgtactcattaatttggggataaatatgtatggagtgctactctgtgccagacmttattttgtgatagcttatgcatgtatggcacttttgttacagaccagaagaaaccagagggttcttatggcctgttgcacagaagaagccaatacactgagacagcaggtgttgcagtagggaaagagttta

SEQ ID NO: 620808 - DNA, 618 bp, Homo sapiens
tgatgagccagcatctgcctacataattgcatattttgcttggttagatttgagattcttgttgatatttggaacattcttctcttcctgctaatgttggtaattggagtgctagattttgacttccaaatctttcattcatttcttctttgtgacagggaaagccatagaggaaacaagtgaagagaaaatagttatttggggatgagagaaaatatagggtaaggaggggaaatagaagaatgtgagagtccttycaccaaaagaacttgggaaggttgagatcatctcaagatgattggcacccaattctattaacaaatatggaaagcatttttaactaattccaggtttcacatgttgtttgttgtgtgggacttactgtcgtcagaggttgattcactccttctctgcagtagatatgagagatgaggcaattttatttagaaaagccaatggaatttagctggtgtttactgtttcataaaggaataatggatgaattacctagctagaccctattgggtagaactgttagttaaaattgacaagcagtcctgtaatttacactgcaatttggaaatttaagctgggaggctcagagctctctattgtgca

SEQ ID NO: 620809 - DNA, 618 bp, Homo sapiens
tgatgagccagcatctgcctacataattgcatattttgcttggttagatttgagattcttgttgatatttggaacattcttctcttcctgctaatgttggtaattggagtgctagattttgacttccaaatctttcattcatttcttctttgtgacagggaaagccatagaggaaacaagtgaagagaaaatagttatttggggatgagagaaaatatagggtaaggaggggaaatagaagaatgtgagagtccttccaccaaaagaacttgggaaggttgagatcatctcaagatgattggcacccaattctattaacaaatatggaaagcatttttaactaattccaggtttcacatgttgtttgttgwgtgggacttactgtcgtcagaggttgattcactccttctctgcagtagatatgagagatgaggcaattttatttagaaaagccaatggaatttagctggtgtttactgtttcataaaggaataatggatgaattacctagctagaccctattgggtagaactgttagttaaaattgacaagcagtcctgtaatttacactgcaatttggaaatttaagctgggaggctcagagctctctattgtgca

SEQ ID NO: 620810 - DNA, 541 bp, Homo sapiens
tgagagtccttccaccaaaagaacttgggaaggttgagatcatctcaagatgattggcacccaattctattaacaaatatggaaagcatttttaactaattccaggtttcacatgttgtttgttgtgtgggacttactgtcgtcagaggttgattcactccttctctgcagtagatatgagagatgaggcaattttatttagaaaagccaatggaatttagctggtgtttactgtttcataaaggaataatggatgaattacctagctagaccctattgggtagaactgttagttaaaattgacaagcagtcctgtaatttacactgcaatttggaaatttaagctgggaggctcagagctctctattgtgcattgtaaagcttcttttgtacttctgactcattttgtgttgggaatcatttagccattggctttaactgctaatacagttccatcaaataccaaatataaatcaaagttactggatcattcraaatctgttgtcggagttgtttatatgtattttcttccaccactagt

SEQ ID NO: 620811 - DNA, 595 bp, Homo sapiens
tatctttgcaaatctgtgtgatattggaagacacaaagaaagcaacaaatcaaaaaattctatctcaagtcatcatggtcattaatcttacatgaacacactaaaataaaagatttgagaatragcatttatcaaatcatactttgccacgattagtgttacaatacaaatattacagtgatagatgagacactaactgaactctaatggtagcatccacaaggaccattagaattatataataaccagacatattttgttcagattccagaactcaggaacatcttttttaaaaggaagttttgaaaaccatgttgagtcttgtaaatttggatcgtcactgctgtatcctcccaggcatcaacaatcagccgctatcacaggatgttggcactccagggccccagatcaaatcagcaaagcagtttagaaatctaaggagagaaaagagtctttgcaattaagagtgttctacccatttacagaatcaaattttccaggaacacagcttagtataaaccacgtttcatgaacatttcaacataatataacgaacacaagtgtctcaatgaagcagatagcagagcaatttgta

SEQ ID NO: 620812 - DNA, 595 bp, Homo sapiens
tatctttgcaaatctgtgtgatattggaagacacaaagaaagcaacaaatcaaaaaattctatctcaagtcatcatggtcattaatcttacatgaacacactaaaataaaagatttgagaatgagcatttatcaaatcatactttgccacgattagtgttacaatacaaatattacagtgatagatgagacactaactgaactctaatggtagcatccacaaggaccattagaattatataataaccagacatattttgttcagattccagaactcaggaacatcttttttaaaaggargttttgaaaaccatgttgagtcttgtaaatttggatcgtcactgctgtatcctcccaggcatcaacaatcagccgctatcacaggatgttggcactccagggccccagatcaaatcagcaaagcagtttagaaatctaaggagagaaaagagtctttgcaattaagagtgttctacccatttacagaatcaaattttccaggaacacagcttagtataaaccacgtttcatgaacatttcaacataatataacgaacacaagtgtctcaatgaagcagatagcagagcaatttgta

SEQ ID NO: 620813 - DNA, 548 bp, Homo sapiens
gagaaaatatttgaaaactacccatctgacagaatatataaagagcacaaataactctctagggacaaatctaataatctgatttaaacatgggcaaaagatctgaataggcatttctcaaaagaagacataaaaatggcaaacaggtatatgaaaaggtcctcaatatcactgattgtcagagaaatacaaatcaaaactacaatgagatatcacctcaccccagataaaatggtttttatccaaaagtcagtcaggctataacaaatgctggcaaggatgtgaagcaaagagaacccttgtacactgtgggttagaatgtaaattagtagaatcactatggacaacagtttgacagttcctcaaaaaattaaaaatagagttaccatacaatcctgcaatcccactcctaggtaygtacacaaaagaaaggaaattagtgtattgaaaaggtgcctgcactacaatgtttgctacagctctgctcacaatagttacacaatggaagcaacacaagtgtccaacaacagatgaatggataaagaaaa

SEQ ID NO: 620814 - DNA, 435 bp, Homo sapiens
gcattgtgacaactttgccaggaaggtgttcattttcaggtgaggacaccacggttcgggaagggaagtgactggcctaagattgcacatctgaaaggtgccagagccaggatttgaatctgagatgtttggacccagtgcttggactgggtctgttggttcagctgcctctgtctccttttcttgagaaggatattgctcaactgttgtattctatcttgtctctcaagataaataatattttaatagaatattttaaaaaatsaaaatcaatacagaaattcataagtaaaatattaaaaatttaagacaggatcagcatagtaattttttccttctgcctcaggctctaacatggcactgctctatcgacttattcttgggatccttacctccatgcatcttcccccaatgtatggtggtgctcccaaagcc

SEQ ID NO: 620815 - DNA, 497 bp, Homo sapiens
tatatgggtatggtttgtggtgacccacaacaatcccaatagtaacatcaaaggatcactgatcacagggagattgagtgacttctgtcctggtgaggtaacmacagaaagaatcccctccaccaagaaggctgcccttcccaaatcctcctcaaattggcctgcgtggtagtctcccaagatatttcttttcctccttagtgatatacaacttttgttcattttggtcataggagaaattccaagaaataagagaggtaagttgaagtgactgacaaaggatggaatgccacagctgttgaggttgagaggtaggctcagcagtccacccttgtgtgatcttgagcaagctcagtgacctcagagcctatgtttctcactggttaaatgaatataacacaggtggctggggaaaattgtggacaggtgacaggactaacgtgcagctcccacttggatggacagaacagtgtgtggagactcacactgtgaagttt

SEQ ID NO: 620816 - DNA, 518 bp, Homo sapiens
gaccacagtttgaaccatttgctggtagtgttactctaagcaagtcagttatcccaggagctccatttctgcaaatgagaataatgatacctgtaacatatggctattatgaatcttattaacaacatatataaaggttctaataatgtacttggaacatagtaggaccaagtaatctagtctgayttctataatatatcatttggcacctaatctacctatcagtggaaagatggacttctggtggaaccatctaaatttagcatctgtaaatgtactttatcagctctgccttccttcctcttttcatttctaagttctgtgaaaagtcaacaatctgtaaaaatggttgtacgtgtgttttagaactactgtgactgcaaaacaatatatatacacaaatatgttacctctgctgatagggaaaacaaggaaagaggaaaatcttcattttctcctcagtttgtggttagggcaagttccacgcttggtttttttggggtgttcttggccacctc

SEQ ID NO: 620817 - DNA, 534 bp, Homo sapiens
actatctttctagctgtttccaaggttatcttctattatcacttctctcaaaggcctttggggttggttggaaaaggaattaattaaagccacatcccctccttctctcctctcaggccttgggcctagatctgtccttttcatgttaatacttaatccttgtaccttctcctcayccctactaccttgagaatgggaggaaagaaagagaaacctcatagtgttgttgctgctgctattggttctgacaggttaagtaggctgaagtttaaaactcattctttaaaatattctaaaccttagaccaaattgcctttcaaagtctgatcttgttagaatgttagaattctatgtcctaaatattcacatatactctatgacttgcttttcttgtctttaagatatgtttaataaatcatgtttgcctaagtgctaggtgtcacacatctgacaccatttcttagggagttgctgtatagagactctggatctctgacttttatggaagtgctaaggatcaagtgaaaacaacaa

SEQ ID NO: 620818 - DNA, 530 bp, Homo sapiens
tgggacagggtagggaagtaacatttaataaatgttatgttgtgtcatctgtgtataaatcagtacataaaaatgcttgataataaagaatatatgagcacctctatagcatgacactactgcaggtcagtagacttaggaagacagttacagtcataagaaaattatagatattcagttttctcccttggacaaatactttgaccacttataaatcttaactatcttagtggataaataccgtattcactttcaaatgcatatttcagcccccttctcagagccttcttggagtcggctaacttaggaatgtaagtctttcctctctctccactaatgaatatgagatctgtccctttcctgtattccattagacccttactctcagatgggggagaactagtagatcttagttggtatttgtgtacaactgaaaaacagtgatttcgaggtgttaagggatgagagtggctgggctatgaactagtgaayagcctcatccttctctgtgatgtagtttttgaaatgat

SEQ ID NO: 620819 - DNA, 526 bp, Homo sapiens
tagcattaggagatatacctaatgtaaatgaagagttaatgggtgcagcacaccaacatggcacatgtatacatatgtaacaagcctgcacgttgtgcacatgtaccctagaacttaaagtacagtaataataaaaaaaagatctcatttaacaaaggcagtatttggatatcaaaaaaaaaaaaagttgtgctttggaattggaagagtcctttcacttgagcagtcttttctaagttgtgaaacattttcttttatgactaagccaytcactaatcccctcaattccctaaacctaggaacatgtccacattttccacagggcttgaatggcaatctccctccactgacaagaaaagattctcctatgagactttgtaactggtcacacgaaaacaatcgtccttcaaaacaaagaaatcaagacaaatgtctttttttaattttttaattatacattgacaaattatggtcatatatattgagtacaaagtgatgttatgatttatgaatataatctggaaaa

SEQ ID NO: 620820 - DNA, 575 bp, Homo sapiens
tggttgccaggggttggggggatggaaggataagtaagtggaacacagagaatttttagggcagtgaaactcctctgtgtgatattatagtgatgggtacatgtcattattcatttgtcaagatccatacagtggacaacccaagagtgaaccctaaactatggactttgggtggtaacgacgtgtccatgtacgttcatcagctgtcacaaatgcaccactgtagcgtgggagccagagaggcaatgagaactttgtacyttctgctcaattttgctgtgaatctaaaattgctctaaaaaattaagtctattcaaaaagaggagagtaaggaagaatgattaaaatatgttctttttttaccaactgcttattttcagcaagcattgtttacatatttatggaatccatgcttttccctttgacttgtaatatttttaactctgctgagataagggggtttccataactggaaatacaacactgcagttgcaaagacagaaaaacagtcctgatttaaccatggggcatgttttccaccatgaatacgaatccagaaactcaagcctccatag

SEQ ID NO: 620821 - DNA, 486 bp, Homo sapiens
caaggcaaggggccatctgggcctcaggccaagggatgaggatgaaaacacacacacagatgccacacctgtcagatgcacacggaacttcagtgagtgaactgagcccctgaccacattcaaaaccaccaagatctgtgatcagcatcatataatcaatttctatttgttcctgcaatacacaagaaatgtctagaagatgatcaccacatttggaggctgtatttgcatgctctgacttaaaacgttgctatgtgagatagaaaaacattactggcaatgggggagaggataccattcaaagaaataggcagtgtccttcagggcagyggaaagggctgtggaggccccaggaccacatcagaagactgatcaagtgggaagagacattgggccccactctatctagtttacagtcctttaggacaaacttggggtcacctatttgggggtacctctgttcagcagcctatcctgtccttatcc

SEQ ID NO: 620822 - DNA, 530 bp, Homo sapiens
aatattacactgtaactttcccctttcaatcaataatattatgaatatttttctaactttgttcaatattctaattaaagtcatgtagtattccaaataaaaggatacataatttatttaatcaaacctatttttgggggcttttacagacaccagaaggaagacccttaggaaaacccacctttcttggaactccacttccctctcctcagtgtgtgagcagggctggttttgtaccatgcaaccctgattcccttggaacaggccagggccaattaagggactttgcttaggaacctgaaactgtgactcagagacaggccagacaatctctgcgcagcagggattgaaagagaaaaagagagagaatcctattcttttgaaacgagattttgagggakagactcaaagttcctggcttctctacagacatccacttcctgtccttgcctgaggccaggctgtgcccttgcaggaaattcactccttttgcctaagttagcttaaataggtttcttgccacccaaaga

SEQ ID NO: 620823 - DNA, 640 bp, Homo sapiens
aagtcttcatgggctgttgcatagtcctacaaaaaggagagtggggggaaaaataaaatagtattcattagatatgtgaacatttcctaatttttggctggtagagaaaaaaaatctcaattcatcctctgccctttttggctttaaaggaaacatttcatgacactatatattggttaagtgcttatactactcattcaaacagttgggagttttttaagaaaagcgattgtgagaaaaacaaaggtttaatttaagcactctgtctcaactacaaaaaaatttatctcaaatagtattatggtaataatctgttagagaaatttctggtactagcattttatcatactggatattyccagaataattatgccacagattaacattaaaatgtgttatgctgagactcttttaatatattttctttggcacagaaaattgttatttaaagtactataagccacagaaataattgtggcaatcataaatgccactctgatgataaaagacaaccttgtcaggcttgggtcacttacatagagaagctacagtctggaaagccatgctagttcagggtgtgtttcttgggctgtgaaacccaaagaaattcaaattgtaccgctaagtttaataatcacat

SEQ ID NO: 620824 - DNA, 643 bp, Homo sapiens
tacgctcccatccttcagcccaatttggtttttctctgtagcacttaacatctacaatcaatctatatttttagcctggtttttacctttttaacctttattttacttttaaaaaattttccatctccccacactttgcagtccccccactccttgcggacaggaacaagatgatttaatgaataagtgaatgatttaatgaatgagtgaatggatgatgccctcactcttgccctcctgtgcatcgtgtctctcmgctttgctgcaggatggcatttaaggacttcaaggcccactttgataaagtggagatctgcaacctcactcccgatgccctggaggaagacgcgatccacaaatgggaggtgacggtccatcagggaagctgggttcgcggctccacggctgggggctgccgcaatttcctgggtaggtaggctgcctgtcactctctctgccactcccaagtgtcccttccaactcaggacaccaaaggataagggccgggtcctcagagaaagcctgaaacatagtaaggtttcaaaagtgactggggaaaaaaggctgcaaagatttagttggataagaattgtttggggaaacctcctttgttttaccacttaggttattttccattacaagt

SEQ ID NO: 620825 - DNA, 643 bp, Homo sapiens
tacgctcccatccttcagcccaatttggtttttctctgtagcacttaacatctacaatcaatctatatttttagcctggtttttacctttttaacctttattttacttttaaaaaattttccatctccccacactttgcagtccccccactccttgcggacaggaacaagatgatttaatgaataagtgaatgatttaatgaatgagtgaatggatgatgccctcactcttgccctcctgtgcatcgtgtctctccgctttgctgcaggatggcatttmaggacttcaaggcccactttgataaagtggagatctgcaacctcactcccgatgccctggaggaagacgcgatccacaaatgggaggtgacggtccatcagggaagctgggttcgcggctccacggctgggggctgccgcaatttcctgggtaggtaggctgcctgtcactctctctgccactcccaagtgtcccttccaactcaggacaccaaaggataagggccgggtcctcagagaaagcctgaaacatagtaaggtttcaaaagtgactggggaaaaaaggctgcaaagatttagttggataagaattgtttggggaaacctcctttgttttaccacttaggttattttccattacaagt

SEQ ID NO: 620826 - DNA, 570 bp, Homo sapiens
tttcatctttcgtttagtgagagagaattagattggtggcatgcattgaaaagactctcaattatgaagtctagtggggtttcccaagctgattacaaaaggcatggttctttctcttggctaaatagatgcagaaaagtctttaatttttaaacactctaccagagaatttttctccagccttctcccagatactagtacaagatggggatgaatatcctagtatctgttcacacaaaagtaccctgtatgagatccatgcagattgacatctcttatgggtggcaagaacaagagagacccaagttatgccaatgccatgcctcttgttctctatcttattagtggggtgagctcagagtcactgacatgcataaggtgacttgtacatggcaaaaaactccatactcaatcttgctctgaacaagattctttaatctgctatgatattgagtataagaatcagctctgtagcttggtaacaaaaattcacactgagctgtgttygcattggtttagctctcagacagactcctgattaaacaaacagaagttctgaaagggttatgt

SEQ ID NO: 620827 - DNA, 492 bp, Homo sapiens
ctcttggagccataaatacaatgagctgatgaactaattcatgtcaaggtgctaatgactctattagcttcatgtgtttccccaaactggggttcctgaattatgaaaggggtcacctggaggggtgatatctaaacctaggggctgtctgatggtagtatattaggcactgcaataaacaggcaagrcagggagattaggggaccacaggatcggatggagaaaatgggggctcatgtgactgcttaaagcacagcaggaaggtggctgagcgcagccctgggcgggacagagcatggtgaggggggaaggcagtggtgacctccctgctccaggtgctatctggagcatgctgggtcagacccagcaagacaggctcagaggagttaaagaggttcatgcgggtgcgcagaagttgtcagatggagatccagagtttggaagggaagcggtgaatgttgcaggagtttcagtcgacctttattaacaacc

SEQ ID NO: 620828 - DNA, 494 bp, Homo sapiens
ctcttggagccataaatacaatgagctgatgaactaattcatgtcaaggtgctaatgactctattagcttcatgtgtttccccaaactggggttcctgaattatgaaaggggtcacctggaggggtgatatctaaacctaggggctgtctgatggtagtatattaggcactgcaataaacaggcaaggcagggagattaggggaccacaggatcggatggagaaaatgggggctcatgtgactgcttaaagcacagcaggaaggtggctgagcgyagccctgggcgggacagagcatggtgaggggggaaggcagtggtgacctccctgctccaggtgctatctggagcatgctgggtcagacccagcaagacaggctcagaggagttaaagaggttcatgcgggtgcgcagaagttgtcagatggagatccagagtttggaagggaagcggtgaatgttgcaggagtttcagtcgacctttattaacaaccaa

SEQ ID NO: 620829 - DNA, 599 bp, Homo sapiens
gaaaaggacatcaaattcaagaagctaagcctgatctcctgtaaaaacatcatttccctgatggacgtatccttccaaatatttgagcagaaatagacatggatcctgggctttaagcacagtagagtaatcttcaatagtgcagactctccaagaacatgacatccttagccagcagaatagtcttcttcacagaaaataacccaaagctgggggacccccatgctgaaattggatcagaatcaagatgcacaagactgccyagtggtgggggtggggagcttttgaagggacttgggggtcttcttgccactttgggatcccatccaagggaacagagttctgtttttgtgaactttccgggaccacccccattccacttctgccgtttcccctcttcagagatttgtggtttaatcattaaaaccacttccccagggccccaaacctgtgcacccaggccagcccatcggccctccccctctgcagtcccagagctgaggtcccacgaggagcctcaggttgaaacactgctcatgtctcccttaacccacatggcacagaccagcggcaatgggaagctggagtttgatgaattc

SEQ ID NO: 620830 - DNA, 629 bp, Homo sapiens
agctattcacccagggaagagagaacttgaggctgcasggaggccagaatatcctctctagtatgtctccatgtgggaagagagtgtgttagtccttctaccactgagccaagacaaaaccttccttcccttgcacaatggcactgggccaagtaatggtgacaattgctgaggacagtggttacacaaagacttttggaatctgagaaagcaaagatgcaatttgtgccatgactataggttgtctagaggtaacatgtaatgtgtttttagtaaaaagttatttcccatagaaaagtatatatgcatgcaattaattgtaatgatgaaattcttgatacaactcttataggaaagaccagaggtaatgcaaattttatacttacacgctgcacagaataaatctttctaaagaatatgtaattcagattaatgagtagtcaatcaccttagccattttttctaactataaagttttttttctctaaattaacttctgcatttttccacaaaaatcagaaggttcttttggaactgtacaacacaaagagtgaactcaaatgtaaatgatggatttcagttgatagtaatgtgtcaatattggttcatcaattgcaataaatatacca

SEQ ID NO: 620831 - DNA, 558 bp, Homo sapiens
atgagtcaccagtcaggagatgtgtttcagggtagatggcagtttgctgagcaaagaaccaggaggctatggggagaaaggacatgttgtaaccctagtgcctggagggcactaaacctctatccctgcttctgattcgcatttgctacatgagacagacactgatacaacaaaactgtaagcaactctccaagctataggatgcagctgtcaccgagtttcaggggaaggaaagggcaccagagtttgctttcrggctgctttgataatgagttccctgataatgacaaacaacacaggttaggtttctgctctgtgccagtctctgttgactgtgcttggcagtgttattccttttgtcctcataccaaccgtatgacataaaactattgttttactcatattacagatgaggaacttgggaaagagaaaagttaagtaacatgtcttatgtgacttactaataagaaggcacttagaaacggaaactctttcctgggggtaattgaagcaatttgtaattgtgcccctgacgggacataaccaatgggtagggga

SEQ ID NO: 620832 - DNA, 463 bp, Homo sapiens
aaggagtcattggaaggaatagcctggtaaagattcaaaacccatcggctatttggaagaaaagttgctgcataaataagctgcttgacccaaggcccattttgtacgcttctttgaggtcaatcttgtttattttcctggctcacaatccccaaaggttggggtgggccaaaaggcaaacctgccctttgcaggggcctctcctgtcaaattaatctgatgacttgatggagcagtgggtggaagagaacatggccccrtaaggttagcggtggaatccctgctggagagaaatgacgctggcccaggggggatgtgccttgtgcccagcctggacaggccagttcacttctcggggcataggctctcccttcctcctcatgagaataagaacaccaactctactccctgacagtctcctaacttggtctcctgagaactcagtgaggctggcagggaaggg

SEQ ID NO: 620833 - DNA, 601 bp, Homo sapiens
ccagtctgggcaacagagcgagactctgtctcaaaaaaaaaagaaaattagccagaggtggtggtgcaygactgtggtcccattgaacctgggaggcagaggttgcagtgagccgagatcgcaccactgcactccagtctgggtgacagagtgagactctgtctcaaaaataaataaataaataaagataaaaataaaaataagtaaactgttcaggatctcagaagaaaagacacggttccaagacactgggacagactctgccttctcactcctttctcctctaccctgtatcctctatgtttggttcaggaacaggagagtcaatgtttttttaatatctccttattcgtgtaaggtcttcctgaatggtgatacaaacttcagttgtaaaacggcaatgggataggaaaaatgtggctattttttcaactctggcaggatgctagccaaggagtgtgtcactgatagttgcataccctgtcgggaaattcaggggcctgggagatccatgttatgatatattgcctctgctcctgatctgtgtggccaactcatttctcattagatctctagatccttgctcaaacaaattgaacag

SEQ ID NO: 620834 - DNA, 582 bp, Homo sapiens
caatttacttaaccttcctgcgtctcaatgtacatttgtgttgagttgggcgatagcagcaacctcactgagtggttcacgttttatagataaaaggatatctcctaattccactgagataaaattcaaaattaccatgacagattgcagaagaagcttaagaacaacatgtcattcaaactgtggtgaggtcctttaggcagaagagttcaaaatcaataaaacaaagaacaatgatatagacataagagtcacactgaaccgtgagatgaacatggaggctgtaacgtagcttagaaacaagtctgatcttgygcacatgcaacagaaatgcaacacttgagaaccataaaataattatttgcactggaaagtaagacacatttttttttaaaaaaaatggcaaaaggaagctaggtgtggtggctcacatctgtaaccccagcactttgagaggccaaggtgggcgaatcacctgagttcaggagttgaggactagcttggccaacatggtgaaacccatctctactaaaaaatgcaaaaattagccgggcgtggttgtgcgcgcctgtaatcccagct

SEQ ID NO: 620835 - DNA, 582 bp, Homo sapiens
caatttacttaaccttcctgcgtctcaatgtacatttgtgttgagttgggcgatagcagcaacctcactgagtggttcacgttttatagataaaaggatatctcctaattccactgagataaaattcaaaattaccatgacagattgcagaagaagcttaagaacaacatgtcattcaaactgtggtgaggtcctttaggcagaagagttcaaaatcaataaaacaaagaacaatgatatagacataagagtcacactgaaccgtgagatgaacatggaggctgtaacgtagcttagaaacaagtctgatcttgcgcacatgcaacagaaatgcaacacttgagaaccataaaataattatttgcactggaaagtaagacacattttttttwaaaaaaaatggcaaaaggaagctaggtgtggtggctcacatctgtaaccccagcactttgagaggccaaggtgggcgaatcacctgagttcaggagttgaggactagcttggccaacatggtgaaacccatctctactaaaaaatgcaaaaattagccgggcgtggttgtgcgcgcctgtaatcccagct

SEQ ID NO: 620836 - DNA, 420 bp, Homo sapiens
aatcttcatagcattactgggatatgaaatcgtcttatgtacttgttaatatctttcaataaaaaaaaattgttgggtaccytttatatgccagacactattctaggtgaggacacagagcccaaccatggatgagcttgagacaaactaagataattcttttttttttctcactctgttgcccaggctggagtgcagtggcacaatcttggctcactgcaacctctgcctcctggattcaagtgattctcctgcctcagaccctgagtatctgggattacaggtgtgtgccatcatgcttggctaatttttttgtattttcagtagagacagagttttgctatgttggccaggctggtcttgaactcctggcctcaagtgattcacctgcctcagcctcctgaagtgctgggattacag

SEQ ID NO: 620837 - DNA, 420 bp, Homo sapiens
aatcttcatagcattactgggatatgaaatcgtcttatgtacttgttaatatctttcaataaaaaaaaattgttgggtaccctttatatgccagacactattctaggtgaggacacagagcccaaccatggatgagcttgagacaaactaagataattcttttttttttctcactctgttgcccaggctggagtgcagtggcacaatcttggctcactgcaacctctgcctcctggattcaagtgattctcctgcctcagaccctgagtakctgggattacaggtgtgtgccatcatgcttggctaatttttttgtattttcagtagagacagagttttgctatgttggccaggctggtcttgaactcctggcctcaagtgattcacctgcctcagcctcctgaagtgctgggattacag

SEQ ID NO: 620838 - DNA, 602 bp, Homo sapiens
ttgttactcggggctgtgatctgattgactcctccctcatagaatgtgcccatatgactataaaacaataaggaatatcatttcaggttttccaggcagctaaaaagcctgaattgttcttgttatgtatgtgaaaaatggccatctacttataacaaaagacttgataacaattcaggttagaaggtcctaggagatatcccttcatttttgataaactacaatgctgtatttaagatataataacctagyggataaatgtgcttttcatcaaactgtagcttatagcctcctttatcatttaagttacttgaaatagcaaaggaacatgcctaagaaatgaagtatatcatagtcctacttgagtggtttagcaatttataagacaggctcaggaaacagactacttccagagtctatctgttttggcttgcccaatagcacatgtaatcacatctgaaagtgttttcccatggtaccactatcattttatttttggttatttttatggaaacctgggatgacttcattttttcaaaggtaactttttttttttgaagttttaaagcatcaattttgaatattctaaatttagtaattgg

SEQ ID NO: 620839 - DNA, 573 bp, Homo sapiens
ttcagtttgcatattgttttgagatgttataatcawttactttccattactattattttcataataataactgttattattattattagggagtgatgattaggcagatgaaatgactattaactttctttcccagcaaaacttcatttcattcccacttgcttatgaatggaaaagatcatatggacttgggcatcaggtagacctggtttgaatgctagttattcctctcaattactagttgtgtggcctagggccagccacttaaacatgccttgtttctatatattcaaaacatggattatgaggcctctcctacagtgttgtgaggattagagctgaatgtcaagcatctagagctgcatacagcacatagtagatgttcagtaataaattctgtttttctacctcatggttactgcaaggtttgaaatgcttactattgggaagttattcaatttaaaatttaatcgtgtaattgtttgaactctttaaggaaagaaaaatatttcagagctctaataatgaaccatttcgtttcatgataatgttcccttctcttctcccttagca

SEQ ID NO: 620840 - DNA, 458 bp, Homo sapiens
ctggtctcaaactcctggccttgagtgatcctcccaccttggcctccataaagtgctgggattgcagacatgagccaccataccggccctttcattatattttctgtgattccactcaaccactagagtacrcaagtccgtgggactgacagagaagcgagtggtggggtggggaaagagagagagagacagactttatttctccttcatttctttaaacaatatctttggaaagtgtaaaataatgaagcaggtgttcaaatttgcaagttccattattccttaaaagctaggtttgtgatgatgagatatgctgatatatacagtggtgaacttggagtatgaacccaagttgcactatatttctatcactttcattgattactaacacttaagcaatttatgtcaagtgttttattctttaagactttagatataattcaagctacagccaaggg

SEQ ID NO: 620841 - DNA, 624 bp, Homo sapiens
actttaaacagagattgtaaatatgctcaaggatttaaaagagaacataaaaataataaagagagaaataaaggatatataaatgaaacaaactgagcttttagagattaaaaaacacaatctcccaaatgagaaatttactatatgggacttaattctgcagaagaaggccaggcacagtggctcacacttataatcccagcactttgggaggccaaggcaggtgggtcacttgaggtcaggagtttgagaccagyctggtcaacatagtgaaaccccgtctttactaaagatacaaaaattgactgggtatgctggcactcgcctgtggtcccagctacttgggagactgaggtggcagaattgcttgagcctgggaggtggaggaggttgcagtgagctgagattgcaccactgcactccagcctgggcaacagagaaagattctgtctcaaaaagaaaaaaaaaatctgcagaagatcgttaacttgtagttatatcaatagacatatttattgaaactaaagcaaagaagaagagaaaagttatgaaaaaatgaacagagtttcagtgactataggataagatgaattaacttctgagtaattagactaccaaaaaaga

SEQ ID NO: 620842 - DNA, 624 bp, Homo sapiens
actttaaacagagattgtaaatatgctcaaggatttaaaagagaacataaaaataataaagagagaaataaaggatatataaatgaaacaaactgagcttttagagattaaaaaacacaatctcccaaatgagaaatttactatatgggacttaattctgcagaagaaggccaggcacagtggctcacacttataatcccagcactttgggaggccaaggcaggtgggtcacttgaggtcaggagtttgagaccagcctggtcaacatagtgaaaccccgtctytactaaagatacaaaaattgactgggtatgctggcactcgcctgtggtcccagctacttgggagactgaggtggcagaattgcttgagcctgggaggtggaggaggttgcagtgagctgagattgcaccactgcactccagcctgggcaacagagaaagattctgtctcaaaaagaaaaaaaaaatctgcagaagatcgttaacttgtagttatatcaatagacatatttattgaaactaaagcaaagaagaagagaaaagttatgaaaaaatgaacagagtttcagtgactataggataagatgaattaacttctgagtaattagactaccaaaaaaga

SEQ ID NO: 620843 - DNA, 591 bp, Homo sapiens
ggtttttatggcttttactgccacagcaagaccaatggaaagaatgttttacatattcacttgttcattcttttttgcaacaaatatttattgaatgactattattcttttgacaatgtgagactggggctaggtcagcctattctctttgaaaagagtgagagggagtgctggcttccttaagccagctttaagctctttttctttaaagcccattaagttaggacctccaccttctgaagcyttccaaaaacaagacaaaaaaaacaatgaaaaagcatattatcagcagctctgcctctgtagttcctgccccttggctcttcctggtccacctagggccacggagactgaaagattctccagcctcctgggagcaggtaacccagttcttggctctgtatatgaatattggaatacatttctcaatgagaataacagaactatgctttaaaagttaaaaaagaaaagaaagggagcaagcatgtgggtgaggtttaagggacacccatgacacccacgctagtaagtgcctgaactggatcaagtcttgtggatgcaaatctggcgaggtttttcactttgtcagtg

SEQ ID NO: 620844 - DNA, 591 bp, Homo sapiens
ggtttttatggcttttactgccacagcaagaccaatggaaagaatgttttacatattcacttgttcattcttttttgcaacaaatatttattgaatgactattattcttttgacaatgtgagactggggctaggtcagcctattctctttgaaaagagtgagagggagtgctggcttccttaagccagctttaagctctttttctttaaagcccattaagttaggacctccaccttctgaagctttccaaaaacaagacaaaaaaaacaatgaaaaagcatattatcagcagctctgcctctgtagttcctgccccttggcycttcctggtccacctagggccacggagactgaaagattctccagcctcctgggagcaggtaacccagttcttggctctgtatatgaatattggaatacatttctcaatgagaataacagaactatgctttaaaagttaaaaaagaaaagaaagggagcaagcatgtgggtgaggtttaagggacacccatgacacccacgctagtaagtgcctgaactggatcaagtcttgtggatgcaaatctggcgaggtttttcactttgtcagtg

SEQ ID NO: 620845 - DNA, 603 bp, Homo sapiens
  misc_feature 413: n = A,T,C or G
ctaacaaaactcactcaagaggaggctccttgccagctgactataacatctgactgacagtatgtactatatcacactttggttaaggaagagccctccaggccccactagaaaggaggtaaagaaggaggaggaggagaagagacctgattagaaggtaggtaagcaggttgcatgtaataggcccattctaacttccccatttttcctggaacattggatagagaaattccagaatttgagcctccttgactccaggtgaccattgagtccaggcttcactcagccaacctagtagactcaagccaacacattacattccaaatcctgagtgtttatacctacctcaataaatacagcccaatcactgcttccatttgatttttactagtctaacacccttagawggcatnccataatactccccaggctccagcagatgtacactggcaagatcctgtaattctcttggtagatagactatctactccaaaaccaggatttgtgtctctccatctgggctgtgttgggatctaatcttattatgggcctggcggcagatgaggtggtaggggcttacagctcatgggaatgtgcacctgt

SEQ ID NO: 620846 - DNA, 603 bp, Homo sapiens
  misc_feature 413: n = A,T,C or G
ctaacaaaactcactcaagaggaggctccttgccagctgactataacatctgactgacagtatgtactatatcacactttggttaaggaagagccctccaggccccactagaaaggaggtaaagaaggaggaggaggagaagagacctgattagaaggtaggtaagcaggttgcatgtaataggcccattctaacttccccatttttcctggaacattggatagagaaattccagaatttgagcctccttgactccaggtgaccattgagtccaggcttcactcagccaacctagtagactcaagccaacacattacattccaaatcctgagtgtttatacctacctcaataaatacagcccaatcactgcttccatttgatttttactagtctaacacccttagatggcatnccataatactccccaggctccagcagatgtacactggcaagatcctgtaattctcttggtagatagactatctmctccaaaaccaggatttgtgtctctccatctgggctgtgttgggatctaatcttattatgggcctggcggcagatgaggtggtaggggcttacagctcatgggaatgtgcacctgt

SEQ ID NO: 620847 - DNA, 371 bp, Homo sapiens
gttttatttttatatccctaggataaaacaaacatgtgctcaataaatgcttacagaggaaggactaaaaattgctgtctgaatcaatgacyagtattcttactactcagagaggtggtacaacaccccatgggcaggcctggctttgcacagtgtgcagggctgtgacaggggctgtgcaagctaaaatccagcaagaccatctaataatcaatgggaaaattacatttgttctgtgatatccaaaaacgtttgttgaaacattaaaaactcacttattgttggttacgaatgaataacaattttttaaagtacaactaatatttaatatacaatttaaaacatcagagattcaacttcttcctggttta

SEQ ID NO: 620848 - DNA, 371 bp, Homo sapiens
gttttatttttatatccctaggataaaacaaacatgtgctcaataaatgcttacagaggaaggactaaaaattgctgtctgaatcaatgactagtattcttactactcagagaggtggtacaacaccccatgggcaggcctggctttgcacagtgtgcagggctrtgacaggggctgtgcaagctaaaatccagcaagaccatctaataatcaatgggaaaattacatttgttctgtgatatccaaaaacgtttgttgaaacattaaaaactcacttattgttggttacgaatgaataacaattttttaaagtacaactaatatttaatatacaatttaaaacatcagagattcaacttcttcctggttta

SEQ ID NO: 620849 - DNA, 579 bp, Homo sapiens
ataaaatttgattgaaagtgttggtagttctcaatttctcatttttggattattaggggtttggagagttttcagtcataactcgcttaattgcagttcgctttattgtgccttgtagatactgcatttcacagataatactttttttaaaaaaagcaaaatgaaggtttgtggtaaycctgtattaagcaagtgtctcagcatcatttttccaacagcatgtgctcacttcatgtctctgcgtcacattttggtatttcttgcaatatttcatactttttaattattatatttttaagttcatttgtgtttcatattgggaaggcaaatacagatgagagagatccctgccaaaatagtaaaaagttatatattttttgagttttgaagtgtaaatctgctttgtttggaggtttcctctaggcagaacccctccttgccgatggcatctagtaaatgaggccttggtgcattatgctgtacttctgaaaacatagatctcaaaatctgtactgttagaaacgttttcgctcctcctcaccctaacgaatctgttattccaagaaatagaaatctttt

SEQ ID NO: 620850 - DNA, 579 bp, Homo sapiens
ataaaatttgattgaaagtgttggtagttctcaatttctcatttttggattattaggggtttggagagttttcagtcataactcgcttaattgcagttcgctttattgtgccttgtagatactgcatttcacagataatactttttttaaaaaaagcaaaatgaaggtttgtggtaaccctgtattaagcaagtgtctcagcatcatttttccaacagcatgtgctcacttcatgtctctgcgtcacattttggtatttcttgcaatatttcatactttttaattattatatytttaagttcatttgtgtttcatattgggaaggcaaatacagatgagagagatccctgccaaaatagtaaaaagttatatattttttgagttttgaagtgtaaatctgctttgtttggaggtttcctctaggcagaacccctccttgccgatggcatctagtaaatgaggccttggtgcattatgctgtacttctgaaaacatagatctcaaaatctgtactgttagaaacgttttcgctcctcctcaccctaacgaatctgttattccaagaaatagaaatctttt

SEQ ID NO: 620851 - DNA, 370 bp, Homo sapiens
tcccattctgtgcatacacaactgaacttgtttccaaagggttttatggaagtcatatgattaaatacccactgcaactacacatctacagttgtgaagatacaaaaatgcactgaactcacagatgccaaaacaagagcactgaaaaaatagaggaattatccaatatgccatagctaatggcaacatttataccataacttagtcctctgatagcccaactttcttcccactaaggagctctgcctcccagcaaggaccaatgtttctrcttgcattgggtccttagtctttattttctcatccataaactgaagctgcaccttatccttgaaaattgtacaaggatccatactgtgaacgtgtgcat

SEQ ID NO: 620852 - DNA, 585 bp, Homo sapiens
atcactgatgaatgtggctatgcgaaacaacacattttcagtgtaggtgaaccaggcttcttttggaagaagatgtcatccaggactttcacagttagagagaagaagtcaacatctgcttcaaagcttcaaaagacaggctgactctcctgttagaggccaatgtatccagtgactttcagttgaagccagtgattatttactattctgaaaatcctagaatgcttaaaaattatattaaaactactctgtctgtgctttataaatggaaaaacaaagccaggtgacagcatatctgtttacagcatggtttacagaatattttaatcccgcttttgagagtaactgctcagaaaaaaatatttctttcaaaatattaacactcrttaataaggcacctaatcacccaagagttctgatggagatatacaagaatatgaatgttgtttctacacctgctaaaacaacatccattctgcagtccatgtatcaagtagtaatctcaactttcaagtcctacaatctcagaaacacattttataaaggctatagctgccacagacagtaattcttctaatggattcg

SEQ ID NO: 620853 - DNA, 620 bp, Homo sapiens
tactattctgaaaatcctagaatgcttaaaaattatattaaaactactctgtctgtgctttataaatggaaaaacaaagccaggtgacagcatatctgtttacagcatggtttacagaatattttaatcccgcttttgagagtaactgctcagaaaaaaatatttctttcaaaatattaacactcattaataaggcacctaatcacccaagagttctgatggagatatacaagaatatgaatgttgtttctacacctgctaaaacaacatccattctgcagtccatgtatcaagtagtaatctcaactttcaagtcctrcaatctcagaaacacattttataaaggctatagctgccacagacagtaattcttctaatggattcggtcaggcaaagtgaattgaaatcctggaaaggattcactgttctgaatgccattaaaaacagctgtgattcatgggaggaggtcagaatatcaacattaacaggaatttggaagaagctgattccagccactatggatgactttgaagggttcaagacttcagtagaaaaaggaactgcagatgtgatggaaatagcaagagaactagaattataagtggagcctgaaaacgtca

SEQ ID NO: 620854 - DNA, 620 bp, Homo sapiens
tactattctgaaaatcctagaatgcttaaaaattatattaaaactactctgtctgtgctttataaatggaaaaacaaagccaggtgacagcatatctgtttacagcatggtttacagaatattttaatcccgcttttgagagtaactgctcagaaaaaaatatttctttcaaaatattaacactcattaataaggcacctaatcacccaagagttctgatggagatatacaagaatatgaatgttgtttctacacctgctaaaacaacatccattctgcagtccatgtatcaagtagtaatctcaactttcaagtcctacaatctcagaaacacattttataaaggctatagctgccacagacagtaattcttctaatggattcggtcaggcaaagtgaattgaaatcctggaaaggattcactgttctgaatgccattaaaaacagctgtgattcatgggaggmggtcagaatatcaacattaacaggaatttggaagaagctgattccagccactatggatgactttgaagggttcaagacttcagtagaaaaaggaactgcagatgtgatggaaatagcaagagaactagaattataagtggagcctgaaaacgtca

SEQ ID NO: 620855 - DNA, 620 bp, Homo sapiens
tactattctgaaaatcctagaatgcttaaaaattatattaaaactactctgtctgtgctttataaatggaaaaacaaagccaggtgacagcatatctgtttacagcatggtttacagaatattttaatcccgcttttgagagtaactgctcagaaaaaaatatttctttcaaaatattaacactcattaataaggcacctaatcacccaagagttctgatggagatatacaagaatatgaatgttgtttctacacctgctaaaacaacatccattctgcagtccatgtatcaagtagtaatctcaactttcaagtcctacaatctcagaaacacattttataaaggctatagctgccacagacagtaattcttctaatggattcggtcaggcaaagtgaattgaaatcctggaaaggattcactgttctgaatgccattaaaaacagctgtgattcatgggaggargtcagaatatcaacattaacaggaatttggaagaagctgattccagccactatggatgactttgaagggttcaagacttcagtagaaaaaggaactgcagatgtgatggaaatagcaagagaactagaattataagtggagcctgaaaacgtca

SEQ ID NO: 620856 - DNA, 408 bp, Homo sapiens
ctggcaaacatggtgaaaccacatctctacgaaaaatattaaaaaattagctgggcgtggtggcrcatgcctgtagtcccaggtattcaggaggctgaggcaagagaatcgcttgaatacaggaggcggaggttgcagtgagctgagatcgcgacactgcactccagcctgggcgtcagagcaagactccgtctcaaaaaacagagctggagggagactgtgagacacatttagaaagcatcatttatgaggaaccagccctctttggcagcttgatcttgggacttcccagcctccatatatggtaccaatccttctttagttttagtgtccatatcacagaagggctcatgttgtaaaagaagtcaaaagcagccttgaataatcagaacccttctgccagattgt

SEQ ID NO: 620857 - DNA, 418 bp, Homo sapiens
actgcttctacatgttcttcctcttcatctggctctggtttggaagcacttatctccatcaagtcatcttctgttaattcctcaggtgtggtgtctattagcttttgaatttatccaagatctgtatcttgaaaccctttatctcccaccttttttgggacatccacaatctctttcatgatttccttgattgcttctgtcatatatcctgataagtcatgcacaacatctggacacagttttctccagcaggaatttattgttttgggcttgatggctttcatagctttttctgtaacaatgatgatgtcttcaatggtgtaatgcttccagactgtcatgatgttcctatcagggttatcttccrtactgttgacaatcctttccatagagtatcatgtgtaatgagccttaaagg

SEQ ID NO: 620858 - DNA, 611 bp, Homo sapiens
gaatgccattggtatttttgtaggaattgcattgaatctgtagattttttggggtagtatggacattttaacaagatttagtcttccaatccatgaacgtggaatatttttccattttttggtgtcttcttcaatttctttcaattgagaccaattttgaaagacattctggttaaaatggtatcaaagctgggcatggtggctcatgcctgtaatccaagcactttgggaggccgagctgggcagatcacaaggtcaggagatcaagaccagcctggtcaacayagcaaaaccctgtctctactaaaaatacaaaaactagctgggtgtgctggcatgtgcctgtagtcccagctactccggaggctgaggaaggagaatcacttgaacctgggaagtggaggttgcagtgagctgagattgtgccattgcactccaacctgggtgacagagtgagactccatctccaaaaaataaaataaaataaaataaaataaaataaaatggtatcaaacagtatctcatgctacagagaaaactttcgtgaaaggaagagtcaatcaatgagacaaacttcatgtcttattttaagaaattgctacagccacccc

SEQ ID NO: 620859 - DNA, 607 bp, Homo sapiens
gccattttcttgcctttttatctttttgttcaaagataactcttgttttgttttctatcttgaggcaaaattgaaaacttggcctacacattggtttgggctagaactggcctctatttggcgattcagtacagagaatggtggtggctggcgtcacctcgagccaccatttctcagagataccattatataaggggattcatgagaaatcgggcatcacaatagagggacagcttggcctttgtcacttttcaagctgggatcctgaagaggttggggtgcatggggagcagcgaaagcacctagtctcaagcaacataacacgagtttaaggcccccactaggacggagtccagagtagtctggcaacggttgcaaggtttggacttggcctgctaggagagtgagccctgagcttcaggcttggttccctcactcctgtgaggcctcactcaggctcacagcccctgatggagcactcagcttggcrgctgcctgcccgaggtctccagaaaaggcagccagctcctagttgaagtcctcccactttacttccccttccttccccctgccactccctctcttctccttcacccctccttccctt

SEQ ID NO: 620860 - DNA, 544 bp, Homo sapiens
aggtcatttaacctctttgtgcctctatttctcatcttttaaatgataagagtatttaactcataacattactgtggggatttagagagttaatatatagaaaacaatgagaacaatgcctggcaataagtcagagctaggaagtgttcacccaatctctcgttacggtttcctgggtttgagaattggtttgtgttcaactgatggaggcacttcatgattttgtagaattccctggaatgctctcattttagctgtgaggtttcaacattttcccactcagttacagctttcttgaggcytaaagaagacaggaagcaacttgaagtgtatttttctgctaatgagggctgtggcatttgtttcatatacagcatccccaggtggctccagacagaattcaagggcttttttctctacggcagtgcttaccacttaacacacagtaggtattaaataaatgcttgtgccagaaagagaggaaggaagatgcagtacagaggaaaacattaattagtacatagtagtttacacggacaaggtc

SEQ ID NO: 620861 - DNA, 629 bp, Homo sapiens
aacttgctggtattttgattggattgtgttgactccacaaattaaattgtaaaaaactgacatcttgacaatattaagtcttcttatccatgaacatagtctatctttccatttatttaggttttttttttggtacctttcatcagaatttcattgttttcctccatagattttgaatataatttatactgatttcattttttaatacctacatatacaatttatacataagcatttttatatctaagggtctctgttgcgggaagtcagttcttatcacttccccaatcaatacccttgtgatttcctatgcctgtctttaatttaatctcttaatcctgtcagttgaggaggatgtatgtcgcytcaggaccatgtgataattgcgttaattgcacaaattgtacagcatgtgtgtttgtgcaatatgaaatctgagcaccttgaaaaaagaacaggataacagcaattgtccagggaataagagagataaccttaaactctgactgccggtgagctgggcagaacagagccatatttctctttcaaaagcaaatgggagaaatatcactgaattctttttctcagcatggaatatccctgagaaagagaatctgcacctaggggta

SEQ ID NO: 620862 - DNA, 629 bp, Homo sapiens
aacttgctggtattttgattggattgtgttgactccacaaattaaattgtaaaaaactgacatcttgacaatattaagtcttcttatccatgaacatagtctatctttccatttatttaggttttttttttggtacctttcatcagaatttcattgttttcctccatagattttgaatataatttatactgatttcattttttaatacctacatatacaatttatacataagcatttttatatctaagggtctctgttgcgggaagtcagttcttatcacttccccaatcaatacccttgtgatttcctatgcctgtctttaatttaatctcttaatcctgtcagttgaggaggatgtatgtcgcttcaggaccatgtgataattgcgttaattgcacaaattgtacagcatgtgtgtttgtgcaatatgaaatctgagcaccttgaaaaaagaacaggataacagcaattgtycagggaataagagagataaccttaaactctgactgccggtgagctgggcagaacagagccatatttctctttcaaaagcaaatgggagaaatatcactgaattctttttctcagcatggaatatccctgagaaagagaatctgcacctaggggta

SEQ ID NO: 620863 - DNA, 605 bp, Homo sapiens
ctcatggttcccgatatccttttttgggtttttcaaaatcttttttttctgactggttttcatatagggagtttctattgtcatatcctcaagctcagaaattttttccttagctgtgtccagtctactggtgtgcccatcaaaggtattcattgctgttacttttttttttttaatttctagctattccttcttattctgtcttagagtttycatctctctgttcacattacccatctgttcttgcatgttatctattttttcattaaagcccttagcatattaatcatagtgttaaaaattcctgttctgatagttccaatgttcctgccatatctgactctggttctgatgcttgctctgtcttttcgaactgtgttttttgtcttttagtatgctttgcaaatttctgctgaaaggtcgacatgatgtactagttaaaaggaaacgcagtaaacaggcctctagtaatgtggtagtcagatctgtggaaagcagcagcactctatagtcctatggttagctgaacttctctggacatcagcttctctgtagccctgggatagctggatctccttggacaatctgttcctcatcagatgtcc

SEQ ID NO: 620864 - DNA, 525 bp, Homo sapiens
agttggcaccacaggcagtaagcatgtttctgggagccatttctgcactgagatggctagcaaaaaccaactctacayaaaagtgactgcaaaccacctaaatatgtcccataaaacaactgtatccccaacttaacttccccctagccagatcacaaaaatgtccatggccacttcagttctgggcaacatgaaggggagtgtgacagaggggaagtctgaggggaaagagatagcagtctaaactgagtgtggttcaaatagctgactttggcaagtttcacaaaacgtgaccgccacgaacacattactagggtccccttcagaacttgtcctaatgggcagccctaaagcttaagtttcattaacttcatggtaaatttgcctctgcctgtatcgtattcattattatgtgcgacccctggcaccacgcctggcacatagtagttgcttaataaatatatgctgagtaaggaaaagtgttgcttggcctcattacccaggaaatagtctcttcccccagta

SEQ ID NO: 620865 - DNA, 525 bp, Homo sapiens
agttggcaccacaggcagtaagcatgtttctgggagccatttctgcactgagatggctagcaaaaaccaactctacataaaagtgactgcaaaccacctaaatatgtcccataaaacaactgtatccccaacttaacttccccctagccagatcacaaaaatgtccatggccacttcagttctgggcaacatgaaggggagtgtgacagaggggaagtctgagkggaaagagatagcagtctaaactgagtgtggttcaaatagctgactttggcaagtttcacaaaacgtgaccgccacgaacacattactagggtccccttcagaacttgtcctaatgggcagccctaaagcttaagtttcattaacttcatggtaaatttgcctctgcctgtatcgtattcattattatgtgcgacccctggcaccacgcctggcacatagtagttgcttaataaatatatgctgagtaaggaaaagtgttgcttggcctcattacccaggaaatagtctcttcccccagta

SEQ ID NO: 620866 - DNA, 367 bp, Homo sapiens
agcacatgattgaactgagacytgttgagacaaaatgagacagagtgaagtcctgaaataaacagtgtgaacatcagtaatgctttaatttccatgtttcatggttatgcaagcccactgccttggaatttcaacataaccttgaaccatcaccaactttaattttcttcacacttcaaccagtagtaattgggccctccctccctcctgctgctgctgctgctggcatttttgttgttgcctttcctttgctttcattgactttgtttaattctttttggcagctgtgagagctggatgccaaacccctgtgcttgtcacatcagagctgtgattcccactcttgctgcacggcgggctgaattgc

SEQ ID NO: 620867 - DNA, 540 bp, Homo sapiens
aatgctaaatgacgagttaatgggtgcagcacaccaacacggcacatgtatacatatgtaacaaacctgcacgttgtgcacatgtaccctaaaacttaaagtataattttaaaaaaagtgaagtacagtaaaatgaggtataccttttcacacaaaattttccataaaaatttaaaattttatccattgacttcctttcagggggttaatgcaccacagttctagaaccatttaattaggagctttacttgaagattgagctgacamcatatctacccaatctttacactgtaaaggaaaccaggggcctaccaaaatactcaacactgtctactacatagactcaactatccagggaaatattcaaaatcaggttataagttaaccagcgttccaaaaagaagaatggccagtgaggaatactagagttcattctaccagaattattcttacaactttagtcttttttcttttttaaccagatgagcacataagtgggagtaattgtgtatcctattttgatttatgcctcctagaatt

SEQ ID NO: 620868 - DNA, 540 bp, Homo sapiens
aatgctaaatgacgagttaatgggtgcagcacaccaacacggcacatgtatacatatgtaacaaacctgcacgttgtgcacatgtaccctaaaacttaaagtataatttwaaaaaaagtgaagtacagtaaaatgaggtataccttttcacacaaaattttccataaaaatttaaaattttatccattgacttcctttcagggggttaatgcaccacagttctagaaccatttaattaggagctttacttgaagattgagctgacaacatatctacccaatctttacactgtaaaggaaaccaggggcctaccaaaatactcaacactgtctactacatagactcaactatccagggaaatattcaaaatcaggttataagttaaccagcgttccaaaaagaagaatggccagtgaggaatactagagttcattctaccagaattattcttacaactttagtcttttttcttttttaaccagatgagcacataagtgggagtaattgtgtatcctattttgatttatgcctcctagaatt

SEQ ID NO: 620869 - DNA, 591 bp, Homo sapiens
agaacagcatgggggaaactgaccccatgatccaatcacctccaatcaggttcctccttcaacacctggggattacggggattacaattcaagatgtgatttgggtgggaacacaaagcctaaccatatcattctgccccaggcccctcccaaatctcatgtcccttttacatttcaaaaccaatcatgccttccctgcagtccccctaagtcttatttcatcccagcattaatccaaagtctaagtccaaagtcttatctgagacaaggcaagtcccttcttcctttgagcctgtaaaatcaaaagcaagctagttatttgcaagataaaatgggagtaccagcactgggtaatgctcttattccaaatggagacattggccaaaacaaaggggctataggcttcatataagtccaaaacccagcatggtagtcattaaaycttcagactccaaaatgatctcctttgagtctgtgtctcatatctggggcacactgatgcaatggctgggctcccacagccttggacagctcttcacaggctagcattgagtgcctgtggttttccaggtgcatggtgcaacctgtcag

SEQ ID NO: 620870 - DNA, 630 bp, Homo sapiens
tgtgcagtaagtacagtgtgagtagctgccagatagagaagagagaaccccaagtcaattattaattacttcagctccccttagggtcagcaaatcacagctgcgcaatgtactacagcacctaaagtgtgaccgtggagaattaggggcacatgtatatactattctgcaaaagcaagggtgttagccatggtgtcgaatgaataatggaagtagtctttaatccatgtttccatgaatcagtctgtttttgtcacattgttgtccagtatctgtaagtggtagcattattcatgaggcttaagtagacacacagacccagggaaaggctggagatgaaaacaaaactgtagtattcattcatcagcttgtggtgacaacactgctgtcagtatactgaaagtcagcgtggaggggctgagaccagagcccctggttcacygcctccattatagtatcctttgctgatctgttcaaagttcccactgtggctagcagcgtgtctctgtacctcataagcacccattctttttcatttttaatgaaatcagtttctttttcttcttttttttaaaaaaaaaatcagtacaccaatatcttctgggggaaaatggagcaatcacattaaaa

SEQ ID NO: 620871 - DNA, 589 bp, Homo sapiens
gcacttccctcttttaaactacaattgctccacaggcaggtaggggcacagcagtcttccactttataaacaaaagtctggatcccccagcttgccatcagagatgcttcatgatctgatctgctagatctgaatgtttgtgtccccccagaattcctatgctaaaatttcatctctgaggtgttggcattagcaggtggaggctttgggaggtgattaggtcatgagggtggagccctcacaaatgggattagtgttctcatgaggggctgaagagaatagagttmtcctcctccacaatgtgagaacccagtgagaaggtgacagctatgaaccacattgtggccctcaccagacaccaaatctattggtgcactgatagactccccagcctccagaactgtgagaaataaatttctgttgtttataagctacctagttcatggcattttgtcatagcagctcaaagagattaggacagagcctatgtgtgtatatatatatatatatatttatatatatatatatacacacatgtataaatatatatacatgtataaatatatatatacatgtataaatatatata

SEQ ID NO: 620872 - DNA, 542 bp, Homo sapiens
agggaaagactcggagtacatagcagaaatgggttagtctccttggaagcattctatgaacacattagaatggattaataacataaataaatgtcaccatgatggcacttgaaagcctaacttggcaaaataaggtatcaggcctgacatataggtatttggaaaagagcaagaaattcaaagtctaaactgctagatttgaggactggatctgaatgctatctgccatctacctttgggcattttacctactttctgtgagcacatgtattgttcaacagaacaggaggaattatcattcttagttccctgggctgttacaagaagagcaaactgcagctcatcaagtgctctgacagcgagtctcataaggtacctgtgaatccagtttatttgttttctttatctttcacataagtgaatcaagccttataaagttgctgatgatcaaatgagataaggtatttgaacatacttattatgtcctaatatgctgcaatctttccttcttcttatcwttatcattatcagcagtagtagta

SEQ ID NO: 620873 - DNA, 588 bp, Homo sapiens
tatgtttcaaaaaaaacagaaaaaacagtattacaggtatatgttatccacataataaaatattaatttaccttttgggattttttgatatctgtggtatataatagttttctaaaagtctgcaaatttgttttaattccttttcatattctaaataaatattcacttccatatctactttttttttttttttttagacaaagtctcactctgtcccctaggctggagtgcagtggcgcaattttggctcactgcaacctctacatccctggttsaagcgattctcatgcctcagcctcctgagtagctgagattacaggtgcatgccaccacgcctggttaatttttgtatttttactagagacagggttttgccatattggccaagttggtctcgaattcctgacctcaagtgatccacccacctgggcctcccaaactgctgggattacaggcatgagccactgctcccagccccatattatattttgtagttggaatttcatttttgtttctgaaggagggctccttaaaagcatgaacttcaggttcacaaattctagggctgcctctgctcctaacccagtc

SEQ ID NO: 620874 - DNA, 507 bp, Homo sapiens
taggggctgctccacaggaaaacttgtagggagtaatcctagactatctctttcataatcatctttgggattctttccctatccagggaagatgaataggtttcatcctttaaataatatttttaacctacctccaagcataacatctcccaggaacttgtgaaaacagcaagaacttgtgataaagttacaaatgctcaaaaatgtccctgtgattaagttttacccatgcttctacaagaaattaatccctctccctgtctcccttctccccttcctctcttttcttttttcatttctagcagataggaatagttgactgatataggagacaatgaaagtacccaaccattgaggggaatttaaacgccctcagtattaagcagagtatcacatagttaaaaatacaggctttggagaccaacagacccaggtatgagtccccatttcaatayagccttcagatccaggcaagagcagtcaacctggctgtgggaataggcagaa

SEQ ID NO: 620875 - DNA, 542 bp, Homo sapiens
cagagtatcacatagttaaaaatacaggctttggagaccaacagacccaggtatgagtccccatttcaatacagccttcagatccaggcaagagcagtcaacctggctgtgggaataggcagaactaacataaacaagaaacaaaacattgggttgggtaaattaactcagggacaaaaacagatatgtcatatagactacaattttcacttctttgccatcagcttttgacaggctatgtaaatagcctcaggcagaaagctcgagacatagcaattccaatgtttggtaagttatagttaattgtttccaaaatgggaaatgctgagttaaacaagattcaaggttttttgactgaygtctctgctccttttataagctaatgtgtactgtgaatctgcaagaggagaattagggactgtttctcaagtttctttagccatttttttgtgtggagtatctcaaggaatgtgtgctctgtgggatatatgttcagaaataagctctggccttaggaggtcccatcacaccaattgccaata

SEQ ID NO: 620876 - DNA, 394 bp, Homo sapiens
tgtttgagcagaacggagtgaggaattgagccgtgcccagttaacacttgctaaatgaataaaaggatgaaagtatgtaggtggaagagtgatgtgcacaacctcatattgctcaggcctatactgaacagtgctgctagatgatctctgaagttgcttataatttagaaagtggccttccctcccacccagtaaatgtactttaatcgttgaggtcggtattaatgatttctgggaactcatcacgtcccatgatgtgttggaaaacaccaggcaatgctttatcacagtctgtgcttcttagcaaactrtttcctctcagctttcctggaagctggggttttatactatggctatttttagttgttgtcgcagtggctgctgggaccaattg

SEQ ID NO: 620877 - DNA, 563 bp, Homo sapiens
acaaaacaattagagaaaagaacaaattacaagacaacaaagggcaaaattagtaaagtgtgtttcatcagaaatgttactgggaactggggaagagagaaatgagtatgaactatggtttctgtaggtttataatcatttttattggcargaaagagcagcatttacaaatatatttatataataaatgtgaaaacatttctaaaaatcacataaatatgaatattgtgggggagatgttggggaaaaagggcctgccatcttgattaataaagatgatttgtttaggtctgaaacactttacattttgataatatttataaccataactttattactttatcatctaatacaaagatcaccaaggttctgtttagatatcgtaagcattaaacattaacactggtagtgtcttactactactgaaatcatttgacttcatcaaatttttagttatattggtgccaaaggggcaagctagtgacagagatagcctttattgaccacctatctgacaaatctgtgaccttagaagcacaagaaggtctttctttcacaagctt

SEQ ID NO: 620878 - DNA, 563 bp, Homo sapiens
acaaaacaattagagaaaagaacaaattacaagacaacaaagggcaaaattagtaaagtgtgtttcatcagaaatgttactgggaactggggaagagagaaatgagtatgaactatggtttctgtaggtttataatcatttttattggcaggaaagagcagcatttacaaatatatttatataataaatgtgaaaacatttctaaaaatcacataaatatgaatattgtgggggagatgttggggaaaaagggcctgccatcttgattaataaagatgatttgtttaggtctgaaacactttacattttgataatatttataaccataactttattactttatcatctaatacaragatcaccaaggttctgtttagatatcgtaagcattaaacattaacactggtagtgtcttactactactgaaatcatttgacttcatcaaatttttagttatattggtgccaaaggggcaagctagtgacagagatagcctttattgaccacctatctgacaaatctgtgaccttagaagcacaagaaggtctttctttcacaagctt

SEQ ID NO: 620879 - DNA, 595 bp, Homo sapiens
tattcttcattagttatttagtacacttagcattaacaccagttccttcgaaactcatcaaaatgtagcattgtctttatctgcaacaccctgactcagaggatgcccactctctctttccctctttgaagttggctatctgggctcctcagtatttggatatcaggtatcagcaggttcatctgctttgagatgtttctcttctatactggaggttctagagaagtgttagagagctactaaagtggtcagacaaggaggatttggtcatgatggagtccgcagagaggggatgagaagggaagaaactagacccaccgtgaataaggaaggacttgggccaggtgaaggtcatttctgagagtcaggtgctggggttgggtcccaacctaagtaagatgacagtgccagggcagagcagtaggggcagggagaggatgaagcaggggaagccctgcctcaaagyttgagggtatttagttcatcctatcatattgttttggtgtaatggtggtgtttgggtgctcaatttctttattaagtttatttaaataaacctatcaaacaagatggtttcagtgaggaagattccatc

SEQ ID NO: 620880 - DNA, 516 bp, Homo sapiens
aaggaaggacttgggccaggtgaaggtcatttctgagagtcaggtgctggggttgggtcccaacctaagtaagatgacagtgccagggcagagcagtaggggcagggagaggatgaagcaggggaagccctgcctcaaagtttgagggtatttagttcatcctatcatattgttttggtgtaatggtggtgtttgggtgctcaatttctttattaagtttatttaaataaacctatcaaacaagatggtttcagtgargaagattccatctgtctcagttttgcaatatttaatgtccccttttgtgttttccttcctcatctcctctaagtaataaaacaacatagatgaattttacccaagctcctctaggacctcttccagattgtataatctaaaatagacagcactgaggtgggccaaccaatgtaatcatgaggcaaaatatggatgaccatgttcaatttgagaagcaagaaagtatggtgaaatttggggatcatatgcaagtaagca

SEQ ID NO: 620881 - DNA, 615 bp, Homo sapiens
gtggatccacacagccagatgggcatctttaccaagggccagcttggttccagagactggggatgtagtgatgtggtgatgaaagagacatggtccctctcttgagaagctatcacacaacagaggcagcaaaaggtaaagacatgatggccaggtcatcactgaagtgcagtagtagtagagaatgggtggagtggggacaggaaggagcccacctaagggttcacggaaggatttggggcagcaacaatgcctaatgtgagcctcaaaggtaagagagtttattcatacaaagtggcaggtaaggccatccaggcagaagtgatggcataagcacatgcctggaggctggattgmacaatgcaggtgtattaggctgtttttgtgttctgtaaagaaatacctgagactgtgtaatttatattgaaaagagatttagttggctgatggtcctgcaggctgtacaagtgccatgccagcatttgcttagcttctggttagggcctcaggaagcttatgatcatagtggaaagcaaaatgggagcaggcactttccatggcaaaagcaggggcaagagagagagagagagaggaaccaggatcctttaaaccaca

SEQ ID NO: 620882 - DNA, 542 bp, Homo sapiens
ggtatgttgtgtctttgttttcatttatttcaaaraatgtttttacttttgccgtaattttgttgtttacccaaaagtaattcaggagtgagttgtttaatttcatgtaattgtgtgattttgagacatcttcttggtgttgatttctatttttgttccactgtggtccaagagtatgattgatataatttctattttttttaatttattgagatttgctttatgactgagcatgtggttgatcttggagtatgttctgtgtgcagatgaaaggaatgtatattctatggtcaatgggtggagtattcagtagatgtctgttatgtccaattgtcaagtgttgaatttgagtccagaatatctttgttagttttctgcctcgaagatctgtctaacgttgttagtgagttgttgaagtcccccattattattgtgtgttgttgctaagtcttttcataggtctagaagtacttgttttgtgaacctgggtgctccagtgttgggtgtgtatatatttagaatggttaagtcttcttgttgta

SEQ ID NO: 620883 - DNA, 259 bp, Homo sapiens
gcctaatcctactctgtaaataactcatttgtccrtgtgtgtgtgtgtgtgtgtgtgtgtgtgtgtgtgtgtgtgtgtgtgtacacttacctacatggacatgcctggatgtctgtaattttttttaacaataacttcatagagatatattcacaaaccataaaagtcaccattttaaagtgtacaattcagtagcttttagtatattatacacagttgtgcaacgatctgcaccatctaattttggaacatttttatc

SEQ ID NO: 620884 - DNA, 460 bp, Homo sapiens
tggaactcctgagctcaagtgatcctcctgcctcgtcctcccaaagtgctgggattataagcataagccaccacactcagccgcctgcaactattattatggtggtatttgccacaaggggttttaagtttctttccagatacttttgagttcatctccttgtctctgaatcccatttgcgtgtccccagctccgcctctacgtttattgactggaatttcctgtataaaggaggcttctgctcactcttaagtgagagtggggctgactgttttctgactgtgttctggctggtttgtgatgawgattcatggatgcctctgtccaggggagaaattagaaggcccgtgcaaaggtagcagctttttgaccctgaagaaaggaattagatttcagttttctgtcatttttctatgagttttgatacgcttacattgccatgaacttatataattatgac

SEQ ID NO: 620885 - DNA, 460 bp, Homo sapiens
tggaactcctgagctcaagtgatcctcctgcctcgtcctcccaaagtgctgggattataagcataagccaccacactcagccgcctgcaactattattatggtggtatttgccacaaggggttttaagtttctttccagatacttttgagttcatctccttgtctctgaatcccatttgcgtgtccccagctccgcctctacgtttattgactggaatttcctgtataaaggaggcttctgctcactcttaagtgagagtggggctgactgttttctgactgtgttctggctggtttgtgatgatgattcatggmtgcctctgtccaggggagaaattagaaggcccgtgcaaaggtagcagctttttgaccctgaagaaaggaattagatttcagttttctgtcatttttctatgagttttgatacgcttacattgccatgaacttatataattatgac

SEQ ID NO: 620886 - DNA, 460 bp, Homo sapiens
tggaactcctgagctcaagtgatcctcctgcctcgtcctcccaaagtgctgggattataagcataagccaccacactcagccgcctgcaactattattatggtggtatttgccacaaggggttttaagtttctttccagatacttttgagttcatctccttgtctctgaatcccatttgcgtgtccccagctccgcctctacgtttattgactggaatttcctgtataaaggaggcttctgctcactcttaagtgagagtggggctgactgttttctgactgtgttctggctggtttgtgatgatgattcatggatgcctctgtccaggggagaaattagaaggcccgtgsaaaggtagcagctttttgaccctgaagaaaggaattagatttcagttttctgtcatttttctatgagttttgatacgcttacattgccatgaacttatataattatgac

SEQ ID NO: 620887 - DNA, 617 bp, Homo sapiens
ttctgactggcatgagatggtatctcattgtggttttgatttctctaattattagtgatgttgagcttgtttccatatgcttattggccacatgtatgtcttcttttgaaaagtgtctgttcaggtttttagcccacttttcaatggggttgttttttgcttgttaatttaagttccttatagattctggatattagaatctatgaagaacctatcttcatcaaatcataatttgcaaatattttctccccttgtggaagttgtctgtttactctgttgatagtttcttttgctgtgcggaagctctttaattgggtcccgtttgtcaatttttgtttttgttgccattgctgttggcatctttgggaagaaaattttcccaggacctatgtccagaatggtaatttgtaggttaccttctaaggtctttagttttaggttttacatttaggtctttaatctatcttgaattgatttttgtatatggtgtcagggaggggtttagtttcagtcttctgcatatatctagcaggttatcccagcaccatttatggaatagggagtccttgtcctatygcttgttttttgttaactttgtcaaaaattgggtggttgta

SEQ ID NO: 620888 - DNA, 610 bp, Homo sapiens
ggttgttttatagtgtccataacctatgtacttaagtytgtttttgtggtggctggtaatggtctttgctttccatgtttagaactccctcaagtaccttctgaaaggcaggtctggttgtaacaagttcccttaatatttccttgtctgaaaagggtcttatttctcctttgcttataaagcttagtttggctgggtaggaaattattggttggagtttcttttctttaaaaatgcagaatataggcccccaatctatttcagattggagtgtttctgctgaaacagtcactgttaatctgatgagtttccctttgtaggtgacctgtcctttctttctagctgcctttaatatattttctttcatgtcaaccttgaagaatctgaaaattatgagtctttgggatggtcatcttatatagtatcttgcaggggttatttgcatctcttgaatttgaatgtcagcttctcttgtgaagctgaaaaagttttggtgaatgatattctcaaatatgatttccaagttgcctgctttctcccctctctttcagggacgccaatgagttgaaaatgtgttctctttatataacctcatatttcttgaatgttt

SEQ ID NO: 620889 - DNA, 601 bp, Homo sapiens
ggttattatgcagactttattatgtggttgttttatagtgtccataacctatgtacttaagtttgtttttgtggtggctggtaatggtctttgctttccatgtttagaactccctcaagtaccttctgaaaggcaggtctggttgtaacaagttcccttaatatttccttgtctgaaaagggtcttatttctcctttgcttataaagcttagtttggctgggtaggaaattattggttggagtttcttttctttaaaaatgcagaatataggcccccaatctatttcagattggagtgtttctgctgaaacagtcactgttaatctgatgagtttccctttgtaggtgacctgtcctttctttctagctgcctttaatatattttctttcatgtcaaccttgaagaatctgaaaattatgagtctttgggatggtcatctkatatagtatcttgcaggggttatttgcatctcttgaatttgaatgtcagcttctcttgtgaagctgaaaaagttttggtgaatgatattctcaaatatgatttccaagttgcctgctttctcccctctctttcagggacgccaatgagttgaaaatgtgt

SEQ ID NO: 620890 - DNA, 601 bp, Homo sapiens
ggttattatgcagactttattatgtggttgttttatagtgtccataacctatgtacttaagtttgtttttgtggtggctggtaatggtctttgctttccatgtttagaactccctcaagtaccttctgaaaggcaggtctggttgtaacaagttcccttaatatttccttgtctgaaaagggtcttatttctcctttgcttataaagcttagtttggctgggtaggaaattattggttggagtttcttttctttaaaaatgcagaatataggcccccaatctatttcagattggagtgtttctgctgaaacagtcactgttaatctgatgagtttccctttgtaggtgacctgtcctttctttctagctgcctttaatatattttctttcatgtcaaccttgaagaatctgaaaattatgagtctttgggatggtcatcttatatagtatcttgcaggggttatttgcatctcttgaatttgaatgtcrgcttctcttgtgaagctgaaaaagttttggtgaatgatattctcaaatatgatttccaagttgcctgctttctcccctctctttcagggacgccaatgagttgaaaatgtgt

SEQ ID NO: 620891 - DNA, 601 bp, Homo sapiens
ggttattatgcagactttattatgtggttgttttatagtgtccataacctatgtacttaagtttgtttttgtggtggctggtaatggtctttgctttccatgtttagaactccctcaagtaccttctgaaaggcaggtctggttgtaacaagttcccttaatatttccttgtctgaaaagggtcttatttctcctttgcttataaagcttagtttggctgggtaggaaattattggttggagtttcttttctttaaaaatgcagaatataggcccccaatctatttcagattggagtgtttctgctgaaacagtcactgttaatctgatgagtttccctttgtaggtgacctgtcctttctttctagctgcctttaatatattttctttcatgtcaaccttgaagaatctgaaaattatgagtctttgggatggtcatcttatatagtatcttgcaggggttatttgcatctcttgaatttgaatgtcagcttctcttgtgaagctgaaaaagttttggtgaatgatattctsaaatatgatttccaagttgcctgctttctcccctctctttcagggacgccaatgagttgaaaatgtgt

SEQ ID NO: 620892 - DNA, 502 bp, Homo sapiens
gatatggtttggctgtgttcccacccaaatctcatcctaaattgtagttcctataatctccatgtatggtgggagtgacctagtgggaagtaattgaatcacagggcagtttcccccatgctattctcatgatagtaagttctcacaagatctgatggttttataaggggcttctccctcatttggttctcattcttctccttcctgccaccatgtgaagwagggcatttgcttccccttccaccgtaattgtaggtttcctgaggccttgcgaaccctgaggaactgtggtcaattaaacctccttcctttataatttacccagtcttgagcagttctttatagcagcatgagaatggactaatacagtaaattggtactggtagagtggggtgctgctataaggatacccgaaaatgtggaagtgactttggaaatgggtaacaggcagaggttggaacactgtggagggcttggaagaaaacaggaaaatgtgggaaag

SEQ ID NO: 620893 - DNA, 502 bp, Homo sapiens
gatatggtttggctgtgttcccacccaaatctcatcctaaattgtagttcctataatctccatgtatggtgggagtgacctagtgggaagtaattgaatcacagggcagtttcccccatgctattctcatgatagtaagttctcacaagatctgatggttttataaggggcttctccctcatttggttctcattcttctccttcctgccaccatgtgaagaagggcatttgcttccccttccaccrtaattgtaggtttcctgaggccttgcgaaccctgaggaactgtggtcaattaaacctccttcctttataatttacccagtcttgagcagttctttatagcagcatgagaatggactaatacagtaaattggtactggtagagtggggtgctgctataaggatacccgaaaatgtggaagtgactttggaaatgggtaacaggcagaggttggaacactgtggagggcttggaagaaaacaggaaaatgtgggaaag

SEQ ID NO: 620894 - DNA, 502 bp, Homo sapiens
gatatggtttggctgtgttcccacccaaatctcatcctaaattgtagttcctataatctccatgtatggtgggagtgacctagtgggaagtaattgaatcacagggcagtttcccccatgctattctcatgatagtaagttctcacaagatctgatggttttataaggggcttctccctcatttggttctcattcttctccttcctgccaccatgtgaagaagggcatttgcttccccttccaccgtaattgtaggtttcctgaggccttgcgaaccctgaggaactgtggtcaattaaacctccttcctttataatttacccagtcttgagcagttctttatagcagcatgagaatggactaatacagtaaattggtactggtagagtggggtgctgctataaggatacccgaaaatgtggaagtgactttggaaatgggtaacmggcagaggttggaacactgtggagggcttggaagaaaacaggaaaatgtgggaaag

SEQ ID NO: 620895 - DNA, 435 bp, Homo sapiens
ccttgtggaactctgaggcaattaaacctctttgcattataatatacccagtcataggcagttctctgtagcagtgtaagaacaaactaatacaataattgtgattttattatgaagtttttgtagtgtgtttttcagttctatcagatccatttggttcttccttataatggccatttcatctttcagctcctgtattgttttgctgcaatccttagattccttggattagaataaaattttgactttctyctgaatcttgatgcttttcatttctatccatatctgaattctatgtctgtcatttcagtactttcagtctggttaagaacctttgctatggaaccagcacaatcaattggaggaaaggagatactctggcttttttaattgccagagttcttctacgggtcaggtcctttctcatttgtgtag

SEQ ID NO: 620896 - DNA, 543 bp, Homo sapiens
cagttctctgtagcagtgtaagaacaaactaatacaataattgtgattttattatgaagtttttgtagtgtgtttttcagttctatcagatccatttggttcttccttataatggccatttcatctttcagctcctgtattgttttgctgcaatccttagattccttggattagaataaaattttgactttcttctgaatcttgatgcttttcatttctatccatatctgaattctatgtctgtcatttcagtactttcagtctggttaagaacctttgctatggaaccagcacaatcaattggaggaaaggagawactctggcttttttaattgccagagttcttctacgggtcaggtcctttctcatttgtgtaggctgttattcctttaactgtggtataatttgaatatcgtcagttgacttcttttctggatgttttcagaaggccaagacctttgtgcagggtctttatttgtagctgaattctaatttttgtccttggtttcacaggtgggtatattagcaaaatgtttttggtga

SEQ ID NO: 620897 - DNA, 543 bp, Homo sapiens
cagttctctgtagcagtgtaagaacaaactaatacaataattgtgattttattatgaagtttttgtagtgtgtttttcagttctatcagatccatttggttcttccttataatggccatttcatctttcagctcctgtattgttttgctgcaatccttagattccttggattagaataaaattttgactttcttctgaatcttgatgcttttcatttctatccatatctgaattctatgtctgtcatttcagtactttcagtctggttaagaacctttgctatggaaccagcacaatcaattggaggaaaggagatactctggctttttkaattgccagagttcttctacgggtcaggtcctttctcatttgtgtaggctgttattcctttaactgtggtataatttgaatatcgtcagttgacttcttttctggatgttttcagaaggccaagacctttgtgcagggtctttatttgtagctgaattctaatttttgtccttggtttcacaggtgggtatattagcaaaatgtttttggtga

SEQ ID NO: 620898 - DNA, 543 bp, Homo sapiens
cagttctctgtagcagtgtaagaacaaactaatacaataattgtgattttattatgaagtttttgtagtgtgtttttcagttctatcagatccatttggttcttccttataatggccatttcatctttcagctcctgtattgttttgctgcaatccttagattccttggattagaataaaattttgactttcttctgaatcttgatgcttttcatttctatccatatctgaattctatgtctgtcatttcagtactttcagtctggttaagaacctttgctatggaaccagcacaatcaattggaggaaaggagatactctggcttttttaattgccagagttcttctacgggtcaggtcctttctcatttgtgtaggctgwtattcctttaactgtggtataatttgaatatcgtcagttgacttcttttctggatgttttcagaaggccaagacctttgtgcagggtctttatttgtagctgaattctaatttttgtccttggtttcacaggtgggtatattagcaaaatgtttttggtga

SEQ ID NO: 620899 - DNA, 415 bp, Homo sapiens
tatgtgattataataaacttcaagtwttcaggaccattttatggataaaaggagaatctaacttttaaaagttgggaaaatgatttaatattggaaactcaagagttacaaattcttacagttatttcaaaactaaaggtttctttagaaccaaatttagagctataaatcctatatccgtaatcaaatccagtactgataacaatgaacaattgctgaagagtaatattctctctctctttaccaatgtaagccttagcattggtactttcttgtattatctttttgcatgccattatgatcagaaaaaacaaaaagctacccagaaagggcagctacattctaaatgatagcttttacctccctgaggagctgctagtacctacctgattagaattcatttgtaaacaacaga

SEQ ID NO: 620900 - DNA, 599 bp, Homo sapiens
ctcaagagttacaaattcttacagttatttcaaaactaaaggtttctttagaaccaaatttagagctataaatcctatatccgtaatcaaatccagtactgataacaatgaacaattgctgaagagtaatattctctctctctttaccaatgtaagccttagcattggtactttcttgtattatctttttgcatgccattatgatcagaaaaaacaaaaagctacccagaaagggcagcyacattctaaatgatagcttttacctccctgaggagctgctagtacctacctgattagaattcatttgtaaacaacagaggccttttaaatctaaattacatttcctaatgaattgtttctgtttattcagtttacattaagaaactcttcattcattgagcaaatacctactgaaacctatattatgccaggcattctgataaatactaggtatgtatcaataaataaaaattactccattttcagaaatattttgaataactcctatgtattaagcaggaattttttaaatatactaaaaacagacaaaaatcctgatcctcatagggctgcagtctgatggaggaaaggggaaatca

SEQ ID NO: 620901 - DNA, 599 bp, Homo sapiens
ctcaagagttacaaattcttacagttatttcaaaactaaaggtttctttagaaccaaatttagagctataaatcctatatccgtaatcaaatccagtactgataacaatgaacaattgctgaagagtaatattctctctctctttaccaatgtaagccttagcattggtactttcttgtattatctttttgcatgccattatgatcagaaaaaacaaaaagctacccagaaagggcagctacattctaaatgatagcttttacctccctgaggagctgctagtacctacctgattagaattcatttgtaaacaacagaggccttttaaatctaaattacatttcctaatraattgtttctgtttattcagtttacattaagaaactcttcattcattgagcaaatacctactgaaacctatattatgccaggcattctgataaatactaggtatgtatcaataaataaaaattactccattttcagaaatattttgaataactcctatgtattaagcaggaattttttaaatatactaaaaacagacaaaaatcctgatcctcatagggctgcagtctgatggaggaaaggggaaatca

SEQ ID NO: 620902 - DNA, 599 bp, Homo sapiens
ctcaagagttacaaattcttacagttatttcaaaactaaaggtttctttagaaccaaatttagagctataaatcctatatccgtaatcaaatccagtactgataacaatgaacaattgctgaagagtaatattctctctctctttaccaatgtaagccttagcattggtactttcttgtattatctttttgcatgccattatgatcagaaaaaacaaaaagctacccagaaagggcagctacattctaaatgatagcttttacctccctgaggagctgctagtacctacctgattagaattcatttgtaaacaacagaggccttttaaatctaaattacatttcctaatgawttgtttctgtttattcagtttacattaagaaactcttcattcattgagcaaatacctactgaaacctatattatgccaggcattctgataaatactaggtatgtatcaataaataaaaattactccattttcagaaatattttgaataactcctatgtattaagcaggaattttttaaatatactaaaaacagacaaaaatcctgatcctcatagggctgcagtctgatggaggaaaggggaaatca

SEQ ID NO: 620903 - DNA, 438 bp, Homo sapiens
ggacccaataagattattactgagggagtatgcaaaagaagaagtctgaagactcagctaggatgcttcaactttcagaagttcagaagaaggtakaatagaataatcagtgttacaggctgaatgttgttctcccaaaatatatgttgaaatctgaagcttcagtacctgtgcatgtgatcttctttagaaataagatcttttaaatgtaatcaaattcaaaggaggtcattagaatagggatccaatatgactggtgtccttataagaagaagggatagaaacacacagaagagaatgccatgtgaagacatggatgcatgaggtgagaatgacatgatattggaggcagagattgaagtgctgctgctacaagtagaggaatgacaaagattgctggcaaaccaccagaagccaggaagagacaagaaagaattc

SEQ ID NO: 620904 - DNA, 438 bp, Homo sapiens
ggacccaataagattattactgagggagtatgcaaaagaagaagtctgaagactcagctaggatgcttcaactttcagaagttcagaagaaggtagaatagaataatcagtgttacaggctgaatgttgttctcccaaaatatatgttgaaatctgaagcttcagtacctgtgcatgtgatcttctttagaaataagatcttttaaatgtaatcaaattcaaaggaggtcattagaatagggatccaatatgactggtgtccttataagaagaagggatagaaacacacagaagagaatgycatgtgaagacatggatgcatgaggtgagaatgacatgatattggaggcagagattgaagtgctgctgctacaagtagaggaatgacaaagattgctggcaaaccaccagaagccaggaagagacaagaaagaattc

SEQ ID NO: 620905 - DNA, 593 bp, Homo sapiens
tgaagtgctgctgctacaagtagaggaatgacaaagattgctggcaaaccaccagaagccaggaagagacaagaaagaattcttcctttatgagtttcagaggggagcatagtcctgtcaacatgttgattttggacttcaattctccagaacagggagaaaataaatttctgtttattgtaaactccccatttgtggcactttaaaaaggccaccctagaaaacctaagtcagcaagggaggagagaaataagtaactatgtggaattgwcagtagtagataaaataagatgaggattgagaattgacctttgaagatcacacgtgaacaaaacagtaggagcatctatgatgactgcggatggaaagttgtggggttgcagattcgagagataaagggattttcacttcctgccaagagggagtaacagagactggacttactctcccacatgaagcaactaaaaaagtggacaaaatatttaaaataaaagttctcaatacattgaccattaaaaaatgaaagacaatgatccattgacaaaaagcatgagccttttgattgctctatttactgcctggagaaagcttcc

SEQ ID NO: 620906 - DNA, 595 bp, Homo sapiens
ctttgcagtgttttaggaagcttgtcttatgtaaacacagaataacagtttaccaattttgtaatatttttatttcttccagtctgttttactttgctaattgcatacggatcaactgtcttagaaaagtacttttatgatrcttactattttggggaataatctttagagaataaaataatattttttgatccttcagaagaacatatagaataatgtattaactccatttaagattctgtctccagcctcacccaagccgctttttaccttcgaccatatattttattcctctgtgtaactcagtgtctcctaaacccaaacatactcaggtctctgtacattgaaatattgcagccctttatttctcctgggacacattcttttctctccactccctccactccttccatgctgttctcacctatggccaacactcaactcacttttatggagtttatcaaactaccaattcttccaagtgtttcccattttatgaaatatttcccaaaagacagcctctcctagcaccattgcctgacataccaagctctccactacaacttttttcacactagtgacacacacacacaaa

SEQ ID NO: 620907 - DNA, 595 bp, Homo sapiens
ctttgcagtgttttaggaagcttgtcttatgtaaacacagaataacagtttaccaattttgtaatatttttatttcttccagtctgttttactttgctaattgcatacggatcaactgtcttagaaaagtacttttatgatgcttactatyttggggaataatctttagagaataaaataatattttttgatccttcagaagaacatatagaataatgtattaactccatttaagattctgtctccagcctcacccaagccgctttttaccttcgaccatatattttattcctctgtgtaactcagtgtctcctaaacccaaacatactcaggtctctgtacattgaaatattgcagccctttatttctcctgggacacattcttttctctccactccctccactccttccatgctgttctcacctatggccaacactcaactcacttttatggagtttatcaaactaccaattcttccaagtgtttcccattttatgaaatatttcccaaaagacagcctctcctagcaccattgcctgacataccaagctctccactacaacttttttcacactagtgacacacacacacaaa

SEQ ID NO: 620908 - DNA, 579 bp, Homo sapiens
atttcaaataccacgcacagtgtaaatacaaaatgttgagaaaaaacctctgggctctgaacaagcaagttttagactctgaatcaaaaattctcttggagtcttacaatgaatggaatgtgaatgcatgcagtgcatacaattctagggtcacttttctaaaaggaagtttcttgcttttgacttcctcattcccctttctaaagaccagaatgagagtggttgagagacaattttcctctttcaatagcaccatgcatgatcttatgaggcagagtaatttctccaccctggccatgcccctacctctggtctattatataagaaaaaaataaaattatctcttgtttgacttgctctagttttaggtctccttgttatagccagctcagtctatattctaactaacattcatcttaagtaaaaatccagaaatcayaattggctacctttctttgttttgtaacttttctcctaccatagtttatttcttcattaacccttgactgaactgaagtagtcacagccttggtttccaaaccttttgatttcctcctctcttattcatccttcacagtt

SEQ ID NO: 620909 - DNA, 503 bp, Homo sapiens
ttctaactaacattcatcttaagtaaaaatccagaaatcacaattggctacctttctttgttttgtaacttttctcctaccatagtttatttcttcattarcccttgactgaactgaagtagtcacagccttggtttccaaaccttttgatttcctcctctcttattcatccttcacagttccatcagcataatctttctaaagcccaaattgcatttgcattacgtgttctcctcaaggacattcaaatggctcctctattacttagaaaataaaacatgaactcttagcttggcattcaaagtactgtaacttgtggcttcacaagcaatagagttatgaagttactatgttatgcccaagtggttttgttgagagagcaacaccctcctccaactacttcactcattgaaattctaataatccttgaaattctaataaggctgccttgaattccatatattttatgaaaatccttccttagttcctcaaattgaattcat

SEQ ID NO: 620910 - DNA, 503 bp, Homo sapiens
ttctaactaacattcatcttaagtaaaaatccagaaatcacaattggctacctttctttgttttgtaacttttctcctaccatagtttatttcttcattaacccttgactgaactgaagtagtcacagccttggtttccaaaccttttgatttcctcctctcttattcatccttcacakttccatcagcataatctttctaaagcccaaattgcatttgcattacgtgttctcctcaaggacattcaaatggctcctctattacttagaaaataaaacatgaactcttagcttggcattcaaagtactgtaacttgtggcttcacaagcaatagagttatgaagttactatgttatgcccaagtggttttgttgagagagcaacaccctcctccaactacttcactcattgaaattctaataatccttgaaattctaataaggctgccttgaattccatatattttatgaaaatccttccttagttcctcaaattgaattcat

SEQ ID NO: 620911 - DNA, 586 bp, Homo sapiens
atatgtgacacatactgttatcaggtccagagtatggggttgaggtgtgacttgcagttcagaaagaatggggactgagttgagcagttaccccagaaattgttgtctacattttgctattgccagggaagagatcttaatatgggcaataatattcagtatccatttattttgaagctcaaacctttcttccctcttcaggaacactatttgttgtgtgtttgtttgtttgtttgttttgagacagggtctcactctgttacccaggttggagtgcattaccaccatcatagctcactgcagtcgcaacctccaggtctcaagtgatcctcccacctcagcctccaaagtagctgggatcacaggcatgcaccactatacctggctaattttatttttatttttgtagagatggggtctcaccatgttgcccaggctggtctccaactcctgggctcaagcaatcctcctgctttggcctcccaatgttctgggattatagacatgactcaccatgccctgccagattgatttctttcatctttatrtgtgactaatgaaatctgcctcacaggattgttgtgaa

SEQ ID NO: 620912 - DNA, 566 bp, Homo sapiens
tgatgtgtgtattaaacatttatttaacacatatgttaaaagtatactcttttgctctgtgctctgtcacttctattgtagtttagtttgtgctgcctttccctacamaggcataccttgcagaagctgcaaatttggatccagatcaccgcaatagagcaaatatcacaataaagcaggtcacatgattcttttgattttccagtgcatataaaagttatgtttatgctatactatagtctattaattatgtaatagtattatttctaaaaaataacctgcataccttaatgaaaatgttttattaagaaatgttaatgatcactttcgctttcaagccagtcttcatctgtttgctgatggaggaccttgccttgacaatgatagctactgactgatcagggtggtggttgctgaaggatggggtggctgtggcaatttctaaaataagacaacaatgaagtctgccacatctactgactcttcctttcatgaaagatttctccatagcaggtgatgctgtttgatagcattttacctacagtagaacctctttcaaaattcga

SEQ ID NO: 620913 - DNA, 566 bp, Homo sapiens
tgatgtgtgtattaaacatttatttaacacatatgttaaaagtatactcttttgctctgtgctctgtcacttctattgtagtttagtttgtgctgcctttccctacacaggcataccttgcagaagctgcaaatttggatccagatcaccgcaatagagcaaatatcacaataaagcasgtcacatgattcttttgattttccagtgcatataaaagttatgtttatgctatactatagtctattaattatgtaatagtattatttctaaaaaataacctgcataccttaatgaaaatgttttattaagaaatgttaatgatcactttcgctttcaagccagtcttcatctgtttgctgatggaggaccttgccttgacaatgatagctactgactgatcagggtggtggttgctgaaggatggggtggctgtggcaatttctaaaataagacaacaatgaagtctgccacatctactgactcttcctttcatgaaagatttctccatagcaggtgatgctgtttgatagcattttacctacagtagaacctctttcaaaattcga

SEQ ID NO: 620914 - DNA, 566 bp, Homo sapiens
tgatgtgtgtattaaacatttatttaacacatatgttaaaagtatactcttttgctctgtgctctgtcacttctattgtagtttagtttgtgctgcctttccctacacaggcataccttgcagaagctgcaaatttggatccagatcaccgcaatagagcaaatatcacaataaagcaggtcacatgattcttttgattttccagtgcatataaaagttatgtttatgctatactatagtctattaattatgtaatagtattrtttctaaaaaataacctgcataccttaatgaaaatgttttattaagaaatgttaatgatcactttcgctttcaagccagtcttcatctgtttgctgatggaggaccttgccttgacaatgatagctactgactgatcagggtggtggttgctgaaggatggggtggctgtggcaatttctaaaataagacaacaatgaagtctgccacatctactgactcttcctttcatgaaagatttctccatagcaggtgatgctgtttgatagcattttacctacagtagaacctctttcaaaattcga

SEQ ID NO: 620915 - DNA, 513 bp, Homo sapiens
catcttcaccaggaatagattccatttcaataaacttatttctttgctcatccataagaagcaactccttatttgctaaagttttatcatgagactgtagtgattcagtcacatcttcaggctttacttctttttttttttttttaattttactttaagttcctggatacacgcgcagaaagtgcaggattgtttacataagtatacatgtgccatgatggtttcctgcacctattaacctgtcatctaggttttaagccccacatgcattaggtattggtcctaatactctccctcctattacttcccatcccctaacaggctccggtgcgtgtccttcccctcccaggcaggctttacttctaattctagttctcctgctgtttccacaacatctgcagggaytttctccactgaaatctaaaacccctcaaagtaatctatgagggttggaattaacttcttccagatttctgttaatgttgatttttgacctgttctcatgaatcacaa

SEQ ID NO: 620916 - DNA, 426 bp, Homo sapiens
tcacagttccccatgggtagggagggctcargaaacttataatcatggcagaaggcaaaggggaagcaaagcatgtcttacatggtggcaagagagagagaagagtgagggggagctgccaaacacttttaaaccatcagatctcatgagaactcaatcactatcataagaacagcatgcgggaaactttcctgatgatccaatcacccccaaccaggttcctccttccacatgtggggattacaattcgagatgagatttgggtggggacagagccaaactctatcaaaggttgaaccaaattgagacaggggagggactggaccaagtgttttataggtttatttaataaactatataaaacttcctatttgccaatcattaattcatttaatcttcacaataacttcatgaggtaggtactac

SEQ ID NO: 620917 - DNA, 391 bp, Homo sapiens
aacagcaacaattattttcatcagtctagcaaaagwcaatttttttaaaggtactttaggtaaaattttcataaactattttggtttcagtgatgctgtattgataccatcgttggtttctgcaattatttaatctaattaacttgagttctccctaatgccttaaccaaaaatacgtattaagcatagtatatgtacagtattgaactaactttctgatataaataatactaaagaagtttggacaagagaaacatgttccctcttcaggacagggcatttcaaacaggtgaagaatgagagtttagtttgtttgtttccccagtccatcagagaccaatatttttgtaaagagaaaaaaaaagtgaattactacaaaaataaaataaaa

SEQ ID NO: 620918 - DNA, 391 bp, Homo sapiens
aacagcaacaattattttcatcagtctagcaaaagacaatttttttaaaggtactttaggtaaaattttcataaactattttggtttcagtgatgctgtattgataccatcgttggtttctgcaattatttaatctaattaacttgagttctccctaatgccttaaccaaaaataygtattaagcatagtatatgtacagtattgaactaactttctgatataaataatactaaagaagtttggacaagagaaacatgttccctcttcaggacagggcatttcaaacaggtgaagaatgagagtttagtttgtttgtttccccagtccatcagagaccaatatttttgtaaagagaaaaaaaaagtgaattactacaaaaataaaataaaa

SEQ ID NO: 620919 - DNA, 391 bp, Homo sapiens
aacagcaacaattattttcatcagtctagcaaaagacaatttttttaaaggtactttaggtaaaattttcataaactattttggtttcagtgatgctgtattgataccatcgttggtttctgcaattatttaatctaattaacttgagttctccctaatgccttaaccaaaaatacgtattaagcatagtatatgtacagtattgaactaactttctgatataaataatactaaagaagtttggacaagagaaacatgttccctcttcaggacagggcatttcaaacaggtgaagaatsagagtttagtttgtttgtttccccagtccatcagagaccaatatttttgtaaagagaaaaaaaaagtgaattactacaaaaataaaataaaa

SEQ ID NO: 620920 - DNA, 528 bp, Homo sapiens
ggtaattgaattatgggggatgtctttcctgtgctgttctcatgatagtgaataagtctcatgagatctgaatgttttaaaaagaggagttccctgcacaagctctctctctctttgcctgctgccatccatgtaagacgtgacttgctcttccttgccttctgccatgattgtgaggcttccccagccacgtggaactgtaagtccaattaaacctctttcttttgtaagttgcccaatcttgggtatgtctttatcatcagtgtgaaaatttactaatacaatattaaacgttattgagtgctrtgtgtcaggcactatgtccattgcttcagattaataaattatttattcaacaatatcaagaggtaagtactagtatttgcctccttattagatgagaaatatttgtggcaaatttaattttatagggtcacatggctagaaattggcaactaaacttttgaatccacataggctgactccagaaccaccatgttgtattccttcctaccatagtatgttggt

SEQ ID NO: 620921 - DNA, 571 bp, Homo sapiens
tagttactctattgccacccaaagttgacttttttgactccagtttgtttttctcaaaaattgaatttcacatttatctttgtttccctttttcttgatgtttatgaggtgaaggcccactaaaattctgtgggcctgcaactgtctcctaaaaaaactagtttgaagtamcactggccccacccacatcttcctcaccagttgccagcccactggagccagggaggaaacttggaaagcagaagaacctgttccaattgtcaagaaagcaaattctgaaggaatgactaacagtattatcagctctatatatctccagtttctcaaaggaatgataatcctattatggtagataaacccaatctttgggttccaacgtacagataatcagttcagttgttcttcacattccatcagtaacctgaaatgtaactcctttcctttcattctttttttttttgtcttcctctatctccctccctccctgccttactcccttttatttttcttttgtccatattttttgacttgaacttattgagtatcattttttggtaatggtgatcataaa

SEQ ID NO: 620922 - DNA, 571 bp, Homo sapiens
tagttactctattgccacccaaagttgacttttttgactccagtttgtttttctcaaaaattgaatttcacatttatctttgtttccctttttcttgatgtttatgaggtgaaggcccactaaaattctgtgggcctgcaactgtctcctaaaaaaactagtttgaagtaccactggcccmacccacatcttcctcaccagttgccagcccactggagccagggaggaaacttggaaagcagaagaacctgttccaattgtcaagaaagcaaattctgaaggaatgactaacagtattatcagctctatatatctccagtttctcaaaggaatgataatcctattatggtagataaacccaatctttgggttccaacgtacagataatcagttcagttgttcttcacattccatcagtaacctgaaatgtaactcctttcctttcattctttttttttttgtcttcctctatctccctccctccctgccttactcccttttatttttcttttgtccatattttttgacttgaacttattgagtatcattttttggtaatggtgatcataaa

SEQ ID NO: 620923 - DNA, 571 bp, Homo sapiens
tagttactctattgccacccaaagttgacttttttgactccagtttgtttttctcaaaaattgaatttcacatttatctttgtttccctttttcttgatgtttatgaggtgaaggcccactaaaattctgtgggcctgcaactgtctcctaaaaaaactagtttgaagtaccactggccccaccmacatcttcctcaccagttgccagcccactggagccagggaggaaacttggaaagcagaagaacctgttccaattgtcaagaaagcaaattctgaaggaatgactaacagtattatcagctctatatatctccagtttctcaaaggaatgataatcctattatggtagataaacccaatctttgggttccaacgtacagataatcagttcagttgttcttcacattccatcagtaacctgaaatgtaactcctttcctttcattctttttttttttgtcttcctctatctccctccctccctgccttactcccttttatttttcttttgtccatattttttgacttgaacttattgagtatcattttttggtaatggtgatcataaa

SEQ ID NO: 620924 - DNA, 523 bp, Homo sapiens
agccagggaggaaacttggaaagcagaagaacctgttccaattgtcaagaaagcaaattctgaaggaatgactaacagtattatcagctctatatatctccagtttctcaaaggaatgataatcctattatggtagataaacccaatctttgggttccaacgtacagataatcagttcagttgttcttcacattccatcagtaacctgaaatgtaactcctttcctttcattctttttttttttgtcttcctctatctccctccctccctgccttactcccttttatttttcttttgtccatattttttgacttgaacttattragtatcattttttggtaatggtgatcataaatcactgtcactttcaactacctatcacacttcctaccaaaggcaagtatgtcaaagcatatttgcccctggtcattacttccccaaattcacctttgttaggtcttggaatgaagtaaaacgagaaaaacatgtttacatagttgcatgtggtctttctagtcaaatc

SEQ ID NO: 620925 - DNA, 308 bp, Homo sapiens
ttataaaagtgtgtgattattctgttggttaaaatacatttggtcactgttcttttacagaaacactcaggtaccacatcaaagtcaatgtttatccctaattttatcagcttttaaatattttcagagccaaggattcctgaattcctcaactattcaaaattatttcaccaacaatgagtatactacatgttcctgctttcaatsttgatctataacctattacatttgttttgattatgtaaactatgtacatttctaattaaattacagagggaaagaattaagcaagcctcaaatataagaaa

SEQ ID NO: 620926 - DNA, 406 bp, Homo sapiens
cttatctccaaataccatcaccttgagggttagtacttcaacacatgaatattcaacggatacaattaagcagtaggaattagcagccagacaatcaaattgagtaagtaagcaccaatgcagaaaaagtttacgaataaatggaaaatatgagcaaaataatatgagctatggaagagagatctgggatacctaatgtatgaawaacataattattaggggacaaaacagaacagaggataaataatgtacaatgaaataatggaataccagttcactgaactgaagacaaacttaaagtttcaaaaaaggccattgagttccaaacataattaataagacacacatacatattgtggtaaagctttgtaaactaaaaagttacaggaaaaaagagtacaatgtc

SEQ ID NO: 620927 - DNA, 638 bp, Homo sapiens
ctagatgaatgtggtactgttctctgagttaatgattatagggggagataaggaagtgccttgggaatggcatgaaaagtccacttttgcatattagtttgtgttaacatccatgtaaggtaacagaaggcagctggataacatacaaatgaatcttatgagagtggtgtggtctagaaatataattgaaagttataaggaaataaatggtaattaaagtsatgagagtggacaatttagccctcgaattctgtggtaagagaagaagatttcagagaaaggatcaaaaacatttaaggcacagtcagggactagcagtccgaaatggactctgttggaagatccaagaggagtaagagaaaatccagtagaggaaagaacttggccatttattggatgtgacaataacgcataaacagttaaaaaatgattctacccctataatctcagcactttgggaggctgaggcaggaggactgcttaaccccaggagtttgaggctgcagtgaactatgattgcaccactgcaccccagcctgtctctagaaaaaaaaaaaaagattctaaagttttgactatgagacttactggtatatattggtgacctgtaaatgtttataaatgtatttgtatagtta

SEQ ID NO: 620928 - DNA, 582 bp, Homo sapiens
cttctgggatttatgatctaatatcctcacagggacatggagtggctctttgaagtttagaggcacagatcgcctataataagtggggtaaaataccagaattatattgactgagtgttgaggaagagaatagtagacttagacatgtggacctctaggaacaggcactatgcctatagatctttgtgtcttacatcaatgctcactagagtgcttactacagaagacctgctggacaaccaactggagagaatgattcaatcagtacgtgtaagccagcttctgtcattagccatgttggtgcttgtacaatgggcccatgaacagaataaatacagtggaaggaggctatctgtgaacccaactgcttacacttcctttcactaagcctgatgagtatcagagaccaycactgagtctttaatagtacctttaagggtaccatttcttaaagacaccaaccagttctttggcagcaagttaattacttcaaaacttatggagaaagcaacctagagcagtaaaagtgtagtttgagagtgagggtatccaaaatattagtagaagaaggaaataatgagc

SEQ ID NO: 620929 - DNA, 606 bp, Homo sapiens
tagaacaataatacatttgaatttgattgcagtctattctctccaaaactggttggtacttctaaccaagaagcgtagttcatatactcttaaccatagagagaaattttcttctttaaagcgtgatggtggctttacacaataaatatttgtttttcaatcatgtacattccaattctgggtagtgacttttctaggcttttgtgatccaaatgctactcatgattttgatcccaatagcttagggatcagcttagggatcagagtgctcccattaattagaacaatacaaataatgtgatatagagaaatcttggagggcatgtattttagctagaaagaccactttcaataggcaacatttgagctttaagaaagaaagatctatcccctgactcccttccccaaaatggaagagagatactttcattttcatctctgatctgtaaagagtgtggaagttctcactcttgtgcttacagcaacaacaacaaaaaaagatgatcaaactgaaaatcaacaacttgtcttgaactcgtagaaacttgaggttgcaaagcaaaataccctwaatctggagacgtatgaatccagacagtaagagcc

SEQ ID NO: 620930 - DNA, 340 bp, Homo sapiens
acaaagcgtccacagtgtggtaggggacccgagcaggttgccactgctggttcaggcagcctgcttttattcccttatctgaccctacccacatcctgctgattggtccattttacagagagccrattggcccattttatagagagctgattggtccgttttacagaaagctgattggtccactttgacagggtgctgattggtgcatttacaaaccttgaggtagacacagagtgctgattggtccactttgacagggtactgattggtgcatttacaaaccttgagctagacacagagtgctgattggtgcatttacaaaccttgagctagacacaaa

SEQ ID NO: 620931 - DNA, 572 bp, Homo sapiens
gaatattgttaaaatgtagattccaacttgattggtgtagggtggagcctgagattctgcacttctaacaagtcccaaggtagtaagatactgatggtccacggrccacactttgagtagcaaggggttgaaaaactggagggagacacctctgacttatctttctgagcaagtcacatacatagtgtatccatagaaatgaagttttaaaattcctttttttaggtttaaatgtaacggaacttattctgtggttttatctggattagtcaaaaactttattgagaagtgtaggttccagaatatgatacatggaatggactaacacgattattccttttcattgtataaattttatattgccaagaataatcacaagtttgtagttgttcctagaatacatttatttttaaaagtaggaaagcttttggctatgtctgtgcctaaattgctctaatttgtggtgtctttcttaaccaatagcgttcctcttataagacgtgtattttgaggcttcccaaaagattaacctgatcacataacaagagtgtaaaaacttgtggttgaccgct

SEQ ID NO: 620932 - DNA, 631 bp, Homo sapiens
caaaccaccatggcacgtgtatacctgtgtaataaaactgcacgttctgcacatgtaacccagaacttgaagtatgatttaaaaagaaaagaagcaacacaggataaactcaaatagagtagaagaaataaaataatgaaaacagaaagtcattgaaatagaaaatgaattttaaagagatagaattaatgatgatggtgatgttgttggtgatatcactaacacataatacttgctatgtaataaaccaggaactaatttaagtgcattatatatattaatctattttgtcctcaaaagaaccctatgagattggytctatttttatctcccttgttacaagaaaagaaactaaggcatagagaagtttaatcaaaaagttcaaaggtaattctttaacaaaactaatataatacacaaaccttttatgaaactaatcaagaaaaatgatagaagacaaaagtaaataaaactaagaatgaaaaatgtatttgaattagagataaaacagcaattctaaagaaagacactatgaatgaaaagtcagcagacagttttgctcttgttgcctgggccagagggcaatgacgcaatcttggctcaccgcaacctccacctcctggattcaagc

SEQ ID NO: 620933 - DNA, 554 bp, Homo sapiens
agaaatgggaagaaaagaaatagtacatgaaaacaatagcaaaaataaaaatagtaaatattaacttaaggatatcaataatttcattaaccataagtagtttaaacaaatccattaaaagacaaagattgtcagactgaattaaaaagcaagactcaagtataagctgtctataagaaacttaatttaaaactaaggttaaaagtgagaggatagaaaaactatagcatgcaaacactagtcaagctaaagtgrttatattaatattagacaatattatcattacatagtgataaacagatcaattcataaaaagacataacaatccaaagcatatatctacttctcagcagatctataaaatactgtgcatacaacaaaaactgacagaactaaaagtagaaataaacaaaatgtggacttagtttaactctcttctctcagtaattgataaaacaaaaagacagtaaattaataagaatatggaagatcacagaaatactaccaaccaattggcctaattagtatttatagcataaaatataccacagtat

SEQ ID NO: 620934 - DNA, 596 bp, Homo sapiens
atcaagatgatgccagtttcatagaatgagttagggaggaatccctctgtattagtctgttctcscattgctgtaaagaaatacctgagactgggtaatttataaagaaaagaggtttaattggatcatggttctgcagtttgtacaggaagtatagtggcttctgcttctggggaggcctcaaaaagcttccaatcatggcagaaggcaaagaaggaatgaagcactccacatggccagagcagtaggaagagaagaaaggggaggtgccacacacttttaaacaaccagatatcatgagaactcactcactcttgtgaccacagcaccaaggggggatgatgttaaaccatgagaaactgccatgatctaatcacctcccaccaggctctaccaccagcgttggggattacatttaaacatgaaatttgggtagggatacagatccaaaccatattaccctccttcttgattttttggaaaagtttcagttggattggtaccagctgttctttgtacgtgtggtagaatttgtctgtgaattcacctggtgcagggctctttttgttggtaggtcttttattactgattccatc

SEQ ID NO: 620935 - DNA, 596 bp, Homo sapiens
atcaagatgatgccagtttcatagaatgagttagggaggaatccctctgtattagtctgttctcccattgctgtaaagaaatacctgagactgggtaatttataaagaaaagaggtttaattggatcatggttctgcagtttgtacaggaagtatagtggcttctgcttctggggaggcctcaaaaagcttccaatcatggcagaaggcaaagaaggaatgaagcactccacatggccagagcagtaggaagagaagaaaggggaggtgccacacacttttaaacaaccagatatcatgagaactcactcactcttgtgaccacagcaccaaggggggatgatgttaaaccatgagaaactgccatgatctaatcacctcccaccaggctctaccaccagygttggggattacatttaaacatgaaatttgggtagggatacagatccaaaccatattaccctccttcttgattttttggaaaagtttcagttggattggtaccagctgttctttgtacgtgtggtagaatttgtctgtgaattcacctggtgcagggctctttttgttggtaggtcttttattactgattccatc

SEQ ID NO: 620936 - DNA, 596 bp, Homo sapiens
atcaagatgatgccagtttcatagaatgagttagggaggaatccctctgtattagtctgttctcccattgctgtaaagaaatacctgagactgggtaatttataaagaaaagaggtttaattggatcatggttctgcagtttgtacaggaagtatagtggcttctgcttctggggaggcctcaaaaagcttccaatcatggcagaaggcaaagaaggaatgaagcactccacatggccagagcagtaggaagagaagaaaggggaggtgccacacacttttaaacaaccagatatcatgagaactcactcactcttgtgaccacagcaccaaggggggatgatgttaaaccatgagaaactgccatgatctaatcacctcccaccaggctctaccaccagcgttggggattacatttaaacatgaaatttgggtagggatacagatccaaaccatattaccctccttcttgattttttggaaaagtttcagttggattggtaccagctgttctttgtacrtgtggtagaatttgtctgtgaattcacctggtgcagggctctttttgttggtaggtcttttattactgattccatc

SEQ ID NO: 620937 - DNA, 614 bp, Homo sapiens
aataaaacaattatacatttcaatttcaaaatttcaaattcagtaaaatatttcatgtacaaaacaatttgtactcatgagcaaaactattacatctgtaattggcactgtttcactgtttgttttggggaattattcttgtccctttaaaaaatctttttgttttgaatatagattgacaggaagttgcacaggtgacagagagaggtccatatacctttcaccccccccccccccccccgtggccccattggggcatgctgggttaattagctattgttaatygaaattgaaagcaggaggttggctttggtactgtgtgttgttctatgccattttatcacgtgcagatttgtgtaaccaccactgagttcaagattcagaactggagccaatgttggggttctgccagctgctaagtatgtcttagtttgccaattatgcatactggcactggaaaaatgaccacaggataagcctgggaacccactgaacccactgtaagtcagacctgagctaaaactccattaattacctgacctccataagcctttactttaactggaggaccacagtgatattttgggttccctggaatcaacatcagctaagag

SEQ ID NO: 620938 - DNA, 551 bp, Homo sapiens
gttctatgccattttatcacgtgcagatttgtgtaaccaccactgagttcaagattcagaactggagccaatgttggggttctgccagctgctaagtatgtcttagtttgccaattatgcatactggcactggaaaaatgaccacaggataagcctgggaacccactgaacccactgtaagtcagacctgagctaaaactccattaattacctgacctccataagcctttactttaactggaggaccacagtgatattttgggttccctggaatcaacatcagctaagagccaatgtccagtagtccctgaaatgtctgataatttccctttccccaatgcaatggtaaaaggccagaggtctccytggggaaggatgggagaaagattcacagcataaattgttggcaatgtagtggggtccttcctcaaggggacctggcctccccttcattcagggggttctgggtctgtaaactggctcaaatctgggaattgattgaggggccatgattctctgtttttataattcaaattagtcttttgtcaatt

SEQ ID NO: 620939 - DNA, 564 bp, Homo sapiens
gagcaggggatcaacttgacctcttcttgggaggaactgaaagtcagattgcagaggattggacacaggaaggctgctaggaactgaatgtttgtgtccccccatattcaaatgttgaaatcctaatccccagtgggatggtattaggatgtggggcttttgggagatacttaagtcatgggggggtggaactgamactgaaccaatagtcgtataatcatatagacagtgatatatatatacatgtacagaaattgacctttcaggtcttaaagcttgaaacttacatttgttttaactgagttccttcctcagtgaagaactctcaggcctttcaaaaaaaaagtatcaaagaactgaaactcatccagacaatgagacgccaggcccttcattcatcataattgcttccttacccctccctagttcctggtttttttatgtgttattacattgcttccctgctatataaacctctaattttagctggccagggagacggatttgagatggagctcccatctgcccagctgcagcacccgattaaagccttcttccttggca

SEQ ID NO: 620940 - DNA, 564 bp, Homo sapiens
gagcaggggatcaacttgacctcttcttgggaggaactgaaagtcagattgcagaggattggacacaggaaggctgctaggaactgaatgtttgtgtccccccatattcaaatgttgaaatcctaatccccagtgggatggtattaggatgtggggcttttgggagatacttaagtcatgggggggtggaactgaaactgaaccaatagtcgtataatcatatagacagtgatatatatatacatgtacagaaattgacctttcaggtcttaaagcttgaaacttacatttgttttawctgagttccttcctcagtgaagaactctcaggcctttcaaaaaaaaagtatcaaagaactgaaactcatccagacaatgagacgccaggcccttcattcatcataattgcttccttacccctccctagttcctggtttttttatgtgttattacattgcttccctgctatataaacctctaattttagctggccagggagacggatttgagatggagctcccatctgcccagctgcagcacccgattaaagccttcttccttggca

SEQ ID NO: 620941 - DNA, 564 bp, Homo sapiens
gagcaggggatcaacttgacctcttcttgggaggaactgaaagtcagattgcagaggattggacacaggaaggctgctaggaactgaatgtttgtgtccccccatattcaaatgttgaaatcctaatccccagtgggatggtattaggatgtggggcttttgggagatacttaagtcatgggggggtggaactgaaactgaaccaatagtcgtataatcatatagacagtgatatatatatacatgtacagaaattgacctttcaggtcttaaagcttgaaacttacatttgttttaactgagttccttcctcagtgaagaactctcaggcctttcaaaaaaaaagtatcaaagaactgaaactcatccagacaatgagacgccaggcccttcattcatcataattgyttccttacccctccctagttcctggtttttttatgtgttattacattgcttccctgctatataaacctctaattttagctggccagggagacggatttgagatggagctcccatctgcccagctgcagcacccgattaaagccttcttccttggca

SEQ ID NO: 620942 - DNA, 544 bp, Homo sapiens
catgggggggtggaactgaaactgaaccaatagtcgtataatcatatagacagtgatatatatatacatgtacagaaattgacctttcaggtcttaaagcttgaaacttacatttgttttaactgagttccttcctcagtgaagaactctcaggcctttcaaaaaaaaagtatcaaagaactgaaactcatccagacaatgagacgccaggcccttcattcatcataattgcttccttacccctccctagttcctggtttttttatgtgttattacattgcttccctgctatataaacctctaattttagctggccagggagayggatttgagatggagctcccatctgcccagctgcagcacccgattaaagccttcttccttggcaatacttgctgtctcagtgattggctttctgagagaagcaggacgtagactgaacccctggtgtttccataacagagcccttgtaatgggattagtgtccttattagaagagacaccaaaaacttgcttcttctctgcactcagccatgtgaagata

SEQ ID NO: 620943 - DNA, 433 bp, Homo sapiens
tgaaacgcaggccagatttcagccccactcaccrcacagttgtcagccttgggcagtgctggacccacaaaactatgcatggctgtcctgcgtgcagctcagcagttagcacacccagtggtaacacacaaggtagtaggatagggagacaaagggaagtagagagatgatcgattttaaaagtacaggagaaaggtgagagtctctgagcttcaaacctgtatggaaggacacaccccaaatccctgtggctagcagtcttgataggagaggaattggagagactcacggagggggctgggatttcaggtaaattttattttagtctttattgaatcaacagacgcttgactttttaattaaaaataaagcaaaggatccattttgccattctggttgagtgccattgggcgggagctgctggacggcagga

SEQ ID NO: 620944 - DNA, 433 bp, Homo sapiens
tgaaacgcaggccagatttcagccccactcaccacacagttgtcagccttgggcagtgctggacccacaaaactatgcatggctgtcctgcgtgcagctcagcagttagyacacccagtggtaacacacaaggtagtaggatagggagacaaagggaagtagagagatgatcgattttaaaagtacaggagaaaggtgagagtctctgagcttcaaacctgtatggaaggacacaccccaaatccctgtggctagcagtcttgataggagaggaattggagagactcacggagggggctgggatttcaggtaaattttattttagtctttattgaatcaacagacgcttgactttttaattaaaaataaagcaaaggatccattttgccattctggttgagtgccattgggcgggagctgctggacggcagga

SEQ ID NO: 620945 - DNA, 433 bp, Homo sapiens
tgaaacgcaggccagatttcagccccactcaccacacagttgtcagccttgggcagtgctggacccacaaaactatgcatggctgtcctgcgtgcagctcagcagttagcacacccagtggtaacacacaaggtagtaggatagggagacaaagggaagtagagagatgatcgattttaaaagtacaggagaaaggtgagagtctctgagcttcaaacctgtatggaaggacacaycccaaatccctgtggctagcagtcttgataggagaggaattggagagactcacggagggggctgggatttcaggtaaattttattttagtctttattgaatcaacagacgcttgactttttaattaaaaataaagcaaaggatccattttgccattctggttgagtgccattgggcgggagctgctggacggcagga

SEQ ID NO: 620946 - DNA, 538 bp, Homo sapiens
ccccaccccactcatcttctatcacctgctgcattttccacatgacaacgaccactctctgaaatcatcttgtggatttaattgtggcttcttcaccgtctgtccacccctccccagcacagtgtctggcacgcagagggcatgttgaacaaattggtgaacaaatgagtgagacttattccaggcaggcaggggctttggagactctaaggcatgtggggcactccaagctggaccttgaggctgctgagtgaggggcagtggagactaaccaagctgaaatcagatccarttcgttgctaatgactttgtgttcctgggcaagttgcctaacatctgtgagctttatcttctggaaaatgggagcaggagcacctagcttactggggtgtccctggatcgataaagtaattcagaagaaatggggggggggttctgtccctagcgctaggaattgtctgccatactcaataagtgcttgttaaaggaatgaagggctgacataagagcttgatacatatcagccagtccatgctgc

SEQ ID NO: 620947 - DNA, 612 bp, Homo sapiens
gtctgccatactcaataagtgcttgttaaaggaatgaagggctgacataagagcttgatacatatcagccagtccatgctgccactgatgtcagatgcacgattatttcctgaagcattgagaaagaaacgttgtttaaatattgcgaatgaagccataacccattgctctcatatcacctggaatttttattttatacttactcaaatatctcttttaggcttattagcacatagatttaaaaaaaaaaaaaccacagatcactattgagtttacatcaaaacggcaactatcagygcaatcaatcatcagtggaggtattcctaaaacttctttgagaagccttctttgagagaggtcagaggcacctctctcaatggacaccctttaagctgctcttcccctgtgaatttctatgccttgctgaagaaccacccccccaccccgccccgccccaagcttctcctcccctgtgaattccttggcctagctgaaggactcccctctgtggtcttcccctccagtgttggtgcctgagaggccaggggccaccactgttcactggaatggctaaataacctcggcagtacacccatgggagtgggcgggagg

SEQ ID NO: 620948 - DNA, 612 bp, Homo sapiens
gtctgccatactcaataagtgcttgttaaaggaatgaagggctgacataagagcttgatacatatcagccagtccatgctgccactgatgtcagatgcacgattatttcctgaagcattgagaaagaaacgttgtttaaatattgcgaatgaagccataacccattgctctcatatcacctggaatttttattttatacttactcaaatatctcttttaggcttattagcacatagatttaaaaaaaaaaaaaccacagatcactattgagtttacatcaaaacggcaactatcagcgcaatcaatcatcagtggaggtattcctaaaacttctttgagaagccttctttgagagaggtcagaggcacctctctcaatggacaccctttaagctgctcttcccctgtgaatttctatgccttgctgaagaaccacccccccaccccgccccgccccaagctkctcctcccctgtgaattccttggcctagctgaaggactcccctctgtggtcttcccctccagtgttggtgcctgagaggccaggggccaccactgttcactggaatggctaaataacctcggcagtacacccatgggagtgggcgggagg

SEQ ID NO: 620949 - DNA, 586 bp, Homo sapiens
tcctttcccctcttgactggtgtaggtgcattctaccttctttcacaactctgtatggtagagacatagctggaaaccaggtccctcaggcctccctttccacagaagtcagaccttcacttcctgtcctttcaaatggagaggattaaatgcagtcacgtaagtcacttggctgctgggaccagcgcaggaaagttactgtagggtcactaggttgaaagacgtaggagtaaccccaaggctggaagggattaagggccgcagtcacagactgatgattcattcattccaggcggtcaaggttgggtaggttttctggctcctcaggaaaagcaggcgagtagtctgggagctgtttgcaaggctgaattaagaactcagagtgagcaagagctggtttaccacacctggcaggactggggtgaggaaagtggctgcagccttcggaaagtgcttgctgtctccctctcctctccccacgccgccctcccmccgccacccccccgcccacccctcattccttccgccttgaggtaccggcaggggaagtgcaagctcaggttctgggaagagcctatcaagccaa

SEQ ID NO: 620950 - DNA, 586 bp, Homo sapiens
tcctttcccctcttgactggtgtaggtgcattctaccttctttcacaactctgtatggtagagacatagctggaaaccaggtccctcaggcctccctttccacagaagtcagaccttcacttcctgtcctttcaaatggagaggattaaatgcagtcacgtaagtcacttggctgctgggaccagcgcaggaaagttactgtagggtcactaggttgaaagacgtaggagtaaccccaaggctggaagggattaagggccgcagtcacagactgatgattcattcattccaggcggtcaaggttgggtaggttttctggctcctcaggaaaagcaggcgagtagtctgggagctgtttgcaaggctgaattaagaactcagagtgagcaagagctggtttaccacacctggcaggactggggtgaggaaagtggctgcagccttcggaaagtgcttgctgtctccctctcctctccccacgccgccctccccccgccacccccccgcccacccctcattccttccgccttgaggtascggcaggggaagtgcaagctcaggttctgggaagagcctatcaagccaa

SEQ ID NO: 620951 - DNA, 399 bp, Homo sapiens
gaattctcatgctgctaataaagacatacccaaggctgtgtaatttataaaagaaagagattcaatggactcacagttctacgtggctggggaggcctcagaatcatagtggagaccaaaggggtagcaaaggtacctcttacatggtgacaggcaagagagcttgtgcaggggaactcccatttataaaaccatcagatctcatgagacatattcacttccaggagaatactatgggaaaaccacccccataattctattatctccacctggccccattcttgacatgtgggaattattacaattcaaggtgagatttgggtggggayacagccaaatcatgtcaggaccatcttctgaaatctggttaacagcctctttcctttgcttgttcagact

SEQ ID NO: 620952 - DNA, 573 bp, Homo sapiens
gtttgtctttttacatttattgcattcagataactaattatttattccttaatgtgtcaggtgctgttctaattttttttttttttgagactgagtcttgctctgttgcccaggctagagtgcagtggtatgatctcggcccactgcaacctgggtctcctgggttcaagcgattctcctgcctcagccttccgagtagctgggattacaggcacctgccatcacgccctgctaaatttttgtatttttagtagagacggggtttcaccatgttggccaggctggtctcaaactcctgacctcaagtgatccacctgccttggcctccsaaagtgctgggattacaggcatgagcacttttgcacaaaaaggacttctggttctggacaagatacaatagactcacttcttcctattcctccaccaagtaaaactaaaatccctggagatacataacaaaagaataatctgaaacgtggagaaaaagggagactggctagggaccttgagacctgaggaacaacatacagatgggttccctgggttttctttttgcctcctatatcccagact

SEQ ID NO: 620953 - DNA, 508 bp, Homo sapiens
tggaaaatacttgatgcatgcaaataagaaaactcttactttttccttctctccttgcagggggagcacgcgtcctaagcttgccaggaagccctgctctcctgccctgggcacctccgttccacttgaccttttccacctgtactccctgcattttggtctcttgctctggtctttagccttcgcattttcctgatgcagcccaaaccagtcacctctctcctagattcattctctgtgctcagaccatctctttcctttagttcctgtgacgaaagaaaatgtatttggccattggaggtataagcaacaaagaatccaacccacacagctttatatatgcaggttctctatatgctcttcttgtgaacagcgtggggagaggaaaatagacttggcaagaggactaagaacagaatcrgacagttatctgatggctttcctaaggttcaggaaagaacagtggtccctttgttgggcctttctgttgtttctttgttttcaattt

SEQ ID NO: 620954 - DNA, 180 bp, Homo sapiens
ccagcaattaacgagcgttcctgttgctccacaacctcagcagcrtttggtgttgtcagtgtttcatattttagcctatataataggtatatggcggtatctcattgttgttttaatttacaattccctaatacaaatgacattgaacatctcttcataggcttatttgccatttgtatg

SEQ ID NO: 620955 - DNA, 180 bp, Homo sapiens
ccagcaattaacgagcgttcctgttgctccacaacctcagcagcgtttggtgttgtcagtgtttcatattttagcctatataataggtatatggyggtatctcattgttgttttaatttacaattccctaatacaaatgacattgaacatctcttcataggcttatttgccatttgtatg

SEQ ID NO: 620956 - DNA, 544 bp, Homo sapiens
tcagtcctcagaaatataaagacatctccccaactcacatatacatcatacccgcatctcttatgctttggagcccctgctctgtcctgggaagaggatgaacattgtacaagtatggggcagatatactaagtcataatttatgaggctgaaaagggagaaatgatgattttttaattggagtctaaaaaggtaccttgatgcccagattggcaaagaacctttcaagattcttgtatcctgatagctgagtgccactcctcattaaaacaaagcattaaaaagatacttttcagatacagataagatacaatcataattttgcatgcaatggctagaaatttcttgtgcagaaactatattaagacattttaaaaaaggaattaaaaaaatccattctcktctagttaatgatccatgtccattctagaggtagagaatggggaatggatatgggcagtgaggaatcagcatgaagaattacaaagaacatgtagcttggagtcagaggaattggggtttgcagagagcaggaaacatagct

SEQ ID NO: 620957 - DNA, 612 bp, Homo sapiens
taaaacaattacacaataaaaaaaacaaactgagtaaccattaacatggtaactggaacagtatctcacatcaatattaatgttgaacataaatggcctaaatgctccacttaaaagatacagaatgtcagaatggttaaaaaaaatcacaaaccaaatatctgctatctttaagagactcatcaggctgggtgcagttgttcaggcctgtaaacctagcactttgggaggccragtcggaggcgtcacctgaactcacaagttcaagaccagcctggccaacatggtgataccctgtctctaccgaaaatacaaaaattagcagggtgtggtggtgcatgcctgaaaccccagctacttgggaggctgaggcagaagaatcacttgaacccaggaggcagaggttgcagtgagccaagatcatgccattgtactccagtctgggtgacagagcaagactcttctgggggaaaaaaatgactcacctaatacataaggattcattatactcagggtaaaggcgtggaaaaagatagtccatgcaaatggaaatcaaaagttagcaggagtaggtattcctacattagataaaacagattttaaaggaacaac

SEQ ID NO: 620958 - DNA, 612 bp, Homo sapiens
taaaacaattacacaataaaaaaaacaaactgagtaaccattaacatggtaactggaacagtatctcacatcaatattaatgttgaacataaatggcctaaatgctccacttaaaagatacagaatgtcagaatggttaaaaaaaatcacaaaccaaatatctgctatctttaagagactcatcaggctgggtgcagttgttcaggcctgtaaacctagcactttgggaggccgagtcggaggcgtcacctgaactcacaagttcaagaccagcctggccaacatggtgataccctgtctctaccgaaaatacaaaaattagcagggtgtggtggtgcatgcctgaaaccccagctacttgggaggctgaggcagaagaatcacttgaacccaggaggcagaggttgcagtgagccaagatcatgccattgtactccagtctgggtgacagagmaagactcttctgggggaaaaaaatgactcacctaatacataaggattcattatactcagggtaaaggcgtggaaaaagatagtccatgcaaatggaaatcaaaagttagcaggagtaggtattcctacattagataaaacagattttaaaggaacaac

SEQ ID NO: 620959 - DNA, 612 bp, Homo sapiens
taaaacaattacacaataaaaaaaacaaactgagtaaccattaacatggtaactggaacagtatctcacatcaatattaatgttgaacataaatggcctaaatgctccacttaaaagatacagaatgtcagaatggttaaaaaaaatcacaaaccaaatatctgctatctttaagagactcatcaggctgggtgcagttgttcaggcctgtaaacctagcactttgggaggccgagtcggaggcgtcacctgaactcacaagttcaagaccagcctggccaacatggtgataccctgtctctaccgaaaatacaaaaattagcagggtgtggtggtgcatgcctgaaaccccagctacttgggaggctgaggcagaagaatcacttgaacccaggaggcagaggttgcagtgagccaagatcatgccattgtactccagtctgggtgacagagcaagactcttctgggggaaaaaaatgactcacctaatacataaggattcattawactcagggtaaaggcgtggaaaaagatagtccatgcaaatggaaatcaaaagttagcaggagtaggtattcctacattagataaaacagattttaaaggaacaac

SEQ ID NO: 620960 - DNA, 584 bp, Homo sapiens
ctcctgtgtagctaagattgcaggcacatgccaccacacccagctaaattttgtatttttagtagagatggggtttcaccatgttgtccgggctggcctcgaactcctgaccgcaagtgatctgcctgcctcagcctcccaaagtactgggattataggcgtgagccaccacgcctggccttcagtgagtgctttgacagaattttacctgaatgtcaagagctaaaaaacaaaacaaacaaacaaacaaaaatacttttctcagtttttgccaattgggcgtgtactggggccctccttcaacacttagccaggctttcactgagcttaggaatcagctgtgatgaaacctgaagtttttaatcatgtcttttctgagcaagcatcttgccctgggcacatgcatggctgkctaaattccctgcattcacaggtgcttctgattgtcctaacttcccaaagaaactctgttctcaaattttttgcccaagccttaggtggtttattgcatgtctcaactgtgaccttttgcctcaggccttgttcttctaccttatgatgattcaagcaatgcctgctgcttt

SEQ ID NO: 620961 - DNA, 560 bp, Homo sapiens
ttatcagactttctcttatctattaactttttcaaacattagtccatttctgctatctcctcttcctcacttgccattaactcctaaatccatgtaacctggtttctcaccttcccttgctgtgcaaatgtttctcagactggttgcccaacagcctcattgtcaaacctagttgggattctttagtattcctcctaatggcagcctcctgctgtacctgtgatggcgaccaccttctctacttagagcctcagtggcatcacaccctcctactcttccccttcttgtttttcccctcctttttctctctacctttcaaatcattttctcctatggctcattaaatattggtagtacccagcttttggtcctgtgcccattgttctatttgctctatacataggtcttggttttatctgtgttagtggctttaacaacatattacacactaatcactttcaactccatgtcttctatccrtcttcttaacctgaaattcagtcttgaatttacaactgcccccaagacattactactacctggcagttcaaactggatct

SEQ ID NO: 620962 - DNA, 569 bp, Homo sapiens
gagaatctagaacactttaaacctaaagtgctttcccatgtaggaagcacttgagatagtcacctaattcatagctcattcttaatctgggccagcatgccccataagaggcaccttgctgagctcagcacaactacactgctacctccagctccagccatcctgggagtccttctctcctcagcctcctcgatttttagttacaggacctagggcaattttaggtgattcagacttgatttgaggtgaagactcctttttctcaaaaggagccttttctattcattcttttttcttgaaatacacctttttgttggcggagcacagaccccagccccttctcatgccatatgtgcccggaaggattctaggagcaaagctggaacgaccttgacccakggcaatgagctagacttatgagtcagttattaattgacttgaagtttacaggatagtttgtaggataagaacacattttccctgacttccctaattctctaatgttctaaagttctgtacatccagccagagcccccagtttctgtctctaacccatccaccttgcttgc

SEQ ID NO: 620963 - DNA, 524 bp, Homo sapiens
ataaaacttgatcctcatctctcaccttataaaaaaatattgatttttttataaggtgagtggcatattcaaaatatgttgttttatttctaagtgtttatggagtttctaaatttccttctactttttatttctattattcaaaatatgttgttttatttttaagtgtttatggagtttctacatttccttctagtttttatttctagtttcattccactgtgattagaaaagatactttgtaagattttaatmgttttaaatgtattaagacttgtttaatgacctaacatatggtcttaatgtattaagacttgtttaatgacctaacatatggtctaacctagaggatgctccatatgcattttagaaaaatgtatattctgatgttattgggtgaagtattctttggtctgttaagtccaattgatctatagtgttgttcaagtcatccatttccttattcaccttttacctggttgctttatccattactgaaattgggatatgaatgtctcccacga

SEQ ID NO: 620964 - DNA, 561 bp, Homo sapiens
ggtttctaatggtttatcaccatccccctagtgctctctcatgatagagttctcatgagatctggttgtttgaaagcgtgtagcacctcctgccactgtctcctgtcggccatgtgaggatgtgcttgcttttcctttacattccatcatgactgtaagtttcctgaggcctcccaagaaggagatgcctgtacagcccacagaaccatgagctgattaaacctcttttctttataaattactcagtctcaggtatgtcttcatagcagtcttagaatggactaatacagtatggatgtccttttattgacctagatgatgcacaatcaaacttcagctgtgggcactatgactcatgcctgcaatcccagctactgagcaggccgatgtaggaggattgcttgagcctaaaatttataaaaaataaaacaaaagacaaacaaaaagccctcagttgcatagaaatatgaaacagggaggttaggcaggtrgtttgttataagaagtcaaccaagaatcagaaggagcaataataatactagttaaattgattgagtactt

SEQ ID NO: 620965 - DNA, 514 bp, Homo sapiens
aaaaatgctgaaggaagtttttcaatcagaaggaaaaaaatgttaacaaccaataagaatcatctgaaggtacacaactcactggtaatggtacacagaatattataacactgtaattgtggtgtataaactaatcttaagtagaaagactaaacaatgaactgatcaaaaataataaatacaataacttttcaaaacacaaacagcacaataaactataaatagaaataacaaaaagttaaaagtgtggggacaaagtcaaaatgtagagtttttattagttttctttgcatttgtttgtctctgcactcagtgttaagttctcatcagtttaaagtaatggatcacaagatagtatttgcaagcctcatggtaacctcaaataaaaaawacatacaacagatacacaaaaaatagaaagcaaaaagttaaatcataccacaagagaaaatcaccttcactaaaaggaagataggaaggaaagaaagaagaaagggaagaccacaaaacaacc

SEQ ID NO: 620966 - DNA, 616 bp, Homo sapiens
tcctaatgtgtctacattgtttaatattctacaatttcttcacttacaaaatagatatgatattgatcttgctgatacagagaaaagaatttaaagcatgtattctgcaactttaatatgcaaaataattgaaaattaactttcttaaatagtatattaagcacatggttggtatttaacaattattaggtatctttcttcttttcttcattatcgtcttattctccttctttattatggggagtggaaaaagcactgaaccaggagttgagggaattattccagtgttggactgtcactgctagacatcagaacaacctcagtatcctcaccttaaaaacagagtaatgccatttcccttttctacatcatayagttttgtgaccgtgaatgagaaaatgaatgtaagaaaattctcaagtcataatatcctatataaaagtaaggtgttattagcaggactttaaagtgaaagctaaagagattatttgggcctattaataatttgtcacagactttatcatttataagttttagatgactttcagtttgtaagggctccaagtagctattcatgtttctctaaccccatgaacatatatcactcaaaaatcac

SEQ ID NO: 620967 - DNA, 441 bp, Homo sapiens
tcaatatgggattaggagagggtaggattcaaaggtgactactctctccctcccgttttttgtctcaggtgtggtaccattcactgagacacagaacaaaggcaaagaaacagatttaggggcaaggataggaaatgctaaatgctgtggggtttttcttttgaactgcctttttgtcatctaagtgaatcaagttaggacagtgagctgtaagggtctgagatgagcagagatcagcacaaggattcgtcagtatacagatcacacctgaatttatggragtggatagtaaatctgcagaacaaaaagagaagacatctaaggaacttcaacagttgagcgacaaataagattatatctcaacatgagatttggagggcacatccaaactatcacacacaccgtctcattgacaacaaattgtaggaattttaaaaattc

SEQ ID NO: 620968 - DNA, 563 bp, Homo sapiens
aaatagaggcatcaatttacataaaattacaatagaaatgtttatatatacaatagtagagggctgtatgccattgtgtaatgatatttggccatatacgaaagaagcaaagaacactattcaataaataatgcaggcacacatgcacacatgcacacacacacacacacacacacacacaaaagatctctaccttaaaccatacacaaaagtaaattccaggtagattttaaaactraatataaaaaccatcaaactctacagactttagaagaaaatatttaaaaattcttcgataacttcaaggtagaaaatattttcttaaataagacccaaaaatctacaactgtaaaattttcttttacattcaattacctaaaatatcaaaagtcaatgttaaaataataaaatgatcaggctcagagtagaagaaataatttgcaactcatataactgacaaaaacagtacagaatatataaagaacatctttatatgataaaaatcaatatgaaaaaagacaacacaaaggatacaaagtttcacttatgcagcatgaataagt

SEQ ID NO: 620969 - DNA, 563 bp, Homo sapiens
aaatagaggcatcaatttacataaaattacaatagaaatgtttatatatacaatagtagagggctgtatgccattgtgtaatgatatttggccatatacgaaagaagcaaagaacactattcaataaataatgcaggcacacatgcacacatgcacacacacacacacacacacacacacaaaagatctctaccttaaaccatacacaaaagtaaattccaggtagattttaaaactaaatataaaaaccatcaaactctacagactttagaagaaaatatttaaaaattcttcgataacttcaaggtagaaaatattttcttaaataagacccaaaaatctacaactgtaaaattttcttttacattcaattacctaaaatatcaaaagtcaatgttaaaataataaaatgatmaggctcagagtagaagaaataatttgcaactcatataactgacaaaaacagtacagaatatataaagaacatctttatatgataaaaatcaatatgaaaaaagacaacacaaaggatacaaagtttcacttatgcagcatgaataagt

SEQ ID NO: 620970 - DNA, 579 bp, Homo sapiens
taagatatgggggtttgtggaagccaaggttcttgttatgtaaatgaagcctccaggtagaaggcttcagagagaacagatggtaagtataggttatcagaccttaaaacatgtcagactcttagttaaatctctcctggatcagggaaaatcctagtaaggaaagaggattctctacaggatgtaaatttttctcataaaagayagctttgcaagcccactccaaaatatgccaaagacatatattttgtgttaaaatactttgatgtcctttagggcctgttacatcatgtgatactagagtcaggttggatttgctatcttattgctgtaaagagtcggttctgtcagtcttgggatctctattttaatgttaacgctagtcagttgtgtctaaactacaacagggagagggtataatgaggcaagacctatctcctcccttttactctcatgacacgaactagtttttcaggtgttttgttttgttttgttttgtttgagacggagtctcgctctgtagcccaggctggagtgcagtggtgcgacctcagcgcactgcaacctctacctcctggg

SEQ ID NO: 620971 - DNA, 579 bp, Homo sapiens
taagatatgggggtttgtggaagccaaggttcttgttatgtaaatgaagcctccaggtagaaggcttcagagagaacagatggtaagtataggttatcagaccttaaaacatgtcagactcttagttaaatctctcctggatcagggaaaatcctagtaaggaaagaggattctctacaggatgtaaatttttctcataaaagatagctttgcaagcccactccaaaatatgccaaagacatatattttgtgttaaaatactttgatgtcctttagggcctgttacrtcatgtgatactagagtcaggttggatttgctatcttattgctgtaaagagtcggttctgtcagtcttgggatctctattttaatgttaacgctagtcagttgtgtctaaactacaacagggagagggtataatgaggcaagacctatctcctcccttttactctcatgacacgaactagtttttcaggtgttttgttttgttttgttttgtttgagacggagtctcgctctgtagcccaggctggagtgcagtggtgcgacctcagcgcactgcaacctctacctcctggg

SEQ ID NO: 620972 - DNA, 579 bp, Homo sapiens
taagatatgggggtttgtggaagccaaggttcttgttatgtaaatgaagcctccaggtagaaggcttcagagagaacagatggtaagtataggttatcagaccttaaaacatgtcagactcttagttaaatctctcctggatcagggaaaatcctagtaaggaaagaggattctctacaggatgtaaatttttctcataaaagatagctttgcaagcccactccaaaatatgccaaagacatatattttgtgttaaaatactttgatgtcctttagggcctgttacatcatgtgatactagagtcaggttggatttgctatcttattgctgtaaagagtcggttctgtcagtcttgggatctctattttaatgttaacgctagtcagttgtgtctaaactacaacagggagagggtataatgaggcaagacctatctcctcccttttactctcatgacwcgaactagtttttcaggtgttttgttttgttttgttttgtttgagacggagtctcgctctgtagcccaggctggagtgcagtggtgcgacctcagcgcactgcaacctctacctcctggg

SEQ ID NO: 620973 - DNA, 404 bp, Homo sapiens
catgtgggcaaagtacagattttattctaagcaygatgggaaaccactggagggcaataaacaaacagggtgacatggaccactctgacctgtctgtggcttgtaacagagccacaagtagaagcagagagatcagttaggagtttatggtaatctaagtggagtggtttgagttatggtaacataagtgagaatgaaaggaaggaacagtttttgagaaatattttgagtgtatattgacaggtcttttggctaaagcaactgaatgaatggtagtaacatttgccgaaattgaggagcttcagaaaggaactggatgggagaggaggcaggaaggttggaggatggggagaacagatgaaatagttctgtttggaatgtgttgagttggaaacgtttaattc

SEQ ID NO: 620974 - DNA, 404 bp, Homo sapiens
catgtgggcaaagtacagattttattctaagcatgatgggaaaccactggagggcaataaacaaacagggtgacayggaccactctgacctgtctgtggcttgtaacagagccacaagtagaagcagagagatcagttaggagtttatggtaatctaagtggagtggtttgagttatggtaacataagtgagaatgaaaggaaggaacagtttttgagaaatattttgagtgtatattgacaggtcttttggctaaagcaactgaatgaatggtagtaacatttgccgaaattgaggagcttcagaaaggaactggatgggagaggaggcaggaaggttggaggatggggagaacagatgaaatagttctgtttggaatgtgttgagttggaaacgtttaattc

SEQ ID NO: 620975 - DNA, 663 bp, Homo sapiens
tggtgtattctgagtggccaggctgtgggagagaagacccacaggatacatcttcttctaaccattggttacagctgaaagctaccaaaatgaatccaatacttgtgaattaacaatgttcttagtttagtttagtgcattcagtctacaaaaaacctcgaaagaggggtagaagaatgtgtataagccaggaagttgatatgatgggaatttggagcagggaatactttattacttatgtttaagattaagaagagggaaaacgaaggggtaagaaaagcagtgagaaaactgttaaaataaaaggtgtgaggtgacaaaagtcacgattctgttggagtcaggagcaattgaggagagacaaattggagagatgtgttgaaggaatggtaataacaatatagctaaaatttatagttctctattttttygttactatgctacactcatttcatgcattttctcacttaaatctcagaacaattgtacaagttagatactattgttacctctatttcataggtgagaaaaatcaagcaccaaaaatgtaaagggctgacttagggtcataacattagtaagtgatgggcctaagctttcaagacagattagtgcaggtttacctggtgagccttgtgtgatggcgatttctaaaatgggtat

SEQ ID NO: 620976 - DNA, 663 bp, Homo sapiens
tggtgtattctgagtggccaggctgtgggagagaagacccacaggatacatcttcttctaaccattggttacagctgaaagctaccaaaatgaatccaatacttgtgaattaacaatgttcttagtttagtttagtgcattcagtctacaaaaaacctcgaaagaggggtagaagaatgtgtataagccaggaagttgatatgatgggaatttggagcagggaatactttattacttatgtttaagattaagaagagggaaaacgaaggggtaagaaaagcagtgagaaaactgttaaaataaaaggtgtgaggtgacaaaagtcacgattctgttggagtcaggagcaattgaggagagacaaattggagagatgtgttgaaggaatggtaataacaatatagctaaaatttatagttctctattttttcgttactatgctacactcatttcatgcattttctcacttaaatctcagaacaattgtacaagttagatactattgttacctctatttcataggtgagaaaaatcaagcaccaaaaatgtaaagggctgacttagggtcataacwttagtaagtgatgggcctaagctttcaagacagattagtgcaggtttacctggtgagccttgtgtgatggcgatttctaaaatgggtat

SEQ ID NO: 620977 - DNA, 614 bp, Homo sapiens
catgggcttacataaaggtatttggttacttagaacaacaaccatggtttaatgatatattcttaagtaggaagataactatgtacatatgtagctaggatttatttttaccttcatgggtttggctgtatataaaactgggggttggggggttgtgtgtgtcaagttttctgagacagaaaactcagtgaactcacctgacttgataatgggtctcctagtgtgatatttacatggaaattcacttggtaaagagattaacttggctctatcaatacactttggcagattgcagakaaagctacaaatggggcaagtcattggagaccgtgatttcctagccctggaacaaataacaagccctaatatttactgtactccattacattagcaagatgtaccagtcaaaattaatcaattagagctggtagaaagcaaataattaatgtgtctcattacattatttatcctctcagctggcagaaatacttgataatgggtgttgtgtgctacatgactgtttgcatttaatttgaattgttatcagaaaatgatcaaagatacttaaaacattagttgtaaaaagacactaacctgggcttattgacccagtg

SEQ ID NO: 620978 - DNA, 589 bp, Homo sapiens
tattttctacacaaccccaggtatagatgaacatctaacatgattattttttaaaatgtaaactaagaggcctgtatttgtttctttttcacttttcagactaaacaatattgtgtttggtacctgtcagatgacagtattgagtgatcacactctctaggcagctgcaattttccttttacagaaaatagaatgggaacaatagaaacaaaaatgtgtttttgtgaacatttattgaaggccataataggctggttagtttgttagatactttacatatgttactgagaacaatattactatagcaactgtgaacccaagagtatctgagaccgttctcaatcaatttagaaagtttattttgccaaagttaaggacatgcctgtgaygcagcctcaggaggtcttgatgacatgtgcccaaggtggtcgggatacaggttggttttgtacattttaggggacctgagacatcaattgatacacataagatgtacattggtttggttcagaaaggcagggcaggttgaagtgggggaattataggtcataggtagatttaaaaattttcttattggcaattggttgaa

SEQ ID NO: 620979 - DNA, 586 bp, Homo sapiens
tggttttcagctccatcaggtcatttaagctcttctctacactgtttattctagttagccattcatctaaccttttatcaaggtttttagcttccttgcgatgggttagaacatgcttctttagctcggtgaagtttgttattactaaccttctgaagcttakttttgtcaactcgtcaaactcattctccatccagttttgttccttgctgccgaggagttgggttcctttggaggagaagaggctttctggtttttggaactttcagcctttctgctctggtttctccccatcattgtggttttatctacttttggtctttgatattggtaacctatggatggttttggtgtggatgtcctttttgttgatgttgatgctattcttttctgttttttagttttccttctgacaggcccctcagctgcaggtctgctggagtttgctgcaggtccactgcagaccctgttagccttggcatcaccagcggaggctgcagaacagcaaatattgctgcctgatcctacctctggaagcttcgtcccaaaggggcacctgcctgtatgaggtgtctgtcagcaccta

SEQ ID NO: 620980 - DNA, 586 bp, Homo sapiens
tggttttcagctccatcaggtcatttaagctcttctctacactgtttattctagttagccattcatctaaccttttatcaaggtttttagcttccttgcgatgggttagaacatgcttctttagctcggtgaagtttgttattactaaccttctgaagcttagttttgtcaactcgtcaaactcattctccatccagttttgttccttgctgccgaggagttgggttcctttggaggagaagaggctttctggtttttggaactttcagcctttctgctctggtttctccccatcwttgtggttttatctacttttggtctttgatattggtaacctatggatggttttggtgtggatgtcctttttgttgatgttgatgctattcttttctgttttttagttttccttctgacaggcccctcagctgcaggtctgctggagtttgctgcaggtccactgcagaccctgttagccttggcatcaccagcggaggctgcagaacagcaaatattgctgcctgatcctacctctggaagcttcgtcccaaaggggcacctgcctgtatgaggtgtctgtcagcaccta

SEQ ID NO: 620981 - DNA, 533 bp, Homo sapiens
tgaggtgacaacccaccctgcttcagctcaccctccatgggctgcacccactgtccagacagtcccaatgagatgaaccaggtacctcagttggaaatgcagaaatcacccatcttctgcgtcgatctcactgggagctgtagaccggagtggttctgatttggcygtcttggaagccggggcaatattaatactctttacagtatttaaacttcactgtatttaaactttgtatttgtatctttactgtatttaaactttagtgataatatgtataaagtgttagaacctgtatgatttataatggatgggagaaaatagggtatcattaagattcttggagcactgagtaatattgttcactgctgtggaggccagaaggtaacagaagaatataaatttcttaagactacagccatatcttattttgcatcatatcctcactgctaggtagaggacatcgaaagtatgacactcaaaaaaatagataaatgaatgagtgaatgagtaaataaatgaatcagtcaattcat

SEQ ID NO: 620982 - DNA, 627 bp, Homo sapiens
atcaaattttctttcaaaataatttctaaaagctgaacttctaaattttaattgacttccatttaatatttctatcaattgcagaaagacagcttttcacatcattatcatagcagattcttagcacttgtcagaatattttagaggaaaaaactcacatccttttcattttctttattcagcacatagcacaggataaatgttctgtacaaatggataaatattctatacttttgatgaaaaataaaatacctaaaatatttaagattatttttccaaagaattaaatayagaaaatttttgttgaaggtatttagttctactatgaaaaatgtttcttggctctcaaattcaactgaaatgtcattactaatttgaaatggttacaaactacatgatatgaaaatgagtattaactagaattcctactaagaagcaaaaggattattataggcaaattgtccatattgaaagtaaactaccattattattgatctaaatatgagaaattttatttgtgatattccacacaataaatattgggggattcatttccaagatagagaatcagctgtaaaagagaatattttcattaaaaagtatatgattgattaaggtgaactgttg

SEQ ID NO: 620983 - DNA, 631 bp, Homo sapiens
tattttcttcacctcactgcctaaaaatattttcaccacatgtagggctgcaactttcacctcttgtcataggtgaaaaattgcatcaaaatcygcatcatgagaagtgaaacactagtgttaacactttagccgttgcctagcagaaagcaaaacctggaaaaatagaatgcaggaatatagggagcacaggaaaatatgtaggctcagtgaacaaagatagtagggaaactagaggttatcaggtactgaacaggacttggggaacaaatggaaaggggttgcttataaaaatctccctaagatgcttatggaaaaccaaaacagggcttagtttaaacaatcaggtgttctaaattaataattatacattgtagtagaataaaataagatttctataaaaataaaagagcaagtattacattcctcattaagtagtatttatagaagcattccttataacaatctacccagctcctactgagtatagatattgtacacacaaacattaattaggtggtgtttctgttctcaagggcatgtaagctgataattaaaatacaaaacaatagtagtcaaggtagacctgtgtaaagactgctgtggaatctcagcagaagcatttacctct

SEQ ID NO: 620984 - DNA, 631 bp, Homo sapiens
tattttcttcacctcactgcctaaaaatattttcaccacatgtagggctgcaactttcacctcttgtcataggtgaaaaattgcatcaaaatccgcatcatgagaagtgaaacactagtgytaacactttagccgttgcctagcagaaagcaaaacctggaaaaatagaatgcaggaatatagggagcacaggaaaatatgtaggctcagtgaacaaagatagtagggaaactagaggttatcaggtactgaacaggacttggggaacaaatggaaaggggttgcttataaaaatctccctaagatgcttatggaaaaccaaaacagggcttagtttaaacaatcaggtgttctaaattaataattatacattgtagtagaataaaataagatttctataaaaataaaagagcaagtattacattcctcattaagtagtatttatagaagcattccttataacaatctacccagctcctactgagtatagatattgtacacacaaacattaattaggtggtgtttctgttctcaagggcatgtaagctgataattaaaatacaaaacaatagtagtcaaggtagacctgtgtaaagactgctgtggaatctcagcagaagcatttacctct

SEQ ID NO: 620985 - DNA, 631 bp, Homo sapiens
tattttcttcacctcactgcctaaaaatattttcaccacatgtagggctgcaactttcacctcttgtcataggtgaaaaattgcatcaaaatccgcatcatgagaagtgaaacactagtgttaacactttagccgttgcctagcagaaagcaaaacctggaaaaatagaatgcaggaatatagggagcacaggaaaatatgtaggctcagtgaacaaagatagtagggaaactagaggttatcaggtactgaacaggacttggggaacaaatggaaaggggttgcttataaaaatctccctaagatgcttatggaaaaccaaaacagggcttagtttaaacaatcaggtgttctaaattaataattatacattgtagtagaataaaataagatttctataaaaataaaagagcaagtattacattcctcattaagtagtatttatagaagcattccttataacaatctacccagctcctactgagtatagatattgtacacacaaacattaattaggtggtgtttctgttctcaagggcatgtaagctgataattaaaatacaaaayaatagtagtcaaggtagacctgtgtaaagactgctgtggaatctcagcagaagcatttacctct

SEQ ID NO: 620986 - DNA, 517 bp, Homo sapiens
ccagctaatttttgtactctttgtagagatggggtttcaccattttgcccaggctggtctcaaatgcctgagctcaagtgaaccacccacctcggcctcccaaagtgctgggattacaggcatgagccaccatgcccagccactttcttttttattaaggatgaataatattccatggtatgtgtacaccacatttcctttatccatttatccacatagacatttaggttgtttccacatcttagctcttgtaaatagtgctgcaaaaatgtgggagtgctaatatctctttgagatcctgatttcaattcttttggataaatgtccagaagtaggattgctggatcatatgatagttctgtttttaatttttaaggaacttccatactcttttccatagcagtaggaccaacagtgtacaggtacaagcrttcccaccaacagtatacatgtataagcattcccaccaacagtatacacacacaagggttccaatttattcacatccccaacaaca

SEQ ID NO: 620987 - DNA, 608 bp, Homo sapiens
gaaagtggaaactcaaaggatccagtcttaggagagaacataacatattaatgactcttaaattcccattgtaagctcctaataatatttataattcaactaaaaaaactacaaatctctgcgaagcaaagaaaataatcaacagagtgaaaagataacctagagaatgagagaaaatatttacaaaccatatatctcataagggattgaatatatatatatatatatcctacaactcaatatcatatatagatatatatagatatatatactacmactcaacagcaaaaaaatctaatagcctgatttggaaatgaactaaggacttgaataaatagcttctttaatgactctcagctagaactacagttttcataattccaatcccttatattaagtactgccttccacaaacacactaaatggaaaataaatgtataatgatctaatataaataactgtgttcaaatttaaagtgccattacctatacaaactaatttaatatggatgtttgttattacacctgtctctagttactgctgctaataaacttatacaaattagttcaaaccatcgttgatccttaggtctcagaagatttacctgg

SEQ ID NO: 620988 - DNA, 534 bp, Homo sapiens
tcccttaatccccataacaagcctgtgaaataggtagcattattttcctacattagagatgaggaaagtgaggctgaggaagaggaaataacttgtccctggagagatggtgtcagttactggcctcgtaggagtttaaagtcctgtttgacatcaatcgctgggtgttgaatcactctgtctgggatgtgcatggactctggggcatgtcctacatctgattcctggccccttaattttttgttttttgagacggagtcttgctctgtcacccaggctgsagtacagtggctgatcttggctcactgcaacctctgcctcctgggtttgagcgattcacctgcctcagcctcccaagtagctgggactacaggtgtgtgccaccatactggcaaatttttgtatttttagtagagatggggtttcgccatgctggccaggctggtctcaaacacctgaccttgtgatccgcctgcctcggcctcccaaagtgctagcattacaggtgtgagccactgcccagcctggcccctt

SEQ ID NO: 620989 - DNA, 597 bp, Homo sapiens
atagatccccctctaaaccataccatctattaaggtttgcacgattgtgtatgttaatgattctcaaatcagtattggagatctatgttaatgactcccaaatcaatactagaaaatgaatgagcaagtttctttggcttataaagaaataagacagactttatgcatagtcattacttgccttgcatacattacctttattaggctcttttcatcaatcttgtagtagtcttcaagctttttttcaacaagctgtgcaagcttactggcattatctagaggtttactagaaatggaaaaaaggatcaaacaattatctttctttcagtgtatactttataatatcatgaagtttaattctaaaattaaactgaaatttaaaaaatgtttacaaaatgaaaaattattttataaacatgtaaaagttcagataatrtatcaaataatcttatatcgatatatttggaatttacaaggaaaaaccttatcatatctgcttcagattttttaatataaaggaaataaaatattacatgtaaagttgcagttccttttattccactcctaagtcctggtcctctcccatacccctgcctc

SEQ ID NO: 620990 - DNA, 552 bp, Homo sapiens
tatacaatcaaatatgcttttagtccttcatgttttcagtggaaaaagagcaaaatccacaaaaattaaacttgtcctttccactctttctgcctggaaaattaatcatccttcaaatacttgatacctttcctttattcagggacacctgataaagtgataaagtgtcacctyatttttgaagccttccttgactcttcaggccaagtgttgcttcctcccacatgctatcataagccctaagcctgctatagaatttatattgcactttttcctgtttatatttctgaagattcatagctcatatttttgagggcttactgtgctgtgtttcatagtatgattatgtttaaccttttcagtcatcttataaggcaaagattccataattgtggttcattttacaaagagaatactgccatgtaaacaggataagcattttgtccaaacttgtactgcaagatgtggtcaaggctggactcagattcagacctagctgatttccaaggctgtgctctgaaccaccatatcatactgtctcaaaatttaatt

SEQ ID NO: 620991 - DNA, 571 bp, Homo sapiens
tatgtatatatgaagatgggtatatatgtgtgtatgtatatattttatgtgaaaggaaattctttagtttataatctgactctatgacctaactcatacttgatgccaacctttcagagccaaattatcagatttctttattctgtacaatatctgagaatgcatttttgaaaacctgatctctcacttattcccatgtagaacgttaatttggcaatctctgtttcatttcacttctaaaaaactttagcagacatttttaaaaaaacaaaaagatacacactttttagtctctacatgttggctgctagtgggttttaatgacattttatatcttatctgtaatataattccataagagaaaaattcatgattggaaaaaaaaatgcaacttaaaagyaccatttttcacctagcaaattggcagagggatttaaaatatatatatatgggtatgtatgtgtgtgtgcattctggctattctggttatcagtggataatggagcagaaactgccatatactgctagtgggagtatagattgatacagcctttttggaaaatagtttgta

SEQ ID NO: 620992 - DNA, 627 bp, Homo sapiens
agccaggcatggtggcatgtgcctgtagttcccctgtagtcccagctacttgggagggtgaggtgagaagattgcttgagsctgggaattcaaggctgcagtgagctatgatagcaccactgcgctccagcctgggtgacagagtgagacaccagcatcaccagagagctttttagaaatgtacagtcttgggccccatcctgacctactaaatccccaggtgattcgtgcatgtattcaagtttgagtagcactgcttaggtactgctcttaaactctgctgtgtattagaatctcctggacagttaataatgaatgcagaggcccaggtcctggcctagtgaagtgcctctatatttccatcaggttcccaggtgattttgatacacatgaagtttgaggagcactgctttagatcactaatgtcctcttttctgtccttctaggcttcagcttatcttcaccattcccttccttagccagggctcagtctttagcctgaaatctgctactctcttgaagtagatatttgtagaaatcctgtaggagccagacacagtgtcacacacctgtagtcccaactattcaggaggctgaggtagagaatcacttgagcccaggggtttg

SEQ ID NO: 620993 - DNA, 414 bp, Homo sapiens
ctatcctcactggaaatgttatcagttgagggtagttgtccgggttcttggcattttgaacaaagaattggacaaaacacacacacraagcaaggcagctaaagcagggatttattttaaatgaaagcacagtccacagggtgagagcgggatcaagcaaggggctcaagagcctcagttacagcttttgctggggtttaaataccctctagagatctccattgcttcactctatgcaaatgaagtagtagcccacaaccagtctgattggttgtgggaggtaaatagtaggtctgcgaccagcctgattggttgtgggaggggaccaatcaggtactttcattttccaactgccacacagaaaaaggcagagttgaagagggagtagcctcagctatccagtcagcatgaatc

SEQ ID NO: 620994 - DNA, 429 bp, Homo sapiens
gctaccttaccggcttcttccaaatgatgaatgagattatttgaaatccaactttgggagcattctggagacatcagatggagaaattcataagtgtgggttcttggagtcagtttgttcttattttaacctgatttcttttcctacccagtctgtaaacttggacaaatgatttcacctttttaagcccatttcctcatttctaaaamtggggagtaatagtaaaattggggagcccatacttcatgggcttaatgtttaaagattaaataagaatatttgtataaagactttaacccaatttttagtacataataagttatctgtattatgaataagtaaataatggcacctagtcaggaaattgatgctgtgttatatatcactacggatgaaaaccgtgtgatgagggtaattaactgacccaga

SEQ ID NO: 620995 - DNA, 503 bp, Homo sapiens
tgggtaagacacggctgccgcgacccttgcgacccccaccccgccgcgggagggcgtggggggagagaagggcgcggccggagacctcctggcggggccgcgcgctccaagtgctgcgaccacgcgccaccgcccgctcctggcgtccccgggcaggtggcagaagcgcgtggagtgtgcaccccagaggggagaggctgcgctggggtctccgacccgcaggcggggccccaaagagccggaaactttgcggccaatgttggagcccgcagcggcggccggaatggctctgccggcttcggagtagggctcccgtcccggcgccccgatttctgctccttctctccgtcgtgtgcatccgtccgcgagcccacttccccgagaggaatggggtcggrtcagaatgagctctagggcctcggcggcgaggatcaaactcccgggcgtcgaagtcagctgagccggggaaagaggacgagccgggctagatatacctgcagccc

SEQ ID NO: 620996 - DNA, 542 bp, Homo sapiens
tactttttggttaaagataggttaaataagacctactgtttttgatttaaatatattaatttcaattgaagtactcatgctgacataataaaagtcttytaaggtaatgagtcattattttaaaggtcaccaattaaattccttctcctgaataattttccacctgccattctgcaggtggacagccccacatgcatagcatcatctacttgctctgtagtctttgatggtgccaggcatttaggtggaaacaaacatactttcaagacccaagatctgtggctaaaccttgtcactcagagatatttagatatgtttggcattcaaagtaagttttctttttctcagttttcatctgattctaggataagtcccagaaaaattggcagcagatgatgaaaataaactgttttctatcctatgttgggggtctgaattttgcattttattcacatatatgcttttagggcaatttttgttttttactatttactgtacttcattctcctatactgattttgctacactgataagcaggaccc

SEQ ID NO: 620997 - DNA, 276 bp, Homo sapiens
tgacactatgtttttcattttctctaagatagtgacaaaaccttccatactataggattgyctcaagttataatattttgtatgatgttctgaaacatttcagaaggagcatatgatacttttcattattttttaataagataaacctttgtagtaaaatactttaaaattttacaacctttcttccacaattattttcttcatgaacaattttgaggtctaaattttatgggtaacctattccatctgacttacagaaatgagttagaaattgtc

SEQ ID NO: 620998 - DNA, 523 bp, Homo sapiens
catgttggcacctcaaaaactaaaaacaactacacagtttagcctttgagctaaactaccacaatttttgagttgaatagcatataaattgataagtgaaagtaataaaaatagggacaaaaaaacaccttaaggaagtgagscaaaatgatgatatgttatgatgggagaagcataaacattttatttactttttctgttttccaaactctctatcatatggttatattgcttttaaaataaaataaaaaaaatttatttacatttggagtaattgggaaagaaatagcaattttaaagaatgtttattatgacagtgtttacataagaaaaaacataaaaagcctaaatgctcatctacaaaaggtggataaaattcatttgatatattcacccaatgagtagtaatacacataatgaaaatggcagggtggatttatattcattgaaataaaatgaaattcttaaaaacaagttgtgtatcagtgtgacccaatttaaaattttaaaaatatatgtgcta

SEQ ID NO: 620999 - DNA, 352 bp, Homo sapiens
gcatatacgacttctgagaaagctaattaaaggaaactgactcagttcagtgcagcctttttgaaaacccttcctacctttcttcctttttctggccttcaatgcataaactttgaatgcatccagcatctggatgtgaccctacgatgaaaataacatggtatgatatgagtgcagaaaaatagaagcctgagtagccgaagatattgtgaagctatcatgcaagcctccaagtgctttcctagctagctcttaattcatgcatgatactctgctcttttgatagaaacactrtaataggcaatgaaatccaaccataactgagacaactggggattcttaatgtatgttt

SEQ ID NO: 621000 - DNA, 567 bp, Homo sapiens
caactgcatagggttctgttcaatattcatatattattttcccccaggtccttgtattagattttaaatatacacatatgaagtttttaataccaatgttttaaattgataattagatcttgcagcattttacttatcagttaaaatggtgcaagtgaaatgggaacatttcaaaagtagattggacattaacaagtcagttctttccaacttaatatagattcagtacaatcctaagaaaaaatcctagcatgttatcttgtgactatcaataaaatgattctaccrtttatatggagaggcacaagacccagaatagccaacatactgaaggagaagaacaaagttggaaaactgacactgtgcaccttcaggacttactataaagctacaataatcaagacagtgtggtattggtaaaggaatagacagatagagcagtagaaaggaatacagctcaagtgtagagccacataaatatagtcaactgatctttgacaaaggaataaagacaatacaatggagcaaagatagtcttttcaacaaaatggtgctgtaacaactgga

SEQ ID NO: 621001 - DNA, 440 bp, Homo sapiens
gaattaatggttcatttaagcatcagaatgttgcagtccatagattatagctgtctataatcctaaatattatagcctccatttttctataaatgtcacttttcttaacctgattttctcaaaatgtaccaaggatggaaaaacagggaaaaaaaatcatgggataatctgaaaaataaaaatgcagaaaaatgggacaatttaacagtaaacagtaattggaaaccattcacattgtaacctgtattggaatataasttttttgagggtaggactgtgtcctttaaataatactgtatatttctatttatgtaaaacatctcatataccctcatgaacatgagaataattacaaaaagaatagtaagtctgacatgtctctttgtttatttatatatgaaatacaagtatataatttcatgtttgtatttggttattta

SEQ ID NO: 621002 - DNA, 589 bp, Homo sapiens
ctgtgccactacactctagagtgagaacctattttggaaaaaaaaaaaaaaaaagaaagtaatggaaatcctatccttcactgccttaaatcaagggtcatcctctcctcttatgaatatactccttcttcaattacttccttagaacttccaaaaaaagttaacagttccaayagtgagagcaaaggtcacatctgccttcaccaggatctttctgacctttatgagtttgtcagtattctacgccatcgttgactggaacaaagttgtgctcaccgggcgtggtggctcacgcctgtaatcccagcactttgggaggccgaggcaggcggatcacctgaggtcaggagttggagaccagcctggccaacatggagaaaccctgtctctactaaaaaatacaaaattagccgggcgtggtggcgcatgcctgtaatctcagctagtcgggaggttgaggcaggagaatcgcttaaacctgggaggcagaagttgcagtgagccgagatcacgccactgcactccatccagcctgggcaacaagaacaaaactccatctcaaaaaaaaataaagtcagttgttgtgctt

SEQ ID NO: 621003 - DNA, 619 bp, Homo sapiens
tcagtccctgggattttatgtaaaaactttaagtatagatctcattcaaactgctttgatgatgttttaggaaaatgtgcatgccacagggttctgggtaagggaacttcttaaggtggtaaattttcatggagtctcttcccaaaatgacattactatcatttaaataaattaaaatattcttatttctttttaagagagggtaggtagttagagactgcagattaaaaagtggaagtcctattgcagttttagaattgaactgtgttgcatttgtttatactctggttagtcttagatgcttattctctaatttgttttaatcacagttttctaaagaagcagcttttcctttcaaccatccagtaatgttcagaaagttcatggggatctttgtcagtagaggagttagcaaagtagcattatcattttgttgcacagtggaaaaaccttccccagttatcaaaaagcagtttccttaatgagctatcaaaaytattatacctcatcacatggtgtcctttatgggtgggctgttatgtttggcaaagaagtgtggcgtaccacatttgtttgaagaaacctttccctctctggaagaaacatgtaatcttggtac

SEQ ID NO: 621004 - DNA, 598 bp, Homo sapiens
taactatagagagcgaaggaagagccaagagagtagaaaggtgaaatgaagtcagagaggaggcagatgaccagataggcagggccttgtgcatggaagggctttggggaagccaytggaattttgaacagagaggaaacatgctatgacttgaaatgtaaacagttacactggctgctgtgtggaaaatagactggatggggcaaacatggaggtcaattgtgctaaaaatctagatgaagatggtgtaatccaggttggttgccagtagaagggtgagaagtggttggattctagaaatatttgacagaaagagctgtcagaatttgttgatgattacatgcaggggataagagaaagggagatgtcaaggtgattccactgtttgtgacctgaataattggaaacatgcaatacaattggctgaagaaatctgggagagagaagaaaggggatttgtgggggatgtgttaaatttgagacaatcaagtgtgatatggagaagacagttggatatacaagactggagctcagagaagtctgggtttgaagatatacatttgggagttggtatttatcaccacaggagtggataagt

SEQ ID NO: 621005 - DNA, 376 bp, Homo sapiens
aagattcctctcgactacatctcctcctgatagaagcgtcaggaagccctggcattgtccccccagccttcaaagcacacctgaggaacagtgagaacagcacacaggcaacgccttctgactttggccaagaatggtcctgcgagacatcatgggtcactgctcgtgtttcttcccacacatcccttgtctggcacctgacatcaggcggatgactcagcttcagaggctagaacaggcctccagcaggaagcaggaaatctgcagaaagsctgcttcactagcatcctggggcttgggaaggaggtcagccctatttttcacaagcctacctccaactgtgagttttattagtaacccaaaatattatatgtga

SEQ ID NO: 621006 - DNA, 387 bp, Homo sapiens
ctggaaaggccaagctttcacaggataccctcrattttactcaggcccacaaagcccttggggttgtgcctcgattttactctcgattttactcaggcccacaaagccagtggggctggctgcctcagtggccgcagttcctcaccgatttcagtgcccacgcttactgctctgtgacagaagtttcccacattgaagaggtggagcctgtttcctacctgagaatctggactggcctcaggacttgctttgaccaatagccagtggcaggtgtgagggtgtactcgttctgagcctagctctcaagaggatgttcatagtctgcctgctctctcttgcaccactggtgtgctgcagtagccttcgatgagaccagcctacaccagc

SEQ ID NO: 621007 - DNA, 387 bp, Homo sapiens
ctggaaaggccaagctttcacaggataccctcaattttactcaggcccacaaagcccttggrgttgtgcctcgattttactctcgattttactcaggcccacaaagccagtggggctggctgcctcagtggccgcagttcctcaccgatttcagtgcccacgcttactgctctgtgacagaagtttcccacattgaagaggtggagcctgtttcctacctgagaatctggactggcctcaggacttgctttgaccaatagccagtggcaggtgtgagggtgtactcgttctgagcctagctctcaagaggatgttcatagtctgcctgctctctcttgcaccactggtgtgctgcagtagccttcgatgagaccagcctacaccagc

SEQ ID NO: 621008 - DNA, 574 bp, Homo sapiens
agtcatgatgatatttggctgaaccccatccactaaaaccccactgtgtgtcaaccctgtcaggcctgggtgcatgtgtgggctcagaatgggctcactttgcccttctgccaagaagcccaagaactaagttgattcctcaccgttgacatttaactggagtttcagtgagttgacagtctgatgtgccaaagggaccagagtttccgagagtagatatataactgatggaggcttcttggtagattcttcagagccacaaaaaaggtcagctatgacagctcagccctggtgtttccccaaacaggaaggcattcaaaagtttcttcctcgatccgtgggtctcaagcttgcagtccaccaccaacccaccaacactccctcaggctaggacaatagtaccaactgttcatggtgacagtccccctcaacaaggaggagatggggattggagggggatggggagagtggacagggaggagaggaacatcctggtgrtcatcactgccctaaagccccctttctgccaccttgcttttgaaagtgaagctaccagggaatggacactccttgc

SEQ ID NO: 621009 - DNA, 535 bp, Homo sapiens
acactgtgcataagagcattccatgagtcatcaggcagcatgtcctatacatgaccaccattgctgtttggtgggcaatagaagaggcagcccctgggctttgggaagtgaggcaacataaaagatgtcaaggrtatctcctcagtgtcaggttccctcatcccattcacaatgcttagatgttgctttggtgagtcacgtgggtcgcaaggaaatgtcccacccctctggatatgcaagtggctccaaggtggccatgcccacagcagtgagacagggaggggccgttgacctacctaggaagagatgttccccctcttcccttcaatgatgtggggtgagagtcggggacttggggctgctgtggccttcctgttaaccatgagataaggtgtctgaggctgtatctaataccagggaacagccaggagaaccaatctggggtggacaagccagttgtgttgcactgagtacacacacgtgtgtgcacacacgtggtggatgccagtctgcatgtcctagacacttgtttact

SEQ ID NO: 621010 - DNA, 483 bp, Homo sapiens
tggttgcctgtttgttcatttgtctttcacatgggaccctgagctccatacatgcagggaccagggcttgcttgtctgtgcatctccggcgcttgtgacatgtcatactcaagagagctgaggccgaccagctgaacggaggatgccctagcaaagcacctcatgtgggccacaggtatcaatggacaacctcccctcactgtcctccccttctccttagctgcttgtcaaaagcctgggccaatttttattctgtgccttgaggtcttgtgtactytttttttttttttttttgagttgaaggaaatgccccacctttaacagtcgtaacagcctcagttgcagatacatgtgtgggctctgggggtcacagctgcctgtgccttcactgacttaaggatgcagaatgtcagggtcagcttcaccaggctcttcttggagatgccttcctgggtcctggggtgactctctgtccagtgaatt

SEQ ID NO: 621011 - DNA, 578 bp, Homo sapiens
caggaagctccctctgccccaccccattgcagtccagttctccccagatgttggcagttactgttgtgctgtctaagccccttcttgctgtgcaggtttgcacgtgcaccaatattttccaggggtcctctgacacgttccagagaaagagggacactgaggagtgctgcctgcagtgacaygctctgggacctcggcgcacagcctggcagcttatgaatatgctgaaacagcttcccatcaggtgaagcagccagactcaagagaagcaaggaagttgccttgaatttctaacaatcatcgtatttttttggtaaaaataacctatattcactatgaagttataaagaagctaaaaacaactccaaatcccgattccaagaaacaaccatcacccactgtggtcggcaggatagggatcccccacttctcagaaaatgtcctcattctaatcccagaaacctgtgaatatgttactttatgtgacaaagggggctttgtaggtttgattccattaaagatctggtggtggagacattattctggtggtcccaggataatcatatgagtccttccaa

SEQ ID NO: 621012 - DNA, 635 bp, Homo sapiens
aattggccaggtgcagtggctcacaccagtaatcccagcactttgggatgctgaggcgggcagataacctgagttcaggagtttgagaccagcctggccaacatggtgaaactccatccctactaaaaatacaaaaattagccaggcatggtggcgggtgcctgtagtaccagctatttgggaggctcaggcaggagaattgcttgaagccgggaggcggaggttgcagtgagcagagattgtgtcattgcactccarcctgggcgacaagagcaagacttcatctcaagaaaaaaaaaaaaaagaaaaagtaattatttaagtagaaataacatgtgatgccatatttcaaaggcctagagcagaggttggcaaacgctttctgtaaaacatttacagatagtaaatattttaggttttgtagatcatacagtctttgttgaaattactcaacgatgccattataaagtgaaggcagccataaattatacgcaaaagaatgagcatgaatatgttccaatagaactttatttacaaaacaaggcagtgggctgaatttggccttcaggctgtggttctctgaccctggctaagggtcctgtattttatagattttaagtaatgtttgtatatat

SEQ ID NO: 621013 - DNA, 584 bp, Homo sapiens
cttaattaccctgtttgataattacacattgcatacatgtattgaaatatcacactgtaccacataagtgtgtacaattatcttgtcaattaaaagtatactaaaggttaaaaaagaaatagcagggaaaatgtgtaggaaaagacaagatatttaaatggaaagaaagaagattaaatgatacatttctgtctttaagtatagaatttagcagtacggaaatagcatcttgagtgtcagggagctgaaacactgaacaaacttgtaagcttgtaaacgaggtttctagattcctcacattagagatgcttacaatcagatggacacagatgcgtgttagagaagatcctaagtagagaagtacrcttaggaggttaagggttgagttaaaaagttttactctttccagttgaattcaagagttcatcatagtgaactagcaactggttgtgattgcttctgttgtgtgcccagtagggattgaagttctgtgaagaatgggaaggatgtagtatccctgttcattaagatgcttcatgcaacctgataaaggacatatataaataaaacaaatagagaacaag

SEQ ID NO: 621014 - DNA, 651 bp, Homo sapiens
gatttttagtaatacataccatgttatagcattatagaagaaatgattgactagatgcacattatacatatttaataattatacgtaataattatgttagtttatggaatacctgtgttgttacatcagcaagacaaacctgaattaaaaggacagcaaaattatggcaatagaaaactgacaatggactcttttcatcttatctcagttcttttctcaaagctaagtctaggtagaagagactttggttaacatctcctccccaaagctatcccttagggttgtctttaaaaatgaagacagccattcaaatgtatgttaaatgtaaacaaaagtacatttagaaactgtcaggcctctgagcccaagcctgcatgtatacatccagatggcctcaaagaactgaagaatcacwaaagaagtgaaaatggccggttcctgccttaactgatgacattaatcttgtgaaattccttctcctgcacaatgagtctcagaagctccctgccaagcaccttgtgaccctctcccctgcccgccagagaacaacccctttgactgtaattttccattacctacacaaatcctataaaactgctccacccctatctcccttcgctgactctcttttcggactcagcccacctgcac

SEQ ID NO: 621015 - DNA, 605 bp, Homo sapiens
gctactttgttttattaatgtgcttcctaaactgagcacatggggaataggttttactatgatgtaactctgggagattgtaccccccacaacccctgccaggacattttcagattatgccatatatgtrtctacatacaatctggaaagagttcaattctggcactgttctttttggtgaaagcatattgtatcatgttttcttttcctcactgtctaggtatgtaactgtatgtgagctgtgaagtaacactatatacaaatagctcatacaacttttaattttgctccacattaaatagcagaataatcaagttatcagttatcactatgtagaaattctcaaagaacatatattgaatgttgtcattgagtgctagtacttctaggataagaagagaagaaagaaccagggagtgtgtggtttctgagaaggttaggaaggggccagctcacacagtactgggccacagcatgacttctgatttggaagttcaggagaaagataatggtaccttaggctagggtgggagtgatcgtggaagtggagagaagtaaatggaaaaaagagataatgtgaaagtgacatgataaagatttgatga

SEQ ID NO: 621016 - DNA, 605 bp, Homo sapiens
gctactttgttttattaatgtgcttcctaaactgagcacatggggaataggttttactatgatgtaactctgggagattgtaccccccacaacccctgccaggacattttcagattatgccatatatgtatctacatacaatctggaaagagttcaattctggcactgttctttttggtgaaagcatattgtatcatgttttsttttcctcactgtctaggtatgtaactgtatgtgagctgtgaagtaacactatatacaaatagctcatacaacttttaattttgctccacattaaatagcagaataatcaagttatcagttatcactatgtagaaattctcaaagaacatatattgaatgttgtcattgagtgctagtacttctaggataagaagagaagaaagaaccagggagtgtgtggtttctgagaaggttaggaaggggccagctcacacagtactgggccacagcatgacttctgatttggaagttcaggagaaagataatggtaccttaggctagggtgggagtgatcgtggaagtggagagaagtaaatggaaaaaagagataatgtgaaagtgacatgataaagatttgatga

SEQ ID NO: 621017 - DNA, 609 bp, Homo sapiens
ctttcccaaatctcttggatcgaaacatcttaaattgccatttttatatgtccaagatggtcaaatagtaaccatttcacgcagctcaaccaaaaagtatgatccagctactacagagatgtggacattggaaggccttcttgttggtttcaagtttggccaattggtagacatctggggctgtatattaaggcatcttgattttgtgagccagagcaaaggccttcttgttcctgtctctatttgaatagtatctttggtgagagagtgccagcgtcatctatttattatccttcatgctcagtgactatgtgaaaagaaaggaaaagacctttaaagctggggtgattgtctagacagtcctaaaatagctgctccaggtgcaaaggaagccataaaatgcagacaaagcatgagactcctttggcgaaaatacagtgtgtttgaactctcataggctccctgtaaattatgaagtagaaaatgcccaggagactagattccaataattaygatcattagttattttaaattgccaccacttacttcacacagaggcattctctgtgtgctaaattaaatttaaaatattttaaaaataattatttg

SEQ ID NO: 621018 - DNA, 496 bp, Homo sapiens
tctcatactgttttaaaccctaatttcaccaactatgrgcagatttttatgtccaagtttgtgaaattggacactgacttatgcaaggggtgttttactcacaggcatggcaaaagctgctcccaggaggcaggcaaataaaatccaggtccccatttcttgatggttctgaaatgtaagtcaacatccacttttcttatctcttctgaaacatggatgtaatgaatgctccataaaacacacataatctacattagtctattgctagtaagaaggatggagccattgtttgtgaatttacttcagtcatatgtgatttccagctctcagcctatttcattgtttctggagtcacagtagtgataaagatgcatttaatttaggttgagggctaaacaagttacagggacatgaatgatctatcttcatatgactttgcatgccattttcctatgcctatacagcccttagtcatagaagctaaattgtatttata

SEQ ID NO: 621019 - DNA, 542 bp, Homo sapiens
tgtagcgacattgggcagaggcatctgtggctggtatctggaactttgtgactctaarccaaactctcccccatctttttatctccaacttttccgaaagggtttacatgtgtgagaaactcatagcaccaaaaaacttgtcaattatgccactgcaatatttcagaagctttaactgaagcatcttacggtgtcaggggttcttcatgagaaatagcacacattagaggctttgagagaagacctagttctgtcattaacagtcagcctcaagtttgtcctcccatgatggagcaaccttatcaacagaccatatcgcagaagttgtgttttatgaaaaccaatgagtttgctgccactgcagcaaggaaaataaaaggtgctttttcctctcatttaagaaaaagaaaaggctatctcttctcctttttcatgctattcttttccttatgcacaaagatttttaactatcctagattttcatcccattctactgctggattgaccatctaccctgtattagtccattttcgtgctgctaa

SEQ ID NO: 621020 - DNA, 580 bp, Homo sapiens
tttgtgtagcattctttttagcttctcttctgatataggcaagaatatctccctgaaaggaactaaactctgaactgtactttaacaagtaaaattgccatgctggatatcaacaattagtctttagagttaaaatataaacataaatgattaaattagttaatctactctttgtggtatagccattacagggctaatttttttttaaaaaaaaaaagaatactagaaacctctaaatttttcaagacactcatattcatcagactgtaaaaagcaaaagaaactgaaggattgtgttccttatcacagcttggaaaaagctctgatggctgatctatatgaagtggaaacattgcatgagttttcttgtaattgttgatatctcatgtgaatggaatgaggcggaaaacaagttttgcactaaaataagtgtttgaatcttgctatttggagtcatgttgtctacgttttttktttttgtttttggctacatagttaccatatgatccagcaattccacttctagttatatacccaaaatcattgaaaacctacgttcacacaaagtgtgtatgaatat

SEQ ID NO: 621021 - DNA, 554 bp, Homo sapiens
catttcttccttcttgatgtgagagaggaccctgtctggaacaggagtcttaggatctacagtcaaaccagttaggtcagatcatttcttcatggccagtttttacgtagaatatttttaggttttatgactgactttcargaaaaggggttctgatttgtatgatctatcttggggaaaagggattctagtttccatggctatccttagggcaaaatgggactgagaggaggacaggagaaggtcaggagaaacttttgcttctgaagctgctcagcagcagtcttcattttgagatactgttttctgagccccaacaaaattcttctaacatgctgaacatgtgccaggcactattctaacatccatgagaatagagaggaaaggaagagagggatcctgcagctttccagttgggtgctgagatgatgacaccattcactgggtgactccaattgatttgctaaatctattctctgcattttgactctgccaccttcttaccgtgggtctatgagcaagtttctccactgttctattaaatatctgtgaaa

SEQ ID NO: 621022 - DNA, 545 bp, Homo sapiens
atttcacaagtactttggggagcctcagccctaaggagaggcatcgctattgcttaagaataccataaaacattttcttctccagggaaacatagacactttggaaagagattttggaaatcctagcccacaaagtgctagcaggaaaaagaaagtgtttaattcactgggacttataccaacaaaagtgaaccaatcaccctgttcctatctgcctttgtstatttcaattaaagttagtggaagaactgttaagtataagttaataagcaaaaactttgataacatgagtttggttaaataaccaacaatctagggtatgaaagatttcttgaagatgacacacgcgcacacacacacacacacacacacacacacacacacacacacgtatccagcattgcctgaatgatgggaccagtttgggcttgaatacgttttccattattttccatatagattgttttcttccacaattattattttcccctctcttgaaccctggttcccacttaagaaactagcaatccactcctgaatttgca

SEQ ID NO: 621023 - DNA, 614 bp, Homo sapiens
ggttgctgacttattgttccagtaaaaatagttagtggattggaagaatatccccagcaaatgaataaaattcagtagagacaggggcagagtattaaatctaggagaaaaaaagtaactgtataaatgagtatcagaaggactaattttgtataactgagaaaagatggagtrgttattaaagaaagctagccagtttaccctgggacagcactgtaaagcaggatagttctatagataagcaggagctatcaattacaataattggttaacatttattgggaccttacttgtatgtggtgatattttgagtgctttacatatgttatctcagctaatcctaacaaaaatgtgattgattacaaggcacattttagacaggaagatactaaggctgggataaaggaagtgcccaaggtcacacagcaactaggatgtaggtccaagacttgaagttggccaggataattccagaagtcaaatttttaaccagtatgcaatattgctgctctataataaatccctatttattaagcaggcatgacctaatgagaagaatggtaagtatacaatatgagaaaagagggtaattaatccaacaatagaggcaaatt

SEQ ID NO: 621024 - DNA, 483 bp, Homo sapiens
catttaaaaatatctctttcacccaaggttggtgctgagaactaacttgacatcactgagcagatgctctgtgagtagatacagctgggtcgacacaccatcctgccccagagcaacaggggcagagtttcctaatcctgcagttgctgaccaccctgcatattaagtaaaaataatattcttttttttttttttttggagacagagtctcgctctgtcacccaggctggagtgcagtggcaccatctcagctcactgcagcctctgcctcccaggttcaagtgattctcatgcctcagcctccatggtagctggtattacaggcacctgccaccacaccagactaatttttgtatttttagtagagatgaggtttcaccatgttggccargctggtctcgaactcctgacctcaggtgatcagcccgcctcagcctcccaaagtgctcggattacaggcatgagccactgcacctggccaag

SEQ ID NO: 621025 - DNA, 480 bp, Homo sapiens
aaacagtctgagtgagaactgacaggacccaaaaacatttcttacaatctgagtcccaaagtactttctctaggattggatttatgtagattgatttgttggaagtttcatggtgcaaaaagtgagggtcccctcttagttttgcactttgtattagtttggacaaacatataacaatatcaatcattttttataattttgaaatgatgggtcttcatctattgtcaaggcacactttggtagaactagctgaagaaaygaaggtaaaaataagagacttctagaagaatggattatggaaagaaaataaaatccacactgaaacatttcacaaattttcctttgggctaaagagtttttcttgttacagttttcccaccagtcttctaccatttgtatttatatcttgaccctaaaacttacgagcagtgatggttaatctctgtgtcaatttaattggcttgaccacagtactcaaac

SEQ ID NO: 621026 - DNA, 526 bp, Homo sapiens
ccacactcaaactaaagtgggtggggaaatacaatcccattaagggcctggaaggcaaagagctgggaatttctggggaacaacattaatgactcccacagccccctggaggctcagacacacacgatggagttacccagggtgagtggcagagtgggctgtagacccacctgggctcctggacaagcactgtctgccgtgccgccctcccctccccacactgcccagcctcctccactacctaatgaccactaatagcttaatctcctaagcctctyggccccttctgcacaccagcatctgctcatcctcccagcatctcagaggagggatggggtgaatcccctggttaccacccagggaactaggacaccccttcttgcccttcttctcccttaggaccaatgtctgggcctcacatagaccacatagcttggggagggggtgggaagagcaagccccgcccggccctggcagctgcatcagcagcttaagcaggaaccacagcagggcctgggcagctgcc

SEQ ID NO: 621027 - DNA, 422 bp, Homo sapiens
gtttattaagtattaacttacatgatcacaagttcccacaataggctgcctgcaagcttgaggaacaaggagagccagtccgagtctcaaaactgaagaatctggagtctgatgttygaggcaggaagcatccagcacaggagaaagatgtaggctgggaggctaggccagtctcgctttttcatgtttttctgcctgctttttatttgctggcagccgattaggtgatgccgaacagattaagggtgggtctgccttccccagcccactgattcaaatgttgatctcctttggcaacaccctcatagacacacccaggatcaatactttgcatccttcaatccaatcaagttgacactcaatattaaacatcacaattgcaatcgaacaagagtgaaagtagggagacttcctatgcatag

SEQ ID NO: 621028 - DNA, 462 bp, Homo sapiens
aggatacacacacacatacacacacacacacacatatatatatataaaggggagtttattaagtattaacttacatgatcacaagttcccacaataggctgcctgcaagcttgaggaacaaggagagccagtccgagtctcaaaactgaagaatctggagtctgatgttcgaggcaggaagcatccagcacaggagaaagatgtaggctgggaggctaggccagtctcgctttttcatgtttttctgcctgctttttatttgctggcagccgattaggtgatgccgaacagattaagggtgggtctgccttccccagcccactgattcaaatgttgatctcctttggcaacaccctcatagacacacccaggatcratactttgcatccttcaatccaatcaagttgacactcaatattaaacatcacaattgcaatcgaacaagagtgaaagtagggagac

SEQ ID NO: 621029 - DNA, 394 bp, Homo sapiens
gcaatatattaatataacaaacctgcatatgtaccccctgaatctaaaataaaatagataaataaaagaattggaaattgttctctgtgatgcacttttgaaccatttagcaaataaaaagatctgtaaattgttagtctattaccaccattatgcttgaataactaacaaagctactggattgtatatattatcaatttggccatgataaatccaatatggataatrtttttggatagctagaaagtgccagaactgagattgactggtctctctgcttctcagaccgagatatcatgtagacataatgatctcaaattgaaaaaaaatgatctcaaacatttgagaagacctggtgcgggttttggattgaacaggaaattaaagctctttg

SEQ ID NO: 621030 - DNA, 394 bp, Homo sapiens
gcaatatattaatataacaaacctgcatatgtaccccctgaatctaaaataaaatagataaataaaagaattggaaattgttctctgtgatgcacttttgaaccatttagcaaataaaaagatctgtaaattgttagtctattaccaccattatgcttgaataactaacaaagctactggattgtatatattatcaatttggccatgataaatccaatatggataatatttttggatagctagaaagtgccagaactgagattgactggtcyctctgcttctcagaccgagatatcatgtagacataatgatctcaaattgaaaaaaaatgatctcaaacatttgagaagacctggtgcgggttttggattgaacaggaaattaaagctctttg

SEQ ID NO: 621031 - DNA, 491 bp, Homo sapiens
tttgtaaaaaaggttttgtgaaaagtaaagtaagtaggaagcacaagcataaaagaaggaaaaataagcaaaaattatactttcatttttacrtaattatagtgaacagcactttctatatatctgttgtatgtatagtcccgaacaaagagatgatccatgccttaaagaacttgtgattcatttacaaacccatccattcattcatcaaatatttatttaatgcctactaagtgccagtaagtattcagagggctggactaaatggcaagcgatacagttcctgcattgtgaagcatatgttctaattggcagtagaggggtaatgccaactaaatgaaaagagacacccgtataggaaagatattaatttgttgtgttactctggtttttataagataagcaaatggtcaaaataaaggaaaacacttaattttatgtgtataataataacgagttagagtagaaatgaggattgctttcttatgtct

SEQ ID NO: 621032 - DNA, 410 bp, Homo sapiens
gctttttcattgccaccagagtcagtcccctgtgtctcacagatacacaggtggggaagaagctgctcctgtgggtctttcttgcggttccygtgggtctttctttctgagtgggaatggaagatggaggttggcagaatgaacagtagcctccattgtgcaggtagtctcagggccacacctgtattcacctttttccctttccactgtccatctgaaattgtcctcactctcatctgtcatatcaggacatcttgcaggcttacctcgtgggtcaatccaagcctgaaatcctgaaaggtatgaaccctagattggcaatcacactctttgggctggggtggctgtgtgtgtccattatagttacaatggtgcaagggagtacaaggaagcattctcccttcacttat

SEQ ID NO: 621033 - DNA, 410 bp, Homo sapiens
gctttttcattgccaccagagtcagtcccctgtgtctcacagatacacaggtggggaagaagctgctcctgtgggtctttcttgcggttcccgtgggtctttcttyctgagtgggaatggaagatggaggttggcagaatgaacagtagcctccattgtgcaggtagtctcagggccacacctgtattcacctttttccctttccactgtccatctgaaattgtcctcactctcatctgtcatatcaggacatcttgcaggcttacctcgtgggtcaatccaagcctgaaatcctgaaaggtatgaaccctagattggcaatcacactctttgggctggggtggctgtgtgtgtccattatagttacaatggtgcaagggagtacaaggaagcattctcccttcacttat

SEQ ID NO: 621034 - DNA, 410 bp, Homo sapiens
gctttttcattgccaccagagtcagtcccctgtgtctcacagatacacaggtggggaagaagctgctcctgtgggtctttcttgcggttcccgtgggtctttctttctgagtgggaatggaagatggaggttggcagaatgaacagtagcctccatygtgcaggtagtctcagggccacacctgtattcacctttttccctttccactgtccatctgaaattgtcctcactctcatctgtcatatcaggacatcttgcaggcttacctcgtgggtcaatccaagcctgaaatcctgaaaggtatgaaccctagattggcaatcacactctttgggctggggtggctgtgtgtgtccattatagttacaatggtgcaagggagtacaaggaagcattctcccttcacttat

SEQ ID NO: 621035 - DNA, 588 bp, Homo sapiens
ctgtattcacctttttccctttccactgtccatctgaaattgtcctcactctcatctgtcatatcaggacatcttgcaggcttacctcgtgggtcaatccaagcctgaaatcctgaaaggtatgaaccctagattggcaatcacactctttgggctggggtggctgtgtgtgtccattatagttacaatggtgcaagggagtacaaggaagcattctcccttcacttattgtgtaaatggagccctacctttgcctgctgttcacagttgattcttcctatcaggatgatgatgactcttattttcagctgttggttcccagatacaaagaagtccatagtcttctggcagcagccatagcttgtagttcagtgggacctcgactttgcaagtgtgcagagcccagcattgtgargaggaggaggagaagctcaaaattccccagtgggtcaatgggagtgatgattaatggggctattactgcttccactcctggctcccaggcacatttattcttcctgctgagaagactgtgtcatacagaggtctctgatttaatgtatatgctgtatcctgaaggatgacacc

SEQ ID NO: 621036 - DNA, 586 bp, Homo sapiens
agttaaaaaatcttaattttattaatttttctatttatatgccataacagatttataggctagtgaactttctgagggacagtagaccataaacatcaaaacctgagcaaatacacatatgctgaggtttagttatggacttcatgatgaggactaattacaagacaagtcctaccttccagcttaatgacacttatccatacttatttttttgattgacatcatttttcttttatgttgcatgcagctattaggggttttttttgaagcccaactattctccatctttayttttcaaataataattgaaagaagatttttaggtttgataaatattaaggaaaggagtgacagaaaacacctatctaaatgtttatctaaaataatagtaattttggtaatggtcatttgctgagagtttatgataggtcaggcacatgctaaatgcagggtgtcaggcaaccctcacagaactcttataatgtgccggtattattaacctaattttccagatgaggaaactgcttcaaataagtttagtaccttacccaagcaaacttgcaagtgggcagcagaaccaaaactg

SEQ ID NO: 621037 - DNA, 578 bp, Homo sapiens
atgcagcatgcatcacactttgattaaggacttaacctctgagtcaaacttctggttttgtccttactctttgaacttaaaactatgtacacatttaacatttgctctagataaacatgctttcaccagacaataccaagtgttgaccacttatatgctcacagtaatagaagtgatgcttgtattcaagattgcatatgttaaaaatgataaaaaggaatataagatttctaagatcatggaaaaaatggaaatatatagctaggatcttgcattcaaccttacaaatattttgtttaatccagaatrtgcatgatgtataggtcaattatgtttctgaataaattaatcagatgtcattatgatttttataatcatctcaaacataatctaagtagtcataatttataggtaactatgaaatattctctagaaacaataatttcatttgaaatatctggtcttctgatacatttataattattcttataagtagcatatatctcataagtaacatctgcaaaacaaattcatgaaaattgtggcaggtcaagttctaagatagctccaaatagcta

SEQ ID NO: 621038 - DNA, 576 bp, Homo sapiens
ataaatcaacactgctcaatttgaagacatggaaggaagtagaaacctcactatgatcagagcctggaaaatcattaataacttcattttatagcaggagtttatgcaggacatggatgagttgaatgattcttggtttctgtaaaggcaagtacaaacatacttggcttcagggaagctgggttttctaacatgagttcttcactgtgatgtactaaatttgcacactcagacactgactttttgaactatttgaagttatctagagactcggcgattgtggtttttatttaatgcaatttgttgttaagatctttayattgcaaatttcatttgtgggaatctgtcaactaatgcttgtgaacctgctattttctgtaataatcacaaattaattgcttgagagtttgtatttttagggtatttgtgttttctgtaatctcctggatcctgaataaggggtttgtacatccacacataacattcttacattgtgggaaagttactgctaggtctacagaagacaggcagcaatgaccccaaacatcttcctgtgtctggtagcaatgactaaaa

SEQ ID NO: 621039 - DNA, 627 bp, Homo sapiens
tacttagtcattctgcagtcttattgcttgctcctgttttcaagcttggctttattttatttcttattcacttatacactaagtctgtatttcttcttggctttattttatttcttattcacttatacactaagtctgtatttcttckccaatcccacctttatcatgggatttcctatcagatgcttcaccctacattttacttcctgttcgtccctgcattccatgtaagaatcaacacagaattttgcagaaaccagagccaaacaagtggcctcccaaatggcctgttcttatattgcttttgtcttatttgaatgtttctttgcgtgccagatatgtaacgaagtatatgtatgtgtgtatatatacgtatatatacacagatacttattatatatgtagatatagacatagaaaatatccagatgtattatatatactatctccctctttgtctatgcatatgaatacatatacacatatgtatgttatatgtaattaatatatattgtttattatatatagatgaatagattatatatacacagatatacatacttgtatataattttaatctgcaattatgattattttagtcagaagcattcagaatatctgccacac

SEQ ID NO: 621040 - DNA, 573 bp, Homo sapiens
agtatgttgagggaagttttatgaagcaagttactcaatcgtgaaaatcaacaagaacagcagtagcaacaacaatggcacaacaacatcaaaactcatggaatttcccataaagtttgcatgcgtctatcacagcttcttggactactctttcaaagaggctgaagctcagcactgcaggtacttctggtcaggttagccttctttttcagtsaattagttgaatagtggcaaaataactggagttttaaaaatctgcttaaatgcccactaattagggtaatgcttgtggatatccaggcatgggggagaacccaacaggtctgaaagaaggaaaatattattctacactgaccggaagctcatcatatgtttggaaaacaacaggattgtttccctgaggcaatctatggaatcaacagaaagcaagtgtcttgcagcaccttaagaatacagaaaagtgttgaacatttggttctttacatagtattcgtaagcaggaaattctgatagagaattcatctgtttaccgtcactatctagaaggttttgtcagttattaccagtgtgcaa

SEQ ID NO: 621041 - DNA, 458 bp, Homo sapiens
cagtctgtgactgatgccctgagaaccagcagcaatggagggcagatcagtctcctagctcaaccactcaggcagagataattcaactttccttcaccttcaggccctcaatggattgggtgatgtccacccacattggggagggctatctgttttactcatttacaagttcaaacrtgaatatctttcagaaacaccttcacagacatactcagaaataattaaaaaaacaattatctgggcatctcatggcccagtcaagttgatacataaaaataaccatcacatgaggctatctcagatctaatgttaaggcctaagcaatgcctatccctgtctctcactagaattatggacatgtccgttggtatcttctgtaatgatcagaagccgtgtaaaattgtttctgttcgatataacttgtctcttgatatcatcacgactcaagtgtgtttagt

SEQ ID NO: 621042 - DNA, 633 bp, Homo sapiens
aagcacactagtctttgaactccagagctgtcagttgtcttccataacctcagtgctgaggttttgacatcagttttcaccacttcatcacagctgaaagtgcgaacagttacccttaagatctttcctagttaggaaacactcgcctgcaagtgtagctgcgcttttcctcatagaaattcagattagtagattatcttttaagcttcccattacagaactagtacagagcctgcttagtgaagagctcctattttagaagtttgccttccaccaaattggtggaaattaaaaaaataccctgatttctgtttttttctgccagtgtgtttcgcttttcactgccggcttccacatcttaattcaggccaattagttcagatcacagtgcttatcattgacttccccaggaygatatactatcccccagcattcaaaagttgatacaacctacagccttgggtgtaacactttatttgtaggacagcagagtggtagtgatcaagcagtgtcaagtaaagacccttcggtatttatctttactttttttttcttctggaaaagagtaaatacattttatttgccaaacacactatgttgatctgcagaaccaaaacagctttgaagaaacag

SEQ ID NO: 621043 - DNA, 592 bp, Homo sapiens
caaaataaaggtacttaaagattttttgttgttgttcgttaacctttcacccagtgctttagaatacagtttacgacatagtggattctcaataaatatttattgcataaatgaatatggctattgaaacagcaattctttgagcccrcctacttctggttcctctcagtttcatcactgttagtttagtttctttgcttcagtcgcagtctaaacctacatagtatttggatcttgcccaggtgtatattttacttttcaagctggagttggaggtagggcaataggaaatggttaatagggtttaatgtgtgacatgcctctaaacctttcagactcctctgagtctttccatatgtccccagtccaacaggcagaatctgagattttgacagtgggagtgaactggcacaactgtacaattatttgtcacagcagccattcctcagtcttctggggtgagcatggtcactgtgagagggtcatatggtaactgtggttgtgttgtgttttattttgttatgtttgtagcctagcaacaaaggaagtaactttatcttatttatttatgtaggtttcctggagccaaagt

SEQ ID NO: 621044 - DNA, 421 bp, Homo sapiens
tcctagaagaaatcccttcccttctcattcacactcactgggtcttattttggctgctttagtgtggcatatggggtctgaatggtttgggttttgtcagtgtcttcagcctcattgtgagcttcccattcccctgctcactgcacactaatttcactactcctttattcctatttgtgcctgactcctttccacgccatgcytttgccctgctagttcctcttcctaacagcctttctccatttcacctgccagctcccactcaaaccctgaatgcttcttcttcggggaagctttctgtgattattatattagttgcctcattagaaactctcacaggctctcttcaaccagcaggctcacccagagctcatctcagtcaagctagtagtgtattaatgctccaggagttgtatcccac

SEQ ID NO: 621045 - DNA, 555 bp, Homo sapiens
ggagaggataacatatgacattttgtttttgataagacttttgataaaattagaatagttacatactttcttttttaagttccagggtacgtgtggacatgcaggttagtgtcataggtaaatgtgtgccatggtggtttgctgtatctatcaacccatccatcacctaggtattaagcccagcatgcattagctatttttgctaatgttcttcctccccctacaccattccccaacaggtttcaattttctgcagaacgtagccagttctcccagcaccatttattaaatagggaatcctttccccattgcttgtttttgtcagatttgtcaaagattagatggttgtagatatgtggtcttatttatcagttctctattctgttgcatttgtctaygtgtcggtttttgtaccagtaccatgctgttttggttattgcagccttgtagtatagtttgaagtctggtagtgtgatgcctccagttttgttctttttgcttagaattgtcttggttatatgagccttttttggctccatgtaaattttaaaattg

SEQ ID NO: 621046 - DNA, 411 bp, Homo sapiens
tctggggggttatctcctgtgttacatcgttattcgcatcacttccttcacatttatgctcaaatgtcaccttgtcaggcacactcccctgattaccctaatttgaatcacaaagcccaccccggcactcatagcctcattcttgctttgtgttgttcataacactcattatcttttcacacacggtccatgatgctttctttcctcattcctgtgtccccacccctgttccctactagagtgtaagctccatgcgggcagtgaggttcatctgctttgttcactgctgtcttcccagcactaaggataatgcccagcacctagtaggtgctcaataacggtttattgaatraataaatgattaacctcagtttcatcatctgtaaaacaccacctttttgagtttttgtg

SEQ ID NO: 621047 - DNA, 573 bp, Homo sapiens
tcagttgtccttggaagtaaattggagattcaattttgtacttacagccaatagtacagttgaagttcctcagttaggatatacaaaaacaggtttgataatcctttttccaaagcttttaagtgttcagatgtgagaattataaatagatgacatatttgtattgtttttagcaacaaaatmaccccaatttttcttaacaatcatttataaaaacctttctccatagcattaatatatttcaaaagtcatttctttttcactccttattaaaaatgacatgtttacaaatatatatgccaggtcacttaccactgaaagcaattttctgagtttggatgataaagagcttctattagggacaaagtctgaggtgtgccattttattgtttccttgtacctgccttcttagtattttctcaaccagaatttcctttacgggactcttataaacacatttaactgttttgtgcattacctaaacgggataatgaattaatcaaattaatatgactcttttcccaagagaagaacatatatttcacaagaaaagacatagaaatggcaaataag

SEQ ID NO: 621048 - DNA, 468 bp, Homo sapiens
agtcaaaacataaaagcatgaatagaaaaattttctaaaaacatgaatccaaaatttatagaatagtaaaaatgaccagtatttgaaaagttattctatctctccagcaattaaagaaatacacagaaagataacattttcatttctaaaactagaaatagaaattatctttaaaagattatttatttttattaagtgcttgcaagggtgtgacaaaacagcctctatatatgtatacatygtgtggaagaataaattgtgcaacatttctcaaaacaaatttgttgatattaaggaggacaaaagagctttatattctttaatcctgtaactccacaaatgatttaaaaaatgaaaggaattgaagagtttaacaataaagaaatttttaagtaaatgaaatattacactgccattaaaaatgatgttttctaaaatatttaatttgcatggaaaaacaaatacttt

SEQ ID NO: 621049 - DNA, 630 bp, Homo sapiens
tcattgaagtgtccttaggttgctggtgacacaaagactgctcactaccaactgtgagcttttgcttaaaaatttccacacctggatttgcatctttctaggttgcaaaaaaaaactatttctcccataaggaatcagtgaaatagagggagtaaatgtatgtaaagagaaacaccaattgagccggaatgtattgcattagttttcaatgtcaattactaagcatatgagaaaaagtatcaatatttgtaatatttaacaaatctatagtaatatgtagacrgtaataaagcagtgttatactttaaaatatatttacaaaggtccatgttaatatattatcgtggagaactggaaagagtgaaaatagtaaaaaaaaagctgtgttaaatactctcatattgattctctactcattattaaatagttctgcttttaataatctgtttacatcgtgtcacttaaaacaaacataaatctccaatcctgctgagaaagttttgttcagcaatctaccttaacaagaaggacactttggattgggccaagtgaacaggacttttgttgtttaaatcagagaaatgtttatttttatcattttattttctgccacataaagtataatgggac

SEQ ID NO: 621050 - DNA, 471 bp, Homo sapiens
ccatcacctaggtattaagctcagtatgcattagctacttttcctgatgctctccccaacccaccctctcccaacaggtcccagtgtgtgttgttcccctccctgtgtccatgagttctcatttttcagctccctcttataagtgagaacatgtggtacttggttttctgttcctgtgttagtttgctgagaaaacagctttcagmtccatccatgtcactgcaaaggacatgatctcattcgtttttatggctacatagtattccatggtgtatatgtaccacattttctttagccagtctgtcattgatgggcatcctgttattttaatacaaaaagccacttttctttctcataagttcttacatattcccatttactatttgttttctccccaacagaataaacttctatgagaataaatactgactccttcatttactactgtatttccagcattgtactgtgttt

SEQ ID NO: 621051 - DNA, 471 bp, Homo sapiens
ccatcacctaggtattaagctcagtatgcattagctacttttcctgatgctctccccaacccaccctctcccaacaggtcccagtgtgtgttgttcccctccctgtgtccatgagttctcatttttcagctccctcttataagtgagaacatgtggtacttggttttctgttcctgtgttagtttgctgagaaaacagctttcagctccatccatgtcactgcaaaggacatgatctcattcgtttttatggctacatagtattccatggtgtatatgtaccacattttctttagccagtctgtcattgatgggcatcctgttattttaatacaaaaagccacttttctttctcataagttcttacrtattcccatttactatttgttttctccccaacagaataaacttctatgagaataaatactgactccttcatttactactgtatttccagcattgtactgtgttt

SEQ ID NO: 621052 - DNA, 528 bp, Homo sapiens
caagcctcttttttattttttcttaacaaaacattgtcaccacttctgccagggaatttgttaagaaaaaatgatgaaacggggtggaaagtgagcattcagtgcttcagaccagggcacagcctcagggtagacaactttcattcacacttgcagcgtaaacattctctagtagcctggtgatcagcctcgtgatcaggcttatgcatgttcagggtgggaactaaatgtaaacaaagattaccagaatctgagaaaatcaaaatcagagtcttgacaatatcagaataatcccttctattaaaaccacggttcccagttatgtttccaaaatcactagygtgccacaagatgtaattaaatgttttctgggtggtggggttgggggatggtgaggattcatggtcaaaagcctttggaaacagtgggttaaacagatctctttactatagaacttttgtgtgtcattaatacataaactcattttgaatcaccaaaagggtgataaaatgcaattttttccaaact

SEQ ID NO: 621053 - DNA, 450 bp, Homo sapiens
aaatgctgatacatgttacaacatagatgaaccwtgaggacattatcctgagtgaaataagccaatcacaaaatgacaaatacaatacgattccacttatatgatatacctaaggtaatcaaaattatatagatagaaagtagaatggcggttgccagggcctgggaatgggagggaatggggagttattatttaataggtacatagtttcagttttgcaagatgaaaagagctctggagatggatgatggcaatgattgcagaacaatgtgaacgtacttgatgtcactaaactacacacttaggaatggttaagatggtaaatgttggccgggcgtggtggcttacgcctataatccccagcactctgggaggccgaggtgggtggatcacctgaggtcaggagtttgagacaggcctggccaacagggtgaaaccccatgtctcctc

SEQ ID NO: 621054 - DNA, 589 bp, Homo sapiens
tttgccatgttggccaggctggtcttgagcccctgacctcaggtgatccacctgcttcagcctcccagaatgctaggattataggtgtgagccaccgcgcctggcccccaggttcatatttatccctaacatgtgtcctcgagtagctgtgtgctactgggccctatagggaagagccagctggccctgtcctatcttccacaggtcatatgagctgaggctcttaatcctcctccttctacactcctgttgttcctaggaccaggatggatgccgatagggatttcatacagattccttgtttgtcctgtggatgtttgcagggccatgggcagacagagccagggcagtgggcacagccccaagaagagtgatgctgggttacctggatgaggctttgtggtgggagcagacatggctagtggccagtgtctccgctgtggtcacttgccatagttgcactccagcaggcccaaaggtcctttgtgaaggtccctccaggcctggcttctgtctcatggccttgmgtagtgtgtggtccacagcacagtccatgacccttgggaatatccatcccaagggtatatgt

SEQ ID NO: 621055 - DNA, 591 bp, Homo sapiens
ggcttctgtggtgtgctgtgtggagtttcctttgtaaattcacttggggaatttaattaagaatttggggaataaactgggatctgactgattttttttaaaaaaatgtatgttcctctgttcctcttttccttttttttttttttttttttttttgcttttctctacatttttaaaagcaaagaatatccagcccaggcaacatggtgaaaccccatctctacaaaaaatagaaaaacttagccaggaatggtggtacgtgtctgtaatcccagctacttgggaggctgagacaggaggattgcttaggccaggaggtcaaggctgcagtgagccaagatcataccactgcactccagcctgggcaacagagtgagaccctgtctcaaaagaaacagagaaagagagagagagagagacagagagagagagaagagaaagaaagaaaaagaaagaaataaagagaaagaaagaaaggaaagaaagaaagaaagaaagagaaagaaagaaagaaagaaagaaagaaagaaagaaagaaagaaagaaagaaagaaargaaaagaaaagaaaagaaaagaaagaaagaaaaag

SEQ ID NO: 621056 - DNA, 605 bp, Homo sapiens
gataacccattttatgtatatcataattaattagactgatctgcagttgaacatttgggtggtttcaagtcttttgctctttgggtcaatgaattgaacaattgattttttgcatatatatctgcatatgtttaattgatgagtcaaaggttatgtgtatgtttttagtgagaaaggcaagttgtagaatacgatctgtcatagaagtctgtattgtattttcaatgggtgtttatatgttcgttaatgtataagtgtataaagaaatcatgtatttctggaaggtcatgtaagaaattgctaaatttcctagaggtgawtacctctaggaaacagggatgagagtgaaggtaatatttcacttttatatctgttagacatttttatcaagattcccattacttttataataattattaataaaacaacgcatgagttagaccaagagaaaagccacaaatcagctgagttatgagtcaataagggccttttgtatataattagcacatttcaaagcagtttgtatttcatggaaaaaaatccagaaatccagataaaaagtcagagtcaccttgaattgggattgaaataagcatacgtagcac

SEQ ID NO: 621057 - DNA, 477 bp, Homo sapiens
  misc_feature 204: n = A,T,C or G
taaatgactaagctaatgggagaatgctatggcatattgttaaggaaacacgtcagaatcacttatgtcaatatatacatgtagctattatgtycttcaatttgtcctggagtttaggaattgcaaagttgtgatgagagttcaaaggtacaatgtacttatcattgcagagaaggttctaaatttagcagcatatctacttanagaataaaagttaataaatatattcatttttgtacctctgtgaaatacgagtattttcacattcatagggttctctagtttagtcctcttaaaatttcctgatccacttacacaaaaaggtccaagcgtacccatcaacaaaccaatacaggccaggtgcagtggctcatgcctgtaattccagcaatttggaaggctgaggagggcggatctctggaggccaggagttccaaaccagcctggccaaaatcactattttggaaacactgtctc

SEQ ID NO: 621058 - DNA, 477 bp, Homo sapiens
  misc_feature 204: n = A,T,C or G
taaatgactaagctaatgggagaatgctatggcatattgttaaggaaacacgtcagaatcacttatgtcaatatatacatgtagctattatgttcttcaatttgtcctggagtttaggaattgcaaagttgtgatgagagttcaaaggtacaaygtacttatcattgcagagaaggttctaaatttagcagcatatctacttanagaataaaagttaataaatatattcatttttgtacctctgtgaaatacgagtattttcacattcatagggttctctagtttagtcctcttaaaatttcctgatccacttacacaaaaaggtccaagcgtacccatcaacaaaccaatacaggccaggtgcagtggctcatgcctgtaattccagcaatttggaaggctgaggagggcggatctctggaggccaggagttccaaaccagcctggccaaaatcactattttggaaacactgtctc

SEQ ID NO: 621059 - DNA, 477 bp, Homo sapiens
  misc_feature 204: n = A,T,C or G
taaatgactaagctaatgggagaatgctatggcatattgttaaggaaacacgtcagaatcacttatgtcaatatatacatgtagctattatgttcttcaatttgtcctggagtttaggaattgcaaagttgtgatgagagttcaaaggtacaatgtacttatcattgcagagaakgttctaaatttagcagcatatctacttanagaataaaagttaataaatatattcatttttgtacctctgtgaaatacgagtattttcacattcatagggttctctagtttagtcctcttaaaatttcctgatccacttacacaaaaaggtccaagcgtacccatcaacaaaccaatacaggccaggtgcagtggctcatgcctgtaattccagcaatttggaaggctgaggagggcggatctctggaggccaggagttccaaaccagcctggccaaaatcactattttggaaacactgtctc

SEQ ID NO: 621060 - DNA, 477 bp, Homo sapiens
  misc_feature 204: n = A,T,C or G
taaatgactaagctaatgggagaatgctatggcatattgttaaggaaacacgtcagaatcacttatgtcaatatatacatgtagctattatgttcttcaatttgtcctggagtttaggaattgcaaagttgtgatgagagttcaaaggtacaatgtacttatcattgcagagaaggttctaaattyagcagcatatctacttanagaataaaagttaataaatatattcatttttgtacctctgtgaaatacgagtattttcacattcatagggttctctagtttagtcctcttaaaatttcctgatccacttacacaaaaaggtccaagcgtacccatcaacaaaccaatacaggccaggtgcagtggctcatgcctgtaattccagcaatttggaaggctgaggagggcggatctctggaggccaggagttccaaaccagcctggccaaaatcactattttggaaacactgtctc

SEQ ID NO: 621061 - DNA, 295 bp, Homo sapiens
tagtttgggtctttaaggtgctcataaaacagtagagctgtccttattgaatttctgcatttttccaacagaatttcgtaaaaaatgtttttttattcatttatccacttgtccacttaacaaataattgttaggtatctttaargtactaagcatcttccttgttattatataattggtcattttatattatttactactttattaaggtattaagcatttttcttgttattattgtctttttttattatttgttactttatttagtgcttactctgtgccagaacccctttgg

SEQ ID NO: 621062 - DNA, 295 bp, Homo sapiens
tagtttgggtctttaaggtgctcataaaacagtagagctgtccttattgaatttctgcatttttccaacagaatttcgtaaaaaatgtttttttattcatttatccacttgtccacttaacaaataattgttaggtatctttaaggtactaagcatcttccttgttattatataattggtcattttatattatttactactttattaaggtattaagcatttttcttgktattattgtctttttttattatttgttactttatttagtgcttactctgtgccagaacccctttgg

SEQ ID NO: 621063 - DNA, 295 bp, Homo sapiens
tagtttgggtctttaaggtgctcataaaacagtagagctgtccttattgaatttctgcatttttccaacagaatttcgtaaaaaatgtttttttattcatttatccacttgtccacttaacaaataattgttaggtatctttaaggtactaagcatcttccttgttattatataattggtcattttatattatttactactttattaaggtattaagcatttttcttgttattattgkctttttttattatttgttactttatttagtgcttactctgtgccagaacccctttgg

SEQ ID NO: 621064 - DNA, 599 bp, Homo sapiens
actgatgtttcatttatttcctgcaaatggtctaaaagttctctttagcattgtattttaaaaatcaagttagttggtggccagcttctctatgttaaaaatagcatgggttactgttgaatgagatagcatgtaatgtagatattaaaaatagttcacgtgttgggcacttttgtgcctggcactcaactgtttaacacgttagctcatttattcctcaccacaattctgtatgatagctatcatttttgtcatgcaccaataagcaaactgaggcatgaagtcttttaataaatgtcctgaagatagtaaaccagtgtatggtgcatccaggatttaaacccaggtagtgtaactctagaaacacaccatttattcattatctgattaattagctagtaaccatgaatattactcttgatcttgctgagcttttgtttttttcatgggtagttttgttaaaaactttcttacctttaactayatgaaccacatgccagcagtgtgataagcactttcattcattatctcaagcttctgtacctccagagcctacaacaatgtgtggcacattatgtgtgttctataactttaaataa

SEQ ID NO: 621065 - DNA, 602 bp, Homo sapiens
ggatgggtatttgggctggttccatacttttgcaattgcaaattgtgctcttgtaaacatgcatgtgcaagtgttttgttcatataatgacttcttttcctctaagtagataactagtagtgggattgctggatcaaatgtagccaactgwtcttcaacaaagcaaacagaaacaaagtggggaaaggacaccctattcaacaaattgtgctgggctaattagcaaaccacatgtagaagaatgaaactggatcctcatctctcagcttacacaaaaatcaactcaagatggatcaaagacttaaagacctgaagccatacaaattctagaaaataacattggaaaaacccttgtagacattggtgtaggcaaagacttcataaccaagaaccaaaaggcaaatgcaacaaaaacaaagataaatagatgggacttaattaaactaaaaagcttctgcacggcaaaataaaccatcagcagagttaacagacaacccacagagtgggggaaaatcttcagaatctatacatccaacaaaggactaatatccagattttacaaagaactcaaataagcaagaacaaagtgaacaatcccatca

SEQ ID NO: 621066 - DNA, 570 bp, Homo sapiens
tctgttgggaataatgagtcagcactggctacacaagtctggatttcagaagaaaaaaggctttttggctagaaatgcaatcttaggaattgttggcctacatagcattctacaattttgtggacagatgtcaggacttaggtgtaaggcatgcgagcttttagagctgagttcgatgcagtaaaatcagcaaagggaactgagaaggaggactaaacatagggtaggaggagtaagtaaaactagaaatgaaaatctmtgaaggaagagagaatgatgaaatgtaccaaatggggtctgtttgatatagaataagaaggagatgaattagagagagtaaatacagacaactccttcaaagaattataaataggtaagaaatgtgccagtaagtagaacagaaagtgtaagaaaaggaagaaggctcttgtttgttttgagaagaaataataacatttatttactcttgggaatgacagtgaaaacaaatagtaaaagggaaagagaatgtggggcaaagtccttgattgagtgtcctagtgcttaactgaggcgaatccaagtagagag

SEQ ID NO: 621067 - DNA, 607 bp, Homo sapiens
gagtgccagcttaatgatgtcattctctataatataggatatcaaacaaggaagaagtcatttggggtctgcaccggggaaaacaatgaacaatgtctttcagcttcctgtgagcaccactgcaaaggttcctaaatttatccctagggtttccaaaaggtagagattgagtattgcacagagctagtgtaactagcctcacaggatcattctaaagataaaatgagataatttgagtaatgagatctagcatagtgacttgaacttaatatattcttatttttttctttctatttttttttctgtttctaggttgattacttcaggctagaaatatacctttgaattttgaaagaaaatctctctctctctctcactctgtgtgtgtgtgtgtgtgtgtgtgtgtgtgtatctatgtatgtatgtgtttgcaactttggctctctaaaaggaaaagtrtaaaattttctagtttcagttttctgtaccctaacatttaatttcatctagacctggaaagaataaaacaaacttttgaatctgctgaagtcaaaaggttaaagtatctgtgctaaaaatacataaacaaaaacagcaacaaccacaa

SEQ ID NO: 621068 - DNA, 607 bp, Homo sapiens
gagtgccagcttaatgatgtcattctctataatataggatatcaaacaaggaagaagtcatttggggtctgcaccggggaaaacaatgaacaatgtctttcagcttcctgtgagcaccactgcaaaggttcctaaatttatccctagggtttccaaaaggtagagattgagtattgcacagagctagtgtaactagcctcacaggatcattctaaagataaaatgagataatttgagtaatgagatctagcatagtgacttgaacttaatatattcttatttttttctttctatttttttttctgtttctaggttgattacttcaggctagaaatatacctttgaattttgaaagaaaatctctctctctctctcactctgtgtgtgtgtgtgtgtgtgtgtgtgtgtgtatctatgtatgtatgtgtttgcaactttggctctctaaaaggaaaagtgtaaaattttctagtttcagttttctgtaccctaacatttaatttcatctagacctggaaagaataaaacaaayttttgaatctgctgaagtcaaaaggttaaagtatctgtgctaaaaatacataaacaaaaacagcaacaaccacaa

SEQ ID NO: 621069 - DNA, 607 bp, Homo sapiens
gagtgccagcttaatgatgtcattctctataatataggatatcaaacaaggaagaagtcatttggggtctgcaccggggaaaacaatgaacaatgtctttcagcttcctgtgagcaccactgcaaaggttcctaaatttatccctagggtttccaaaaggtagagattgagtattgcacagagctagtgtaactagcctcacaggatcattctaaagataaaatgagataatttgagtaatgagatctagcatagtgacttgaacttaatatattcttatttttttctttctatttttttttctgtttctaggttgattacttcaggctagaaatatacctttgaattttgaaagaaaatctctctctctctctcactctgtgtgtgtgtgtgtgtgtgtgtgtgtgtgtatctatgtatgtatgtgtttgcaactttggctctctaaaaggaaaagtgtaaaattttctagtttcagttttctgtaccctaacatttaatttcatctagacctggaaagaataaaacaaacttttgaatctgctgaagtcaaaaggttawagtatctgtgctaaaaatacataaacaaaaacagcaacaaccacaa

SEQ ID NO: 621070 - DNA, 646 bp, Homo sapiens
atatatgtatagtcttatgcataaagtatatagtaataaaataatcctattttatactatactaaatatttttcacacattgtctaatattattttcacagtattccccaagatactgatgttaatatatccactatacagattaggaaactaaaggtttgataggttaagtagcatgwcctttatctgagggttagaacgaggattttaactcatgttttccagctccatagcacattccctaatatgatacactgccaaaataaatatattagatatttaattatacactggaaatgaggaaatatattaaggtttttcaatgcaataaatgagagaggcaatattcttgtggcatggttatggcagataacaataatggtccttaagattcaaaggcaaccgcctgcatgtgtgttgagtttgttggttttactttcagcaggaagcacagcctgcatgactaagctttcccactgctgtgagattaatttcaggtatcagaggtgtactggtgtgcactgatggctggatctaatgctcctggaggcacacctatttctcatgtcatgctcagtcttttctgttgcccttccatgtgtaaaatagattaagcttccttggtgtattgtcttataaaatatat

SEQ ID NO: 621071 - DNA, 599 bp, Homo sapiens
ttaagtgtaattaaagttttagagaagggcttcaccacagaacgcttctagacttagtctgactgcttatcctgatgttcttcccatcagtgtgggcagattgaacatattaataatgcttggtgctaggaattgtggtaataaaagaagacacctacatgagaagaggcagagtttgtttagtcacttattttatcagagctttctaaagcaagggaatcagcyatcatcactgtgatagctggaaactcataggtaggcaggggagtggaaaacatcatagtgaacagaagagaagggttcaggtatgctttgattggacgtggttggcataaagaagctgcagttgcttcttctaactagaaggagggcatcctctataattggtttggggagcatattggctttttctggttggtcctgaggtggaagcaaaaataagggaagctatagtcattgaacaaatcctgtctgttctgggtcagttgctgcagagcttttggtttggtttcctggggctgattgctgccgaaattagggatcagagtacaggggtgatattggttggaaagtggaacctttatggggaagaatcaagg

SEQ ID NO: 621072 - DNA, 407 bp, Homo sapiens
tgcaagttcttcctcacgttccaccataattgtaagcttccacaggcctccccagaagcagagccccacgttatgcttcctgtacaacctgtagaactgtrcgccaatgaaatctatttcctcataaattacccaatctcaggtatttctctatagcaatgcacaaatagcctaatacacagtacattttaactcattgtataatgctagcattactctaaatcaaaaccagatgatattattacaaacaagagaactgccttatgaacatgattgcaaaaattcaaccaatttgtgaggcaataatgataaccttagaaagatgagtgtataaactgtgctatagtcatacaatggaatattactaaggactcaaaagagatgaactatcaagctatgaaaagaca

SEQ ID NO: 621073 - DNA, 619 bp, Homo sapiens
aaaacaaagaagaagcaagagctgagcttggccactttagccgagtgacagagtaaactccattgaaaaggtcaaaaatagaaaatcgaggctcaccgcatatgtgtggttatagcctatgtgaggggggttttcatgtcttataggctgtgtgaaattgttttcagtctaaattccaaaaaaaaagtttttttcaaagtataaaatggtttgtttttgttttttgagatcacccaggctggagtgccatggcgccattcggttcacgcaagctctgcctcccgggttcacgccattctcctgcctcagcctcctgagtagctgagactccaggtgcctgccaccacgcccggctaatgttttgtatctttagtagagacagggtttcagtgtgttagccaggatggtctgatccggatctcctgaccttgtggtccgcccgtctcggcctcccaaagtactggaattacaggcatgaggcaccgtgcccggccgatgtctgaaattttcaataaatagttgtacrctgtacatattgtcctggaacttccttgtttgcttatcgaatattttagatggacccaatacaattagctctgctttgatttaaggcctcata

SEQ ID NO: 621074 - DNA, 560 bp, Homo sapiens
tgcatttacattctattcaaacactttttctatcaccaaaaattttgtcaaaaacatgttgcttattttaagcccctgtttaccgaaagaaagcagctttttcaaattctgtacatacattctatgacagactctaaaagttctcttcgtgacatgcatgatttttaacagtaaacagttctatgatcgtgaatattttaaatgtttactgctgtatgtgtcccggcaagtagcaaatgtgttgtattttgtttgaaatktcttatttatttttgatgaggactagaacgtaagttagatatttttaagagagatactttttgaaatatgcacgagtgaattttttgtgaaggtgatttgtttttcctgctcagtcaccgagttaatggccacgtgaacgtaaagatgagcttgatgtagagagggttatgtgaggttttctatcaaaatgtgtttgttttctacatgtatctgctcttaagtcgaattgtttgcaaaggaggaaattgtgtttttaaaaaagaatttaattaggaaattttgatactcttcattactag

SEQ ID NO: 621075 - DNA, 518 bp, Homo sapiens
agacattttccaaaattacaacaatactattactcaggaaatttattacatgccatctgtaataaaggacattaaatacattccctaatttctatttctagattcaaatataaatatttatgaaacactgttgctatgtcaagcccacaactggccacagaatagaataaaatgcaagtgcaaaaatgtattgtttgacagattgacagtgacacatccatgggaaaaaaacacagacctcgccttggctttggcaagaggtaggtccctgctgactttaacaggaactactccaggcaaatggtaaatagaaaagcctttattggagtggatgaaagagagaaaaagatgggaggagttgggaacagtgtggccagaaacscttttgggaaattttgtcatgaagaatagagaaatagatagtggctagagggggacacgacatcatagaggtttttaaagaattgggtcatattaaggcatgattttatgtctatggaaataatccagtagagaag

SEQ ID NO: 621076 - DNA, 504 bp, Homo sapiens
acaatcatggtggaagccaaaaggcacgtcttacatggtgrcagacaagagagaatgagaaccaaaccaaaggggtttcctcttataaaaccatcagatctcgtgagacttattcactaccatgagaacagtatgggggaaaccatccccatgattcagttatctcccaccaggtccctcctacaacacgtgggaattatgggaactacaattcaagatgagattttggtggggatatagccaaaccatatcagtgtgcaatctgaaatttgtcattaaagcttagagaaaacaaacaagcataaaatgcagtctcaccccagcctgcatatgagagattgggtacatatgggtgctcatgacagggcagcctttcctagctgttaggaaagcaacttctaaacatacgctcttgtaactgcccacagagtcatggccgggcacggctcaatgtctcacaagaacagaaatcttacgtgaccttcattgacattgactggcagt

SEQ ID NO: 621077 - DNA, 485 bp, Homo sapiens
ctctcctagggcagtgtggaggaaaaatayggagttggagcccccatgcagagtccccactgaggcactgcatagtggagctgtgagaagagggccaccattctccagaccccagaatggtagatcaactgacagcttgcactgtgtgcttggacaagctgcaggcactcaatagcagcccatgaaggcagctgtaggggctgtaccctgcagagctgcagagcagagctgtccaaggccttgggagcccaccccttgcatcagtgtgccctggatgtgagacataaagtcaaaggagatcattttggagctttaagatctaatgactaccctgctggatttcagacttgcatgggcctgtagcccctttgttttggccaagttttcttaattggaatagaaacatttacccaatgcctatacccccattgtatcttgaaagtaactaacttgctttggatcttacaggcacataggtggaagga

SEQ ID NO: 621078 - DNA, 563 bp, Homo sapiens
tgcagagcctggctgacactggccccagatccaccattccaggcctgcatctcataggtcccttgctctatcctccactctgtctcccaccttagatcctaggttttgtggaatgcacagggggccaggaacacaggatggctggagaggtgggaaaggtgccccaggaccagcctgggtccaggccatggtcatggccgtgagctttgaagtcagacttgggtttgaaccctgactctatcgactactgaccaagggcctgccacctaaactctgtgagcccagttttcctatccataaaatgcgactggccaggcgcggtggctcatgcctgtaatcccagcactttgggagkctgaggcgggaggatcacttgatgccaggagtttgagaccagcctggacaacatggcaagaccctgtctatacaaataaaatttgtttcgaaacttagccgggcatggtggtacaggcttgtgctcctagctattcaagggactgagccaggaggagcacttgagcccaggaggctgagactgaagtgagccatgatcacgccactgc

SEQ ID NO: 621079 - DNA, 446 bp, Homo sapiens
agtctggccaatatggtgaaatctcatctctactaaaaatacaaaaaaaaattagccaggcatggtggcacatgcccgtaatcccagctacttgggaggytgaggcaggagaattgcttgaatccaggaggcagaggttgcggtgagctgagatcacaccactgcactccagcctgggtgacagagcgagattccgcctcaaaaaaaaaaaaaaaaaaaaaaactgaataggtcaggcatgtaatctcatgcctgaataggtcactcctgtaaatctcagcaccttgggaggccacggcaggaggatcgcttaagcccaggagttcgagaccagcctgggcaacataaggaaaccccatctctacaaaaaatacaaaaattacctgggtgtggtgttgtgcacctgcagtcccagctacttagggggctgaggtgggaggatcact

SEQ ID NO: 621080 - DNA, 422 bp, Homo sapiens
gttatttaactttcctcgtcggtgaaaacagggataataaaagtacacgcaaagcttctagaaccacacctggcacatggtaaatactcagttaatgttagctgttttcatgtcttcataattacttggtgatatcaggattattctgtttttgcagaagaggaaaccgaagctcagataggtaaatgatttagtcaaggtcacacaatgactaagcctgggaattgaaccagctttggctgaccttccattaaggtgcatgggagagatcatgctcctagtcattgtatrtgtgtgtgtgtgtgtgtgtgtgtgtgtgtgtgtgtgtgtgtgtgtgtgtgtgttgggaagagggggtgactccttgggggttcggaagatgtgtgacctcagtctgggcctggccattggcctaactctgg

SEQ ID NO: 621081 - DNA, 575 bp, Homo sapiens
actccttgtcatttcaccacctgaggatcaggcacttctgggacctgcttgccaccaggcctcctttctattcacccagaagtggggagccaggcctggagagtggggtgttggcgggcaaggccagaggccgtgcccctccttgggggcgtggtgggggagcctgtggtttccctgtttgttctggagatcccagccgcttccccraggagacagctgacggttcccaggccacagcccctcaggcggggccagaccacggctggccagcctgggagcactgcccgccagccacccgggctccgccaggccctggcgctgggtggtctgggcaagggccaggggggggccttggtcctggccacagggcaggaaccgtgaccagagccaggcatggggctgccctgccagggacctagaggggtcctgaaggccacggcggggccaggccaggggcagaggccagcatgggcaaacactgccttggggagacccaggaggggaagactccaggccccaggtccatctacaggaggacctccagagagacactcacccccttcaggaatgtccca

SEQ ID NO: 621082 - DNA, 573 bp, Homo sapiens
catttggctttattattgttttggggaaatataataatttgtttagaatttttatacaaaacatatatagagaatgatctttaataattttttaaagagacattaaagaaaattgctctcctatttaagttaaatgttttagtaagcattctcttatttaattcagttttaattgcattattaattatcatgaacaaaatattgctagggaaaaagctgaagagataatctaattgcagcttttactgctttgaatgataaagtacctttgatttggtgctgagccaggagggcttgattgataatatctgtctcagatgtcaccctgggagaaaagaataaaacctcagtagagttggtgcatwgcagctgtctccgctgctccaatttttctgccccattgacgtcattgggaggtttcaaaccagtccagggtgtctagtaaacctgcacataaatgaaatgaagaaacagaaaaacagtgattcatagccccactctcactccaaagaggtggctgttatagcctttcagataatgggcagatgttttctcctttactgaattttaaaa

SEQ ID NO: 621083 - DNA, 611 bp, Homo sapiens
ttagtcccttttcacgctgctgataaagacatacccgagactgggtaatttataaaggaaaagaggttgaatggactcacagttccacgtggctggggagacttcacaatcatggcagaaggcaaaaggcacgtttcacatagcagcagaccagggggaatgagaaccaagcaaaagggaaaacccttataaaaccatcagatcttgtgagacttattcactaccttgagaatagtatgggggaaaacaccccatgatttcaattatctcccacgggtccctcccacaacacttgggaattatgggagctacarttcaagatgagatttgggtggggacacagccaaaccatatcagaagtctttttaggaaaaataagatgataataaaatgaacttcttacattgataactatccctgatgtactaaaaaaggcttacttggtaagtatttactaatatatatgtgtatgtctagggccttgtgtccaaaactgttctatctctctctctctgtgtctctttgtatcaattgaagactcttttgtgatcctttctacccaactgaagatcaggcagataagcaaataatttgatcagtgacttcttttt

SEQ ID NO: 621084 - DNA, 558 bp, Homo sapiens
gtgaccattcctcactgtgaggtttttaaagtgcaascatgtgataagctgtaattattgtctttaccaagatcatcttaagcattgtatgtttcatctgtcaaatgctaatcatctaagaatgttgaggctgaaaacaagagaaatgtatgcatcctcagcactgtactttcatggtaggaattccaaatagctaatggacaataacaataaaatagctcagtattaaaatcaggatcactacttcaccaaagtcttttaaagtgtttgtagtaaagttgtgggagattgagctctaaaatgcagaggaaaagagctctttttacttctactttcagagacttttgttctagaaattatttttagtgtcggtaaattatgctaattaagacaactaaactaaaaaagtatatttagaaccaagagaacatattttactaatggtttatgatttcccaagcagatttaaaattagatttatgttattttaagatatttttgtttatccagccaaatgtcaccctaaaggtcaagctggccagagaaaagggagaaatt

SEQ ID NO: 621085 - DNA, 558 bp, Homo sapiens
gtgaccattcctcactgtgaggtttttaaagtgcaaccatgtgataagctgtaattattgtctttaccaagatcatcttaagcattgtatgtttcatctgtcaaatgctaatcatctaagaatgttgaggctgaaaacaagagaaatgtatgcatcytcagcactgtactttcatggtaggaattccaaatagctaatggacaataacaataaaatagctcagtattaaaatcaggatcactacttcaccaaagtcttttaaagtgtttgtagtaaagttgtgggagattgagctctaaaatgcagaggaaaagagctctttttacttctactttcagagacttttgttctagaaattatttttagtgtcggtaaattatgctaattaagacaactaaactaaaaaagtatatttagaaccaagagaacatattttactaatggtttatgatttcccaagcagatttaaaattagatttatgttattttaagatatttttgtttatccagccaaatgtcaccctaaaggtcaagctggccagagaaaagggagaaatt

SEQ ID NO: 621086 - DNA, 397 bp, Homo sapiens
gaattccaaatagctaatggacaataacaataaaatagctcagtattaaaatcaggatcactacttcaccaaagtcttttaaagtgtttgtagtaaagttgtgggagattgagctctaaaatgcagaggaaaagagctctttttacttctactttcagagacttttgttctagaaattatttttagtgtyggtaaattatgctaattaagacaactaaactaaaaaagtatatttagaaccaagagaacatattttactaatggtttatgatttcccaagcagatttaaaattagatttatgttattttaagatatttttgtttatccagccaaatgtcaccctaaaggtcaagctggccagagaaaagggagaaattactctccaaccagcatttt

SEQ ID NO: 621087 - DNA, 436 bp, Homo sapiens
cagcagccaatagccagggatgagtagaggttgcccattgtacaagagatgtgctctcttttttaccgttctgttattttcaacatatcccttaacaactgagcaatcttcacagcaatctttcgccagctttctttccccgtactttttctaataggagatgtatattgttttcacgtctttatcaaaatgtttattaytcccaaacagcaccactaactggcatttgaagttgtagcccatggtgtaggtttactctgtattgtgctgggtgtcaaactagagcatatggcagatttgaactcaattaaagagcttcctaacagatttgtttgaaaatggagtgagtggcgttttcagagtgtggccattgattgtgagctgcctataactatgaatattcaagaaaaggctgaatgctcactgatagtgatgc

SEQ ID NO: 621088 - DNA, 649 bp, Homo sapiens
ttttgtgggctgttcttccaatggccatttactttgtagagcctttatggggttattttkgtctgtttgtatatcaggtgccactggggctctcactggtccctgctggtgctgcctattggagcagaagggctaatttgtgtggaagtggctttcagtaagggtggggcatggcaggatacctcctttctgccctgatgtctctgaacagtggggacagagaaattctcagagctgatgggacaatgaaacttgccagacccggctgctaggctgttgcctttgctgggtccctcacctgcccaccctgtgtctttggctgaagttggagaatttcaggcccacagggacagaagggcttcccagactaggctgcttattgggactgagtctcctcacctgcttctacacaccttccctagaaaaacgtatcatttaaaaattaacagtgatattaaggaaaagccagtttagttatagttggaactatgctcatgctgtatttgtgcagctgattttttaagtgtattttctagaacctaaactccacaggtttttcatatggcaggatctaatattcctgctcaggacattagttgtattatctgctgaaatggtggtatccagagagtattgattgggggttgat

SEQ ID NO: 621089 - DNA, 487 bp, Homo sapiens
cagttaaatcacagagacattctaatgttcacacaagttcttgaaacttgggctatagatgttatctcaaatataaaattcaaagagctgaaagaaattactctgagaaatgtgtggaaagttccttgaatgtttgtttatttaaaatacatacttgatttctggacccaagcccagagcaaattttaaatgacatgtaaagaaacacaataaatytaaatttagaagaagaaaggagaacagcaaatgaggacaagctctcagcgagaattccatttattttcttttttaaaatctctaggggctaaactcatctcccaaagttttacacttggccttgataatctgtttcactgcccttcagaacacagaaatatggcaagacatatgaatccagcctttctgcagatcaaataaacaccagtgacagattttgcatttctccatcttattctcttgtctgagtttggtagatcagttaaatgtc

SEQ ID NO: 621090 - DNA, 488 bp, Homo sapiens
tacaagtccagttaaatcacagagacattctaatgttcacacaagttcttgaaacttgggctatagatgttatctcaaatataaaattcaaagagctgaaagaaattactctgagaaatgtgtggaaagttccttgaatgtttgtttatttaaaatacatacttgatttctggacccaagcccagagcaaattttaaatgacatgtaaagaaacacaataaatctaaatttagaagaagaaaggagaacagcaaatgaggacaagctctcagcgagaattccatttattttcttttttaaaatctctaggggctaaactcatctcccaaagttttacacttggccttgataatctgtttcactgcccttcagaacacakaaatatggcaagacatatgaatccagcctttctgcagatcaaataaacaccagtgacagattttgcatttctccatcttattctcttgtctgagtttggtagatcagtt

SEQ ID NO: 621091 - DNA, 589 bp, Homo sapiens
ttgggaggccgaggtgggcggatcacctgaggtcaggagttcgagaccagcctgaccaacatgaagaaaccccgtctctactaaaaatacaaaattagccgggcatgatggcgtatgcctgtaatcccagctactcgggaggctgaggtaggagaatcccttgaacctgggaggcagaggttgcggtgagccaagatcatgccattgcactccagcctaggcaacaagaacaaaactccatctcgaaaacaaacaaacaaacaaacaaacaaacaaaaaactacatatgtccattctccatgccagatatcctgattgaatttacctgcctaggwtcaaggcattcatatttattaaacctgataaattcattcattcaacagtcatttagtagacttgttgagaacttattatgagtcaaggttctcggcatatagcagtgaataaaacaaaaacagtaatcttatcctttatggagtttacatctaataagggaggcacacattaaataagataaataagtatagcatattaggaagtaataaatgctaaggagaaaaattaggcagaagaggagaatatgaagctt

SEQ ID NO: 621092 - DNA, 589 bp, Homo sapiens
ttgggaggccgaggtgggcggatcacctgaggtcaggagttcgagaccagcctgaccaacatgaagaaaccccgtctctactaaaaatacaaaattagccgggcatgatggcgtatgcctgtaatcccagctactcgggaggctgaggtaggagaatcccttgaacctgggaggcagaggttgcggtgagccaagatcatgccattgcactccagcctaggcaacaagaacaaaactccatctcgmaaacaaacaaacaaacaaacaaacaaacaaaaaactacatatgtccattctccatgccagatatcctgattgaatttacctgcctaggttcaaggcattcatatttattaaacctgataaattcattcattcaacagtcatttagtagacttgttgagaacttattatgagtcaaggttctcggcatatagcagtgaataaaacaaaaacagtaatcttatcctttatggagtttacatctaataagggaggcacacattaaataagataaataagtatagcatattaggaagtaataaatgctaaggagaaaaattaggcagaagaggagaatatgaagctt

SEQ ID NO: 621093 - DNA, 589 bp, Homo sapiens
ttgggaggccgaggtgggcggatcacctgaggtcaggagttcgagaccagcctgaccaacatgaagaaaccccgtctctactaaaaatacaaaattagccgggcatgatggcgtatgcctgtaatcccagctactcgggaggctgaggtaggagaatcccttgaacctgggaggcagaggttgcrgtgagccaagatcatgccattgcactccagcctaggcaacaagaacaaaactccatctcgaaaacaaacaaacaaacaaacaaacaaacaaaaaactacatatgtccattctccatgccagatatcctgattgaatttacctgcctaggttcaaggcattcatatttattaaacctgataaattcattcattcaacagtcatttagtagacttgttgagaacttattatgagtcaaggttctcggcatatagcagtgaataaaacaaaaacagtaatcttatcctttatggagtttacatctaataagggaggcacacattaaataagataaataagtatagcatattaggaagtaataaatgctaaggagaaaaattaggcagaagaggagaatatgaagctt

SEQ ID NO: 621094 - DNA, 636 bp, Homo sapiens
aaacactgccactatttttgctatctcacctacaacttctaggcacagtgcacagccattcctgtgagctcactctatccaacataagccatgtgtcatccatgatgaaggtatccttcaactatagcaatagcttcattcttggggctattcaacatctgccaggtttagtttatcttattaacatttttaaaaggcaatctttttgagtgtctacaactcacactagaaaaaaaaatcgatgaagtagaaatcactgtcttgaagaaaatttctagaatgtcaagtattttctgactttccagtcggggctggttcatsatgatgactgcattcttgcatgataagctcctatttcctatcaattgtgcatcaatttacagtattggacactacttagccaagattgtctgatggatctaagatataacttgccaacagcacaagaaaaatgctttttacataatgaaactgcaaataaatgaaaaaggctttgatattatccagggatcaagaagaattctctcccaaaacccctcccctcactatgattctttggtacttttaaaatttgaactaatcatgtggtttgtagcatttagcttgcatgattatgatagaagtgtgtgataaaac

SEQ ID NO: 621095 - DNA, 636 bp, Homo sapiens
aaacactgccactatttttgctatctcacctacaacttctaggcacagtgcacagccattcctgtgagctcactctatccaacataagccatgtgtcatccatgatgaaggtatccttcaactatagcaatagcttcattcttggggctattcaacatctgccaggtttagtttatcttattaacatttttaaaaggcaatctttttgagtgtctacaactcacactagaaaaaaaaatcgatgaagtagaaatcactgtcttgaagaaaatttctagaatgtcaagtattttctgactttccagtcggggctggttcatcatgatgactgcattcttgcatgataagctcctatttcctatcaattgtgcatcaatttacagtattggacactacttagccaagattgtctgatggatctaagatataacttgccaacagcacaagaaaaatgctttttacataatgaaactgcawataaatgaaaaaggctttgatattatccagggatcaagaagaattctctcccaaaacccctcccctcactatgattctttggtacttttaaaatttgaactaatcatgtggtttgtagcatttagcttgcatgattatgatagaagtgtgtgataaaac

SEQ ID NO: 621096 - DNA, 617 bp, Homo sapiens
agcactaagtgaaagagtatgtgtatgtgtgtgcattcatagcattgtatttttatagtaagtttgaaaattaatcctaattatacaaattaatagaagaatacagtctccttttaaaagaaaatagaacattatagaagaaattaaaatttattttggccactcactaccactccccattaattccattttcttctctacctcctagaaccaatcaagatttttatatttaaacatatatgtgtgtaaaagtacatgctttaaaaattatcaagacttagccattccagcctttgggctctagagagtccaatcccaatggtggtagaagggatcacccaacacagcacagctgctctgccaacagatggccagactgcttctttaacttggtccctgattgcacccctaactcagcaggacctcccagctaggaccttcagccaccctcgcctgtgttccccagccaacagagatttgaatttcttctgtgacagcactcccagagggaggggagggccaccatctttcctgtttgggcaacttagcagtttcagccttcrggcactgttttggtctaagccaaatggagcagaatgaatcccacagtataacac

SEQ ID NO: 621097 - DNA, 591 bp, Homo sapiens
ggcactgttttggtctaagccaaatggagcagaatgaatcccacagtataacacagttggtctacccaagcatggccagactgcttctttaagtgggtgcgcratcccatccctcttaactgggcaggacctcccaactggggtctccagcagcccctgtcggtgttctccagccaacagagatttgtaacctccctaggctggagctcccagagggagaggtgggccaccatctttgctgtttaggcaacttagccattccagcctttgggcttcagaatgttggaggtgactgggggctgaagtggacccccagcatagcatagatgctctaccaaaacatagacacactgctttttaaagtgggccctcaattctgttcctcctcactgggcaggaactcccaactggggtcttcagccacctcctacagggctggaaacaagtctgtacctccctgagacaaagcttccagagggaggggcaggctgccatctttgctgtttcacagccttcactggtgataccttaaggtgctggaaaacctgaggtgactaaggactggagtgggccctaagcatactacagcag

SEQ ID NO: 621098 - DNA, 479 bp, Homo sapiens
ggcttgggcctacagcacaaaccctccatcttgggttggttgcactgagcaattgctgaactgcatttctctggtggaacccccaggaaacaagcaaatgaacctcagccacaaccactactaagatcccttcctctgcagcaggcagcccaggagtgccaagttgtggtctacagccagcactcaargtggaaaggaacctacactttcagagaactgagaaggaacatggctgcaaccgtgaggaaatatcagggagccacacaactgagcaagagtctattaattgaccaataagcccagtgccaccggctgcatcacacctcaaagcttcaacaccaaatatacctcactaacatatccccctatgaactagagacaaaaaggcagcttcaaataaagaccccgcacaaagcctcgacctggtgaaaacatccagaaaataagtctacactgcagttaaaggagcacccataccc

SEQ ID NO: 621099 - DNA, 542 bp, Homo sapiens
agattcaggagaacagcaaaacccaatccaaggaaaataagaatcacaataaagtgatactggagctgaaggacaaaatagccagtattaaaatgaatctaacaggtccgacgagctgaataacacaatacaagaatttcacaatgcaattacaagtgttaacagcagaataaatcaagctgaggaaagaatctcagaacttgaagattggttctctgaaataagacagtcagacaaaaataaagaaagaaaaacactaaataaaaagaaatcagcaaaacctccaagaagtatgggattatgtaaagaggccaaatctatgaattgttggcatccaccgaaggtgggggagaaagcaaacaacttgraaaacatatttcaggatatcatccataaaaacttctccaactttgctagagaggccaacagtcaaattaaggaaatacagagaactcctgcaagattctacacaagatcatcccaagacacaaaatcctcagattttccaaggtcaaaatgaaagaaagaaaaaatgttaaagg

SEQ ID NO: 621100 - DNA, 509 bp, Homo sapiens
catatcagatccacttccagactaactcacgtacttctaatagtcattcattatgtgttttccagctaaacaatatattatctataaataaccatggtttttctgttttttaatcatcatacctttcacttcttatttttgacttgttgccttcatctaatacaattggaatattagctgtgacagccagcttccttgtgttattccttgctttacttgtaatgcttctaagtttcaactttaagtayaatctttgctagataaatctggtaaataaccttcatcaggctagggatagtttcttctatccctagcttgctattttgtgtatgtatgtgtatgtgtgtattttaatcatgcacaggtattgaattttgaatttctaattagttttttcttttagctgcttgtaatttgtttcctgggtgcaatattttccctaatctttctgataacagcatcagattcattgtaagcaatgtgttcttaatgccttattagctgttttt

SEQ ID NO: 621101 - DNA, 308 bp, Homo sapiens
tcacgtaaacttcaggcagttgtgaatggcttgactctctttttgagacctggaggctagagaaagggaattatttctggaagaatgtggacwgttcagaagggaagaaaaaatattgcatgttggcagcatgttggcagcaactcctaatcatgatgcctttagctgcaaataatagagaatctgaatttgggttggtttaagcaataaggaaatttatcagctcttctggaattaagtaagtagggcaagctctaagagcaactcataaggcctccagtgatgcttttctgaagttcttctgactc

SEQ ID NO: 621102 - DNA, 520 bp, Homo sapiens
tatcactattattgtccagttaaaagaattttttttttgtgacagagttttgctgctcttgttgcccaggctggagtgtaatggcgtgatctccgctcactgcaacctctgcctcctgagttcaagtgattctcctgcctcagcttcctgagtagctgggattacaggcatgcacccccacgcctggctagttttgtatttttagtagagacagggtttctccatgttggtcaggctggtctcaaactcccagccttaagtgatctgcccgccttggcctccygaagtgctaggattacaggtgtgagccactgtgccctgccaaaataatttttaaatttctgtcttgatttcattgttgacccaatgatcattcaggagcaggttatttattttccatgtatttgcatggttttgagggttcctttcagagttgatttcaaatttttttccactgtggtctgagagagtacttgatgtaattttgattttcttaaatttactgagacttgtgttgtgg

SEQ ID NO: 621103 - DNA, 711 bp, Homo sapiens
agttaaaagaattttttttttgtgacagagttttgctgctcttgttgcccaggctggagtgtaatggcgtgatctccgctcactgcaacctctgcctcctgagttcaagtgattctcctgcctcagcttcctgagtagctgggattacaggcatgcacccccacgcctggctagttttgtatttttagtagagacagggtttctccatgttggtcaggctggtctcaaactcccagccttaagtgatctgcccgccttggcctcccgaagtgytaggattacaggtgtgagccactgtgccctgccaaaataatttttaaatttctgtcttgatttcattgttgacccaatgatcattcaggagcaggttatttattttccatgtatttgcatggttttgagggttcctttcagagttgatttcaaatttttttccactgtggtctgagagagtacttgatgtaattttgattttcttaaatttactgagacttgtgttgtggcctataatatggtctgtcttggcatgtctgagttcagagtctccttgggtgggacttgctatggctgctgtggggaatggcagtgtggttctcaggccagtggagttatgttcccagtgggtgatggctgcctttgctgcgtcatgcaggtcgctagagaagtgagggaaagccggcagccacaggcctcaccctgcttccacacagc

SEQ ID NO: 621104 - DNA, 585 bp, Homo sapiens
attcccctttcatattttcacactttgggtactcacagtttttcagcgtctcctggggcctgcaggagcaatccacttccatcaatgtgtctgtggattctctcagctttcctggtacattcatggggtactacttgaagcaaaagtttatgatgtgagtctctacatgctgctctgtctgagtgggagctgcaatttagtcttgcctcccatccaccattatccttcagaactctgacactgggtattttataaagaaaagaagcttactgggctcatggttctgtaggctatacaggaagcatgatactgccatctactcagcttctagggaggcctcaggaaacttacaatcgtggcagaaagtgaaggcagagcaagcactgcatgtcacatggccagagcaggagcaaaagagtgaggggagaggtaccacacacttttaagccacgtctcatgacagttcactcactgtggsaaggacggcaccaaggggacggtgctaaaccattcttgagaaatacgctcccatgatcctatcagctcccaccaggtcccacctccaacactggggattacatttca

SEQ ID NO: 621105 - DNA, 514 bp, Homo sapiens
cagaaaccaggactagactgcctgtctagtgggagctggagccacacaggagattcagcagctgccagtgaagctgtcttagacaaaaggggtgacatctttcccctccccgctctctcatttcctatctgtgcctcctgttggccaaaccagctgcctgtcagctgatgtgagaacctccctttgccctaaacagagcagaacagggcatggttgaagaatggatctgagggcaaaggggcccaggctcggycctgtgtcggtaggcaagtcatttcacctctctgagatttggtttccttgtcggcgcagtgctgacatagtaggtagttgtggaaaactaaagagatgtgcaaagtgcctagtttatattttgcacactgtgggcatttgatagacagtagagtggtagaaaaagatttttgaaatattagccactggtttttatactagtagtttatttctcttctttgctctttgtatctcaggagagagagaaggcaggggaagtaga

SEQ ID NO: 621106 - DNA, 665 bp, Homo sapiens
tgtttgaattattcatttcatgtaaattatctgtattatgctcaatttataaagagttagcatagagttttatatgaattgctatgcaagtctggcaacactgagatttyatatacatcaagcgtctcatgaaatgtaaatgtcaaactgatggcaaaatttatcttgcttatttcaaatacaatagcaataaagttttagtcattaaggggatttaagtgccaatctaaacttggtctttgaacctccacggatagctttgaagtcaaaggagcctagatttcggtatctttgctgagtgttgaagattcccctctcagtctcttggtaaatggcacctctcacattgttgtccaaggatggttggtggtggggtgactaaacagaccagaatagctggttaatatctcagattgcaaattcataacatttattatctgtgtatagaatagaaaaaaacggagtgttatgggggctgggtctgcatagacacagtcttaggtcacatctctaatagtaaattgaagggattggaaggtgaaaaacactaatatcctcctgaaataatacaaaatccaagccatgtttcttataggaggtgattttaaccctctttccagagaatatatggcaatgtccagaggcatttttgattgtcctaactt

SEQ ID NO: 621107 - DNA, 671 bp, Homo sapiens
ttaactacatttgtatttgtatatgacatatgtatggacaacatgatatagaatacacttcaaaagcagatatagaaaaggaaaactagtaactttgtaactgctccagaccaatctgattcatattttrtgtaccaaagttgtgagttgtttttctgttgccatgaatccccaagttgaaggtcacataacctgaacatgcctagaggaaccacgtatgcaaatacaggtgtaatctaagtgctcaggccaaggaacagggactgaattaagaatatggacatgacatggtaggacacaagatccaagcagactgccctggtgtcacccacatggcgaggatccagtcagatcatgccatccagcatcacgtcattacaagatccaaccagatcatgcctcattgccatatgcttataagaatagactcagcctacagctggtagagacagatttgagcatttcctgctgtttctctgcaagtcggctcattgcaaaaacccagtgcttccatgtttgcttttacattgtgcatgtgccaacagactcactttggttctgtaacaacttttcaaggtaaaattgagtattttcttcagatggataaatttctttcatccagcattgacttccatgagtaaaaacaataggattctgagaacacatggttt

SEQ ID NO: 621108 - DNA, 671 bp, Homo sapiens
ttaactacatttgtatttgtatatgacatatgtatggacaacatgatatagaatacacttcaaaagcagatatagaaaaggaaaactagtaactttgtaactgctccagaccaatctgattcatattttatgtaccaaagttgtgagttgtttttctgttgccatgaatccccaagttgaaggtcacataacctgaacatgcctagaggaaccacgtatgcaaatacaggtgtaatctaagtgctcaggccaaggaacagggactgaattaagaatatggacatgacatggtaggacacaagatccaagcagactgccctggtgtcacccacatggcgaggatccagtcagatcatgccatccagcatcacgtcattacaagatccaaccagatcatgcctcattgccatatgcttataagaatagactcagcctacagctggtagagacagatttgagcatttcctgctgtttctctgcaagtcggctcattgcaaaaacscagtgcttccatgtttgcttttacattgtgcatgtgccaacagactcactttggttctgtaacaacttttcaaggtaaaattgagtattttcttcagatggataaatttctttcatccagcattgacttccatgagtaaaaacaataggattctgagaacacatggttt

SEQ ID NO: 621109 - DNA, 671 bp, Homo sapiens
ttaactacatttgtatttgtatatgacatatgtatggacaacatgatatagaatacacttcaaaagcagatatagaaaaggaaaactagtaactttgtaactgctccagaccaatctgattcatattttatgtaccaaagttgtgagttgtttttctgttgccatgaatccccaagttgaaggtcacataacctgaacatgcctagaggaaccacgtatgcaaatacaggtgtaatctaagtgctcaggccaaggaacagggactgaattaagaatatggacatgacatggtaggacacaagatccaagcagactgccctggtgtcacccacatggcgaggatccagtcagatcatgccatccagcatcacgtcattacaagatccaaccagatcatgcctcattgccatatgcttataagaatagactcagcctacagctggtagagacagatttgagcatttcctgctgtttctctgcaagtcggctcattgcaaaaacccagtgcttccatgtttgcttttacaytgtgcatgtgccaacagactcactttggttctgtaacaacttttcaaggtaaaattgagtattttcttcagatggataaatttctttcatccagcattgacttccatgagtaaaaacaataggattctgagaacacatggttt

SEQ ID NO: 621110 - DNA, 391 bp, Homo sapiens
attttaaattcttgttttgaaatttttgcaggagctgccactgctaatttmtatagtattagaaaggaattgcatcccaggaagtctctaatcaggagttaggaccttacagttgaaagaccccataatttcaatatagtaaacatatgtttcccactgctttctctagatatcaaagagtagtttttaagtgaagatgaaagttactatttgttcatgataactttaacatactactgggtatacttttgaatgtactgatgcagtgaacatatactttaccccagcttccctcaatcccattcgaagaggatatgaaaactgctgtcctgttttaatttttaaattaataagtgtgatcttaaatgtgcactttatgttttcaggtcag

SEQ ID NO: 621111 - DNA, 601 bp, Homo sapiens
ttaattatatatacaaatatatgcaaatttaaattgtatgtgtcctacaagtattctaagactgaaaatattcttgtttgaataaatgtggttataaaatgcattttataatatggatgtttctcttttttccagctaatttttwaaaatttgacgtttcttgaatgaatacttattatataccttctatgtgccagatgggctagtcttggatatgtcttcactgaggttattgcttataagggagaaaagatatgtgctgaaatgtctatggcacaaggtggaaagtgagaaatataaaaaatgtatttacaggagttctggggaggaacataagactgaaccgggggagatttttgtagggaactcatgagaactaagggatagcctcgatgctgaggcctgcagagaccagacatgacttaggacgtggatgaggctcacatacttctgaggcctgggtcatccctttgtgctcatgggatcctgcccatcatggtcactaaattcctttcaatccgtgattcttccataactgtcacgtcaaatcacttacttcaaatgacaaatctttcacttattgcaactgcagcttattcac

SEQ ID NO: 621112 - DNA, 563 bp, Homo sapiens
gagggcctcagacaggaaagtgacacatcctgatatttagttttaaaacagggttggcaaactggccaaatggctggccatcagtttgtgtaaataaaattttattggaatgcagctatgcactttcctatgcacaaaccagtttgtggctggtttcatgcttggttttgtggtttcatgttataacatcagagatgagtagatgtgatttagataatatggcccacaagcccaaaacatttattatcttccctttaagagatcactatggctgtttataaaacataaaccacggggaagggcaagagtgtaagctgggagaccactcaggagattatttagtggtccaggaaagagatgatgtgggccagatagggcaartggggtggggagtgatgaaatgtggatagattgtggggagattgtgtaatcaaatctatagaagaattacagacagaaagaaaaatgcaatattctgtagccagtggtcagtttaagctcttctacaattcctgaacagagtccatatttgaaagctttcaactttacatggtaagagcagt

SEQ ID NO: 621113 - DNA, 670 bp, Homo sapiens
gccagtggtcagtttaagctcttctacaattcctgaacagagtccatatttgaaagctttcaactttacatggtaagagcagtatattttagtggaaaatattattactattatcttcagagttacacatctctctgattacagtaatcgacttaggtgctccacaaaatgaaatcacatgccagtaggtaaaatgcttgccttctcttttcagtgtcactgtgtcagtaaatatttgttccttaaaaccttttcccaagactgtccccaatattcaattatgcataaaacaatgagtaaatggagccctatttatataaatatatcaacatataaactccagctgattttgcaaacaagacttttctctcatcaacattatcctgcaagaaaataatttcagggagcaagtccatttgggcatcccttacactgagcatgctaatgaggaggccatcagcccaaagcctcttacaggtggaagacattaagttctagtcctaagkgggtagttgtccttgtattggaagaatgtgactcttgatgaatgggaagatggaggccattgtgcagggataactacaaaaaagaaattacttagctaaccacagaaaaattccaggcagggggcgggcattccaattgcccattctcaaaaggtgggaggaca

SEQ ID NO: 621114 - DNA, 491 bp, Homo sapiens
gaattcagacaaaaaatctcttccttcagaatccttgctggagtcattcctactactgctggtcatagactggtctaggaattgaggagttgacttgtaggactcaagcatttgacatggaattattatcccctagaaagagatgaacaaggagagttagagatgtgagctctgaaaggactcacagataggaataaccaagcaatgttcactgacaaagggaggttattttgctctaatcctctgtggctgaacaagaatagaagtgtccrctgcttctcactgctcccatagatctcagtaacagaaaactctaggcagctggcaataatgcctcctaacacctgagttctctgttactgattcattgtgctgctccaagctacaaccttctgtgggtgtctcagagaaggctcaaaggcccggatgccccctttacaatctgctgacagactgtgctgggcctgtgcaatagaagctccaatctccca

SEQ ID NO: 621115 - DNA, 487 bp, Homo sapiens
atttttaatcatcagtgcctattgcaaaatagtatacaacatttctaattctatattttcttaagtttttataaatgacaaggaattttgccgtttatggcttcatatgcagtttcatcctatatcttattccattcataattaagtcttaagaattctctaaattggttaatattattagcagtaattcacaaagttctttaattatgtcttcaaatgagtagcatttactttggtaattaatacaatactttattaattgtccagcrgattttgtagtgaatatctttagtgaattttctaagtctttgaagggataagagtgtcttattttcatgaacaagtgaaaacgaacaatacctcagttttgagtatatgttcttccattattgttacgcttttactttttcatagaggaacacaaagaaatctgacttatatctcataatagactacgctgtcttcttaaaagtacatagaatactgt

SEQ ID NO: 621116 - DNA, 569 bp, Homo sapiens
tcatgttttatgtagtaattcctatttttgatctcttcctacttatttcactttttatttgtagctttttgtgatttaatttttttttgctttttttatttttgtgtggaatttgccatgttttcttctatctttaagtaatttaaaagtttatcactcaatttttaatcatcagtgcctattgcaaaatagtatacaacatttctaattctatattttcttaagtttttataaatgacaaggaattttgccgtttatggcttcatatgcagtttcatcctatatcttattccattcataattaagtcttaagaattctctaaattggttaatattattagcagtaattcacaaagttctttaattatgtcttcaaatgagtagcatttactttggtaattaatacaatactttattaattgtccagcggattttgtagtgaatatctttagtgaattttctaagtctttgaagggataagagtgtcttattttcatgaacaagtgmaaacgaacaatacctcagttttgagtatatgttcttccattattgttacgcttttacttttt

SEQ ID NO: 621117 - DNA, 584 bp, Homo sapiens
cagctataattgtgatcagaactagaaacaagcctgattagttttaaatgacaccaactaaccacttcagtcaacccttgtgaggcgcatgattttacctagttggttggatgggcgtgaggccaggcatttggtagctgcttagtatggttttaactgccttgtttctgaactaccaccatggtgattccaaggcgagtccaacagaagttgagcctgtgggagtggttcacagcatatgccacagtgcttttccagatgtccaggggaatccggagaggtctctgtctacattcacttctcctctggagacaaaaccartgtgcaaaaggagggaggaaagcaagcagaaagcctacttaattactctctgtatgcctccaaactccctgtctttggatcctcatctgtagagtgaggagtacagagttggctactttgcaagaatagagtgctgttttgcaagttacagcttttcaagtcccaaaaaaagaaaaacaaacaaacaaacaaacaaacaaacaaaaaatgcctagaagtaagaggaagcaagcctgtatggagtggaggcagactcaggtttt

SEQ ID NO: 621118 - DNA, 490 bp, Homo sapiens
tattttttaaaaatctttatgattcacaattaggtcatacagttgatccaattcagttaatagaaagttagaaaagattaaaataacttaaaacattacatactctcttagacttacagccaattgtcctgacattaggttaagatataacaaaacatgttttatatctatgtccaaagaccccaactgataagattcagtaagttctgctacttcaatataacaattcatgatactgctctgctgaataatgcatttatagaatagctgtgctcttatgtctatggaaataaaacartaaaccacaaattcacagcattcctttttttctttcttgacaagagtagagattgcaactttatctctgcaatatcttccttctgttacatttggtaatatgaaatctgaagcataattatcttccactgtgacttttaggtatttttcttaaatgctgtaagcctcagctttttaatctatagaaatgtca

SEQ ID NO: 621119 - DNA, 490 bp, Homo sapiens
tattttttaaaaatctttatgattcacaattaggtcatacagttgatccaattcagttaatagaaagttagaaaagattaaaataacttaaaacattacatactctcttagacttacagccaattgtcctgacattaggttaagatataacaaaacatgttttatatctatgtccaaagaccccaactgataagattcagtaagttctrctacttcaatataacaattcatgatactgctctgctgaataatgcatttatagaatagctgtgctcttatgtctatggaaataaaacaataaaccacaaattcacagcattcctttttttctttcttgacaagagtagagattgcaactttatctctgcaatatcttccttctgttacatttggtaatatgaaatctgaagcataattatcttccactgtgacttttaggtatttttcttaaatgctgtaagcctcagctttttaatctatagaaatgtca

SEQ ID NO: 621120 - DNA, 594 bp, Homo sapiens
agaatttcattgcttttttatccaagtagaatctaggtttagacatttttaccaacttattagaataatttcaaggatagactatgtatattaaaaaacaccaaattgtgatggagatattgtaaatgtaaaaataatgagccaattaatatatccaaaaataagcacatgaaaattggctctgatggaaatttttaaaaataaccaattgcctgattattgtaattacwtgtttccctttcttattctgcctcctgtggaaaacaaacaacaaaaaaatacagagaaactacacaattaataactattaatgattaataatggtttataaaccatttgaaatcttcctgaaatacagtagataatatataaagtactaaattatattaactccaattcaaattacaaggtttcccctaatatttttaatgagtagaccttaaatcttaccttataacttaagattaatatatagcctcttattgctgacatgttttgtccatatgtgtatgtatattgtccttttaccaatacatctcaattggtgataatgatttttgtgtcaataaagataattactgttgtatgttttcc

SEQ ID NO: 621121 - DNA, 428 bp, Homo sapiens
gtggtgcacacctgtaatcccagctactcaggaggttgaagcaggagaatccttgaaacctgggaggcagaagttccagtgagctgagatcacgccactgcactccaccctgggtgacagagtgaaacatggtctcaaaaaataataataataataataaattaaaaaaacaaatawcatgattgtaggataaactgttgttaagcactttatgatttatttcacaagcagctataaaaggaacaatggagaggatatcagatttctctacgctattgtatgacatgggtcaaagtatactttagttgctttcacattagagatttggtagtccaaacttcatttcaattacaaagacattaaaatgcactcaaatctattttgatcttcatttgtattcaaatgtccattacaaagactgaggtaga

SEQ ID NO: 621122 - DNA, 441 bp, Homo sapiens
tttgctattgtgaatagtgctgcgatgaatatagtagtktgtgtgtctttttggtagtatggtttattttcctttgtgtatatatccagtaatggaattgttgggttgaatggtatttctattttaagttctgtgagaaatctccaaattgctttccacagtggctgaactaatatacattcccaccaacagtatatgtgttcccttttctctgcaaccttgccaacatttgttattttttgactttttaataatggccattctgactggcatgagatagtatctcattgtgttttgatttgcatttctctaatgattagtgatgttgagcattttttcatgtgcttgttgggcacgtgtatgtctttttttgagaagtgtctgttcatgtcctttgctcatttttaaaaatagagttgtttgttctttgccaaggctgat

SEQ ID NO: 621123 - DNA, 423 bp, Homo sapiens
agtagtttgtgtgtctttttggtagtatggtttattttcctttgtgtatatatccagtaatggaattgttgggttgaatggtatttctattttaagttctgtgagaaatctccaaattgctttccacagtggctgaactaatatacattcccaccaacagtatatgtgttcccttttctctgcaaccttgccaacatttgttattttttgactttttaataatrgccattctgactggcatgagatagtatctcattgtgttttgatttgcatttctctaatgattagtgatgttgagcattttttcatgtgcttgttgggcacgtgtatgtctttttttgagaagtgtctgttcatgtcctttgctcatttttaaaaatagagttgtttgttctttgccaaggctgatgtccagaatatttc

SEQ ID NO: 621124 - DNA, 440 bp, Homo sapiens
ttgctattgtgaatagtgctgcgatgaatatagtagtttgtgtgtctttttggtagtatggtttattttcctttgtgtatatatccagtaatggaattgttgggttgaatggtatttctattttaagttctgtgagaaatctccaaattgctttccacagtggctgaactaatatacattcccaccaacagtatatgtgttcccttttctctgcaaccttgccaacatttgttattttttgactttttaataatggccattctgactggcatgagatagtatctcattgtgttttgatttgcatttctctaatgattagtgatgttgagcatwttttcatgtgcttgttgggcacgtgtatgtctttttttgagaagtgtctgttcatgtcctttgctcatttttaaaaatagagttgtttgttctttgccaaggctgat

SEQ ID NO: 621125 - DNA, 451 bp, Homo sapiens
agtttgaggtcctagatttaagtattttgatttgattttcrtatatggcaagagataggggtttagtttcagtctttcgcagtttttccagcaccatttgtggaagagactgtcctttccctaatgtatgatcttggcacctttgtaaaagaggagttcactgtagatgtgtggatttatttctgggttatctattctgtttcatttgtctatgtgtctgtttctatgctgttatcatgctgttttggttattatagctctgtagtataatttgaagtcaggtagtgtgattcctctagttttgttatttttgcttgggatgactttgactattctgggtcttttgtggttccatatacattttagcattattttttctatttctgtggacagcatcattagtattttgataggaattgcattgaatctgtagattgctttgggtagtatg

SEQ ID NO: 621126 - DNA, 588 bp, Homo sapiens
ccactgccctagcagaggttctccatgagagccccacccctgcagcaaacttctgcctggacatccaggcatttttttacatcctcttaaatctaggtggaagttcccaaacgtcaattcttctgtgcacctgcaggctcgacaccatgtggaagctgccaaggcttggggcttgcaccctctaaagcaatggcccaagcagcatcttggccccttttagccatggctacagtggctgggatgcagggcaccaagtccctaggctgtacacagcgggggggctctgggcccagcccatgaaactattttttcctcctaggcctctggacctgtgatgggaggggctgctgtgaatgtctttgacaagccctagagacattttcctcattgtcttggcaattaacatttggctcctcattatttaygcaaatttctgccacaggctggaatttctcctgagaaaatggttttttatttttctatcacattttcaggctgtaaattttctggactttcatgctctgtttctttattaaaacaatgtttttaatagcacccaagtcacctcttgaatgctttgctgcatag

SEQ ID NO: 621127 - DNA, 453 bp, Homo sapiens
gtcagcagcatgaaaatggactaatacaagggggatccccataggaaggtctgcatgatacatgacagtcataggatgtctagggatgaggcaccattgatggtgaagagacttcaggcctgtactgattgctatgctgtaattgtgcagcataaactaaggctctcttacagttgaggcagatacacaatatactagtagcagatatattcaaactttggatttggktgcattagatttgggagtaggtctgataatttaaatacatagggaaagctccatgtgtctctttgtgtacatgatacattccaggacctggcattcaagatgtattattgaaaaaaatcataaaagttccttggaatgttctgttttgtagaaaacctcacatttaattatatcaaatcataccatataatttactttttattgttgtttaaggtgggacaaatg

SEQ ID NO: 621128 - DNA, 575 bp, Homo sapiens
ttcaaactcagattagtgtttatatttcttggaaactggagtttgactctgcactcacactcatatttggcttttgcaagtgtctttcatgtgttgaatcttctgtgttgcttaaaaaaacctcccttctgattcaacatatattaatatttatcaggcatgggatgttgaatattctagtctgagacataaagagggtaagaattagactcttctaattcatattttagacctgatatacaggaagtggttgaagttaagaaagccaaggtagagatactgtcatgaaaagtgggcctgtgtttgtcattccacctgctgttaattaaggcacyagggaaggcagattctttctcttgctgtgaatgcttttctccgtaggaagggcagggttaggaattccttgggtttttaaggtttacttccttacctattcaacaaatatttattaagcatctaccatgtgccaggtacagtgcttaggaccttaaataaatacattaacaaatgttttctcactgccagtgatgggcagacattgttaatgtagtgtctggcacatgggataaaatgct

SEQ ID NO: 621129 - DNA, 600 bp, Homo sapiens
gagctgtgctgagcccagtttaatttgcttttaaagcacttgaagatcatgcctacttatatttctgccatcctaggggtctcatatccttatctacataatcagctctcaatatacctcccctttccctgtccctgaacttacccatttccattggaaaaacaacagtattatttaaatccatgtatagaaaaaaattactgtgaaaataaacaataaaggcttagagacatcactctggaaaatatatttttacaataatctgcatcaacaacatatatagtttatcttttcaaactcaatatctacattcacataatttcataatttctcactaaggatgatgagtgagagcatgtgattagaccaagggctgatgtaagtttttttttccttaaaaaaggcagcatcagttgtaatggtgaattcatgtcttctcctttagggagamcaaaatgacctgcagctactttctcagctctcatgattttcttcctcttgtttgcttctttctcctctcattctgtccgctttcccccctgcaaactttttgtctgtccatgggttctttaagtgggggactaaactaagggaacaacc

SEQ ID NO: 621130 - DNA, 465 bp, Homo sapiens
ttccatttttgctttattttattctcatctactgtcaatgtagcagaattttcttgaaacttcactcccggtttcttctaattcagattgctcttttgtttcctttcttttctattttcctttagattttactcatcagaaattgggaaagggtggggtaggtaaaacccattttattaatctaaaagcccctgatcttattcatcaagtccaggagtgacaagccaaaaaaaamcatagtattttcattaaattcacatttaagactgtagcatttctaaaatcaggtattagctttcaaaattttcttgatggtatcctctgccagggagaaacaagtatcactgaactttttccctaggaggtgagaatagctcaatggttggcctaacattgcagctgaggaagctggcatggctcttgagtgctaagtcttgtgcctggagtagtgttttctttggagat

SEQ ID NO: 621131 - DNA, 644 bp, Homo sapiens
ctgcttgtctcttaccttcagccttaatgcttcctatctctcacacagcctataagcaaataaatacatattttttcccaagtcaccctgccttcaaatgaatcagggctgactcctgccttacacccttgaacctggtttcttcggttgggtgtgtagtgcagtggattgttttcatggccagacaaccccaggcttcactgctttccagcagagtgaccttggacctgttacttaacctctctaaggctcagtatcttcaccggtaattttgggttacttacatctattgtatgaattaaatgatattaactgtccaaaacacttggcaaacagaaggtgctcartaaatgttagcattttgaaatttcattttcttttattctctcactttttggtcctagcactaatgtgacatgtgcatttctatctcagcaacttgcagagagaagatggcattgatgttttttgtgcttagaatatatggtattattttggaaaattttattgtgaattattaagtctgcattctcaatgtcctcaaagtaatttaaacaaagcaaatgtataaaagtgtattagacagggttctctagaagcacagaactaataggatagatgtatatatgaaagggagtttatta

SEQ ID NO: 621132 - DNA, 597 bp, Homo sapiens
gtgtaaaattgttcctatttctccacagcctttccagcacctgttgtttccatgtcacataatcttgaggtgttttgtctattttatttacttttgtgttctcaagtttagaaccaagcatttaaaagctacttaaatatctgctggaaaaaaaaaatggggcctgagaattagcattttaaaaatacttaggtgattctgatgcaggtggtcctagraatacactttggcaaataaacactggtcaaagttatagaatagtttaaaagaaataaagttatactatttgtaaggacaagtaattaatttataagaacagtgattttttacctgtatggtctcagaggtggatatgatttcttaagacataaaaaattgatcataaaagaagagactgataaattcaattaaattaaaataaaggttttttattcactacaaaacaccataagtaggatgaaaagacaagtcataaactaagaaaagtaatttgcagcacatgtaactgaccaaggaccagtatctttaatatataaattacaccaacgaatcagtaagagaaagacaggcaatctgatataaaaatttctgagactt

SEQ ID NO: 621133 - DNA, 596 bp, Homo sapiens
gtgagacgccatggtgtaatggtgaggatcagcggtactctctgcttttcaggtagtgtttccacagttgcctgaatatggctattgtgagcttcaagtgagaatgtatctgcaccagaaaatcaacctcctccaatgaaataacaacttctcttctaacaatgataaatcttgatgcctttttaacataagataaaaacatggtaagagagctgggtggggtggctcatgcctgtaatcccagcactttgggaagctgaggcaggcggattactggaagtcaggagtttgagagcagcctggccagcatagtgaaacactgcctctactaaaaatacaaaaattagctaggtgtggtggtgtgcgcctgtaatcccagctacttgggaggctgaggcatcagaatcgcttgaacctgggaggcagagtttgcagtgagccgaaatcgtgccactgcactccagcctgggtgacagaacragactatatctcaaaaaacaaaaacaaacaagtaaaaacaaaaacaaaaccaaaaaacatggtaatacatctgacattaatctttagtcactactttactcatttgagaattagga

SEQ ID NO: 621134 - DNA, 567 bp, Homo sapiens
tataagtatgttgtctaatctccaaatatttttggattttcttgcttttttttttttgtaattgatttttaggtaaattccattgtgtaggagttcccgatgactggttccttctggagtttttaattctcagacttgtccacagtgaatctcaaacaattcatcaattacagttcaggttttcctacccaggcattggctcctgaggagatttctgctcacggattttcctctrttaaattattattgtctatatctgtttgtccgtctttccaattttgggggcaccaggtttactctgtgacctcacttctctgacggatctaagaagagttgttgatttattagtttgttcattctttttactcgttgttagaatggcatggctactggaatggcgacttctaagttccttacatgccagaccagaaaccggaagtctggatgttactttttgttttcattttcaaagaacttccaaatagaatcttttgtttgatccatttggcaatgatactgaattgagctaaatattgtagatagcacttagcatccaaggaaagaaaa

SEQ ID NO: 621135 - DNA, 605 bp, Homo sapiens
ttgcctgtttaatgcttaggaaggtaggataaaatttgttaaaatatgcaaatgcatacagcagcaaggagaatgacatagattgaggctacagtcctcttttctgtatctagtcataaggccacagttggtattaatgactttcttcctctgcttcccatttcactttttcttttctctcagccagcatctttacttgctagggttctttacctgtgagtgaccaaatgtttattcctgaaggatctaagctctcagtggttctgccttgtaggggagaaaaaaacaaatattgtcctaatttattataagattaatggctgaggtcccaataagaaaagacagaagracaagaggaaagcatacaaatttatttaatgtaaatttcacctgacaagagagccttcagaaatgaagacccaaagaaacagagagatgtgtatatttttatggacagtcttgcagaagtatgattgaaggacaaaagggtatgacgtcatggtaataaactaatgggtggggggtactgtgcaaggtctgttcagatttttcttggtgtctttgtctgacattccttccctctgagtatagggcaggacacctat

SEQ ID NO: 621136 - DNA, 521 bp, Homo sapiens
agggatcagttctagtgttctatagcactatagggtgactgactagaatgaacaacaatttttggtatattttcaaataattataagaatggattttgaatgttcccaacacaaagaaatgataaatgtttgagtggatggatatactaattactttgatttgattattatacattgtatatatgtattgagatatcacactgtaccccataaatatgtaaaattgttatgtgtcaattaaaaataataataaaagcaaaaaaatacaccataatagaacccarttataacaagtacatgcaagtagaccaactttatattcaacaaacaaatgatatgttgtttacttgaaataaaatattgagaaggacaaatggtagaaagcactccacgaatcataatatcatgttaaatgtatctatttgatgactggataatgccactggctccaatgttactgtgttggagggtaacaatgatctcctgaaatttatatctgttgtatattttctaaagtttca

SEQ ID NO: 621137 - DNA, 602 bp, Homo sapiens
gctatgtttcaattaaaaatggctttatttctacatattgaattctaaatttcatataattttaatatcacaaaatattcttgattctttaatccttcaaaagtgcaaaaaccgttctcagctctatacctgcattgttcaataaagcagcatatgtgagtatttaactaaatcaaaattaaatacaatttaaattctgttcctcagtcacactagcaacattttcaaatgytcaaaagccacatacggctactagttaccacatcggacagcataagtatgaaacgtttctattatcacagaatattctatcagacaatgtagctccaggtcactatatctatctcttgggcataaacctttaggtatcttcccagcattctaaatgtccaaaagtgaactctatctttccctcaaaattaattctttattaccagtatggttaattgtaccagcttgtcccttgtcactcaagtcataagcttaggagacattctcaattcttccttcatcaaccctaacactcagtgactgagtgctagaattctttttttttaacatcactaaaatttaaatccctctctactcctcccagcccattt

SEQ ID NO: 621138 - DNA, 610 bp, Homo sapiens
catcatcttccctctaaaatttgctttgcctacaaaattcccagaatcagaaaatactactaccatctatccagtcaccaaaaccagagacctggtgttgaatatggggggtctctgggttaaatttgtctcccagatctaattctcacaactatatctacattcaagtttatctacctagatcactctcctgctctagccaagcaaaattattagcagttttacatgattcttctgtgcctttgcacgtgtttttctcaagaatgcgctccagctgtttccctttggctggcattcttcttcctacttattcttgaagaccagttcaaggtgcacttactctgtgaaatgtcttttcccacttttgtccccatactttaattatacctacctcaaaaattataaatacctcaaatacagttatttcttaaatgtgtatttgttgatttttaagtctgtcttctctactgaaccttaagttcattgagagcrcagattattatccccagctgctaacataatttgaacctttgttcgcctatttgggccttggttctatctgtaaaacaggaacaaaaaaaaaatctactctgcaaaattattgtgagga

SEQ ID NO: 621139 - DNA, 427 bp, Homo sapiens
agaatttacttgatgcaactgacttgtaatwgccagaaatcctgtgcaacaatagatctaaaattacagacataaagtttatgtgtataataatttcttgacattaaaagtgataaaactcaaattattaaaacaccactttatatcttaagtttttcttcttgatctgacacttaaaattccaaacatgtattaataccacatatctgaaaaaatccaagcatactattactagtatgcaattctgcactgaaatattattgtcaaaatttcttcatggctagtatttcacagccatccattcacatattcagtgttctctggcacaagaaaagaggttcataatttatcttaggaaagaaagaaaaatgtgttgtttttttttttatctgtatggttagtgaaaaattaatggaaaacaaaagtg

SEQ ID NO: 621140 - DNA, 663 bp, Homo sapiens
gacttaggagccgggcgcctgcgcagatgcgcctctcaggcccccatcgcgctccgatatagctgaccacactttcgcctgcaaggcagagcagttccacggctgccgtaggaccccactgatcgctcataggtgtcctcactgcctgcgtccaaagtcctgcgaccatrtgcttgtcccatagtcactccgatttgtctagaaacagttttaaataatatttaaatatctgagttgcttttaagaaatcatttgttctagctggacgcggtggcttacgcctgtaatcccagcactttgggaagccggacagcaggattgcttgatcctaggagtgtaaccacccaatattgtggttcactttgcctgctgctgaccgatagcccatttatcaagacaggggacttgcaatggagtctccccaagcagtattcagagtttttaaagataattcggcgattaggggcttgggaagtagggagtgctgatgggtcaggttggagatggactcatagtgggtagacgtgagtttttcttgctgttttctgttcctgggtaggatggcagaactggttgagccaaattaccaatctgggtggtttcaactgatccatggagagcagggtctgcaaaatatctcaagaacttatcttaggttttaca

SEQ ID NO: 621141 - DNA, 557 bp, Homo sapiens
tattctattacatttattcaaataaaaatgatcccccttcaaagaaatgtagcagctatgctataacaaagaattgtattctttctttctgatattgaataaattaacactgtattagtccattttcacacagctataaagaaatacctgagactgggtaatttataaaggaaagaggcttaattgactcacagttccacggctggggaggcctcaggagactttcaatgatgytggaaggtgaaggggaaacaagaccttcttcacatggtggcaggaaagagaagaaagcgaagggggaagagccccttataaaactgtcagatcttgtgggaactcactatcatgagactatcatgggggaaatcacccccaggattacaattcaagatgagatttgggcggggacacagagccaaaccttatcaaacaccatttagctttggccatgtacacagagtttctgtgctactctgatgcttgctcaagggctctgctataaactagaagccaaatttgtgttttcaagaaagggcagtcttagagcctcatggaaa

SEQ ID NO: 621142 - DNA, 511 bp, Homo sapiens
gaattaaaatgtaggacacagttgatgtcaaagaactagagaatgagatgtgatgtcagaaagcactccatttagtataacacagtttagcagtattcgatatttagaattacaaagaaatattaaattcagagatttgggttcttaaattatttcatatttatattttctgargtctttaaaatatctaataaaaaatgaacaggtaactttattcaattcaaaattaaaacgaccttttttcatcatagtaaatacaagaaatatacactattacacgaagtaatgaaatttcctggaaaaaatacagaaagatatgataataagcactgaacaattttattaagttctttgccaaaatgcaaacatatgaaatgagattgtgtacaatagaccaaaggctacctagagaccaacagtcatataaaaataatttaaggcaagctttattgatttattttaaataaggtaagtgaaatatgggctcagaattaaataagattttcaagaa

SEQ ID NO: 621143 - DNA, 568 bp, Homo sapiens
ctcgccacatctgttagttaaaaaaatttataataatagctattctgagtggtgtgatatggtatctcattgtggttttgatttgtatttttctgatgacttagtgatgttgagcattttttcctatgcttgttggcagcttctatgtgtctgttcatatcttttgttttttaatggggttatttattttttgcttgttgaattgttttagttccttatagattctggatattggayctttgttggatgcatagcttggggaatattttcttccattctataagttgtttgtttactatgttgacagcaggttggtttttctttttctttttttctgtgcaaaagctctttagtttaattaggtcccacttgtcatttttttaaagattgttgttgctattgcttttgaggacttagtcataaattctttcccaaagctgatgtccagaatccagaatgttatttcctaggttttcttagaggacttttatagttttaggtcttacatttaaatctttaatccgtgcagtggctcatgcctgtaatctcagggctttgggaggccaaa

SEQ ID NO: 621144 - DNA, 568 bp, Homo sapiens
ctcgccacatctgttagttaaaaaaatttataataatagctattctgagtggtgtgatatggtatctcattgtggttttgatttgtatttttctgatgacttagtgatgttgagcattttttcctatgcttgttggcagcttctatgtgtctgttcatatcttttgttttttaatggggttatttattttttgcttgttgaattgttttagttccttatagattctggatattggacctttgttggatgcatagcttggggaatattttcttccattctataagttgtttgtttactatgttgacagcaggttggtttttctttttctttttttctgtgcaaaagctctttagtttaattaggtcccacttgtcatttttttaaagattgttgttgctattgsttttgaggacttagtcataaattctttcccaaagctgatgtccagaatccagaatgttatttcctaggttttcttagaggacttttatagttttaggtcttacatttaaatctttaatccgtgcagtggctcatgcctgtaatctcagggctttgggaggccaaa

SEQ ID NO: 621145 - DNA, 564 bp, Homo sapiens
gctgcttcaggtcttaattttcctatgaatgcttctgtgtcacataaagctcatattaaataaatgtgtatgcttttcttttgttaatctctcatttgttagtccaacttacaagctccagcctgagaacctggaagagtaagacaaaaatatttttgttccctcccstacagtttgtcactgtgcattttttctcaaatccacattcagtgatttcacactggtagcttaaaattggccatggtggaagtatttattaccatggaaattcggaaatgctacaaatcagggctttatttgttttcttaattgtctagacacctaggaaagtaatggagaaaatgttaataatgcagataaaatttaacagtgtgtcatatctatagcacttatgttgtaaatagcacaaaaatttaggaaatattcctacagtattcaaaaactgttatctaattcggcaaagaagtcactcataacattctcaatgaataaagttctgacctatatctttgtctttgttgttttacttttgtgttactaactagtatcaaaaaatattactta

SEQ ID NO: 621146 - DNA, 533 bp, Homo sapiens
gttctctctcagcgcaaatctttcctctgtgctgctttgtcctgagaactctgtgttggtcttcgtgggctctcagctctatctcctcaattctcagagttctggactctgcctgggttctccctctttgctccatggcctgaaacctttctcaagscattaagcttgggcagttacagggcttgcctcatttatttctcttttttagggatcactgtcttttgttatcagatatccagggtctagaaaactgttctttcttatgttttatctgagtttctgatttctttcaggtgggcaagtaaatccagttacttggaagcagaagcaattacttttagttttagtagaacttatttcatcataaatttacataacaatttttaatgatggctgtgcaaatcagctccctcataagactcctgaaaatttaacaattgacactcacaagccagtatgagccacctccagcagacctctgctagagcttcactttttacatttgtaagacaaagaaattggtttatgtgatt

SEQ ID NO: 621147 - DNA, 590 bp, Homo sapiens
tgaaaccccatctctactaaaaataaaaactaaaaaaaaaaattagccaggcgtggtggctggygcctgtagtcccagccgctcaggaggctgaggcaggagaatggcgtgaacctgggaggcggagcttgcagtgagctgagatcgcaccactgcactccagcctgggcaacagagcgagagtccgtctcaaaaaaaaaaaaaaacaaaagtcagctgggcgtggtggcaggtgcctgtaatcccagctactcgggaggctgaggcaggagaatcacttgaacctgggaggcggaagttgcagtgagcctagattgcaccattgcactccagcctgggtgacagagtgagtctccatctcaaaaaaaaaaaaaaagagaaacattatatgattatataaatagatgtggaaagcatttgacaaattcaacaaccactgataataaaaactctcagtaaataggaatacaagggagtgtccttgacttgataaagaatatctataaaaatctacagctaacatcatacctaatagtgagaaactcaaagctttcccattaagatcataaacaagacaaggacatcccctc

SEQ ID NO: 621148 - DNA, 538 bp, Homo sapiens
cttatatgcacacacgtttactgcattttttattcataattgccaaaacttgggagcaaccaacatattctttagtaggtgaatggataaataaactgtagttttttagacaatggatattactcaccactaaattaaacgagttatcaagccatgaaaagacatgaagggtctttaaatgcrtattattaagtgaaagaagcctatctgaaaatgttgatgtataattccaacttcacatcatagaatgtgtgatggatggatggatggatggatggatggatgtatggatggatgattccaactatagggcattctggtaaaggcaaaactctggagacactaaaaagatcagtggttggcaggggttagtgagggaggaaaggttgaataggtggagaacagaaaattttaggaccgtgaaaatactctgatacaaatgttggatacatgacattaaacgtttttccaaggcatacaatgtaaaatacgaagagctaaccctgatataaactatgcactttgggtgattatcatg

SEQ ID NO: 621149 - DNA, 538 bp, Homo sapiens
cttatatgcacacacgtttactgcattttttattcataattgccaaaacttgggagcaaccaacatattctttagtaggtgaatggataaataaactgtagttttttagacaatggatattactcaccactaaattaaacgagttatcaagccatgaaaagacatgaagggtctttaaatgcgtattattaagtgaaagaagcctatctgaaaatgttgatgtataattccaacttcacatcatagaatgtgtgatggatggatggatggatggatggatggatgtatggatggatgattccaactatagggcattctggwaaaggcaaaactctggagacactaaaaagatcagtggttggcaggggttagtgagggaggaaaggttgaataggtggagaacagaaaattttaggaccgtgaaaatactctgatacaaatgttggatacatgacattaaacgtttttccaaggcatacaatgtaaaatacgaagagctaaccctgatataaactatgcactttgggtgattatcatg

SEQ ID NO: 621150 - DNA, 541 bp, Homo sapiens
aaaaatttagaattgccttctgaagttactgaaaattaggtggtataagtataatatactccawatggtttacaacctaaagcaagtgtggtaaaataatggagaattcctcatagtcagatgcctttgaacaattgtattctcagaagatttatagggagtctgacttcattgtggtgatgagtttcacagaatgagattttgcagacagagtagaggaggaggggtacaaaaagtcatgttgacttgtggttgattatgtaatggccaacaggatttattctgtcatagttggtcaattatagttacctgcaatgatcatatacaggtaaagggaatgcttagcactgattattttctggatcgttacctatgatgatcatataaacataaagggaatgcttagcactgattattttctgaatcattgtatgtatctttattcctttttcaattaggacaagagggaatcttgaaaaattagtctatttcttttcctcctggctgaagtatagttctacaaatctgtgttcatagttgt

SEQ ID NO: 621151 - DNA, 561 bp, Homo sapiens
tgtgcccttgagagtgtcctgttccatgtgaaaggcactagcctctgaaagtagctgctgaggaaggctcggcaggacatgcctaagcagcttagactccacaccactgtgggtgttaaacacgtacgggagaaaggtctcaggaaagggcttttgtgaacrgaagggttagagctgtcggcctcagtgctgccactagggtcttattaggcacttcaacaacagcctctccatccattttcataggaaatctcatagccacttatagttacttagcaatgacttaaaagaccctgctgactcagactttctcccttggctgatagtatgttaccattgtacccttttctccttaccatgacctgttggagatctttttatttcatcttttactggtcaaatggcaagcaggaattaatgttgtttaaagcactgtaaatatgaggaagtaccagtgtactgggatctcaacagagagattaaatttaaattatctagaagataaattgtgtgaaaatcctggttgagagaaggaatgattaacctttgtttagtgaggcc

SEQ ID NO: 621152 - DNA, 561 bp, Homo sapiens
tgtgcccttgagagtgtcctgttccatgtgaaaggcactagcctctgaaagtagctgctgaggaaggctcggcaggacatgcctaagcagcttagactccacaccactgtgggtgttaaacacgtacgggagaaaggtctcaggaaagggcttttgtgaacagaagggttagagctgtcggcctcagtgctgccactagggtcttattaggcacttcaacaacagcctctccatccattttcataggaaatctcatagccacttatagttacttagcaatgacttaaaagaccctgctgactcagactttctcccttggctgatagtatgttaccattgtacccttttctccttaccatgacctgttggagatctttttatttcatcttttactggtcaaatggcaagcaggaattaatgttgyttaaagcactgtaaatatgaggaagtaccagtgtactgggatctcaacagagagattaaatttaaattatctagaagataaattgtgtgaaaatcctggttgagagaaggaatgattaacctttgtttagtgaggcc

SEQ ID NO: 621153 - DNA, 553 bp, Homo sapiens
gactggtattagttgcaagggcaagccctaggcaaatagagaaatagttgttttttatacaagttgtcatctcacatgttctctcagactgctccattgtcttgaccctgcttaagctgggttttatgtacacttgtgtttatttacatgtgtgagaacttgcatgtcctacagcacacactcagagtctaagaagtcagctagtgaattagcttaatgcattaagagtgtactagagtcatttggagaatactctcataaattatacacatataggcaatatgctttcattttaacttggtctcatagagatactgtcctcatatttaatatttattggcaactgaagatttcagctctttaaagaaagtttgactctaggtcttgcaatatgagctcaatttttttattctatacatttcttcacagcccttcacaaaaactgctcacgaatagctgcaaattctcargcgggtttgtttggatatgtacaagctattattgatgtatctaaacttttgaaaagtcaacaaattgagctgaaagttggtta

SEQ ID NO: 621154 - DNA, 558 bp, Homo sapiens
tcactggtggcaaatataccagaggattctctggataatttctccaataataaacaaggaaacagaccaatattctcacaatgccaacatacacacaaacacaaatatcctcacagatttaatacttcatgcatatctaattaagaatcaacatagctaaataaatatctgtcaaataaattgtacaatatttataattacctatgatttcaaaagatgtaatattttctaaatggattttagctctaacatatataatgtttcctccaaaataaatctctaatttttgtagacatcagtgaacatgcgtttccaaggaatatttaattaaagctgaatagtgttccctaagcgscaatgggtaatgtcattgatctcacttaagttccagtttgaaattcacacggtttttattctggtgtaaacctttgtatacctgtttcagcaatgaacatactgaagtagttagaatatatttcatcacgtattatcacataacttaaattggtaaactaattcaatattgttgaaattcaagaaatgctgcaaataaagcac

SEQ ID NO: 621155 - DNA, 600 bp, Homo sapiens
acatcagacttcaagttcttcagctttgggattcagactggcttccttgctcctcagcttgcccattggcctattgtgagaacttgtgatcaggttagttaacactccttaataaattttatatatacatctatcctattagttctrtccctctagagaaccctgactaatacaatgtgtgtggtgagaacaataagatctaatgtcttagcaaatttcacgttcacaatacagcattacaaactgtagtcgccatgtcatataatagattactggaaatgattcatcttataactgaaagtttgcaccttttgaccaatatctccccatgtcctcacccgctggcccctatcaaccaccattccctctctgcttctgtgaattcaactttttagattccatgtataggtgagatcatgcagtatttgtctttctgtgcctggctttttcacttagcgtgatgtcctctaggttcatcaatgttgcaaatagcaggacttctttctttcttttttcttttattgctttgcatatgttgcaaaatgcttacaataaacatttaatattttattgtgtgtgtatgtacatgtgtgcctgttt

SEQ ID NO: 621156 - DNA, 600 bp, Homo sapiens
acatcagacttcaagttcttcagctttgggattcagactggcttccttgctcctcagcttgcccattggcctattgtgagaacttgtgatcaggttagttaacactccttaataaattttatatatacatctatcctattagttctatccctctagagaaccctgactaatacaatgtgtgtggtgagaacaataagatctaatgtcttagcaaatttcacgttcacaatacagcattacaaactgtagtcgccatgtcatataatagattactggaaatgattcatcttataactgaaagtttgcaccttttgaccaatatctccccatgtcctcacccgctggcccctatcaaccaccattccctctctgcttctgtgaattcaactttttagattccatgtataggtgagatcatgcagtatttgtctttctgtgcctggctttttcacttagcrtgatgtcctctaggttcatcaatgttgcaaatagcaggacttctttctttcttttttcttttattgctttgcatatgttgcaaaatgcttacaataaacatttaatattttattgtgtgtgtatgtacatgtgtgcctgttt

SEQ ID NO: 621157 - DNA, 459 bp, Homo sapiens
caaaatgcttacaataaacatttaatattttattgtgtgtgtatgtacatgtgtkcctgtttgtattccacatgcatttttttcttatccatttatttgttgatagccatttagattgtttccatatttcatctcttgtaaatattgctgtaatgaacatggaggtgcaggtatctctttaagatactgatttcatttcctttgaatatatattcagtagtgggattgcttaattatattgttcagttttaattttctgaggattttgcatacagttttttattatagttggacaccaagggttgtgttttctccgcaaccttgccaacacttatattaaaaaaaaaaaccgtttacttttggtctaagggtacatgtacaggtttgttatatagagaaactcatatcatggagatttgttgtatagattatttcatcacccaggtaaaaagcttggta

SEQ ID NO: 621158 - DNA, 610 bp, Homo sapiens
atttcatctcttgtaaatattgctgtaatgaacatggaggtgcaggtatctctttaagatactgatttcatttcctttgaatatatattcagtagtgggattgcttaattatattgttcagttttaattttctgaggattttgcatacagttttttattatagttggacaccaagggttgtgttttctccgcaaccttgccaacacttatattaaaaaaaaaaaccgtttacttttggtctaagggtacatgtacaggtttgttatatagagaaactcatatcatggagatttgttgtatagattatttcatcacccaggtaaaaagcytggtatccaatagttatttttttctgattctctccctctttccaccctctaccttcaagtaagccccagtgtctgttgttccacaactttgtgtccatgtgttctcatcatttagctcccactaaacacgtggtatttggttttctgttcctgcattagtttgctaaggataatagcctccagctccatcatgtccctgcaatggacatgatcttgttctttgttatggctgtatagtattccatggtgtaaatgtatgacattttctttacccaatctgc

SEQ ID NO: 621159 - DNA, 610 bp, Homo sapiens
atttcatctcttgtaaatattgctgtaatgaacatggaggtgcaggtatctctttaagatactgatttcatttcctttgaatatatattcagtagtgggattgcttaattatattgttcagttttaattttctgaggattttgcatacagttttttattatagttggacaccaagggttgtgttttctccgcaaccttgccaacacttatattaaaaaaaaaaaccgtttacttttggtctaagggtacatgtacaggtttgttatatagagaaactcatatcatggagatttgttgtatagattatttcatcacccaggtaaaaagcttggtatccaatagttatttttttctgattctctccctcttyccaccctctaccttcaagtaagccccagtgtctgttgttccacaactttgtgtccatgtgttctcatcatttagctcccactaaacacgtggtatttggttttctgttcctgcattagtttgctaaggataatagcctccagctccatcatgtccctgcaatggacatgatcttgttctttgttatggctgtatagtattccatggtgtaaatgtatgacattttctttacccaatctgc

SEQ ID NO: 621160 - DNA, 586 bp, Homo sapiens
taaccgtgaggcaatatctcattatggttttgatttgcatttccttgattgttggtgattttgagcactttttcatatactgttaacccattagcttcttttgaaatatgtttatttagttccttttcccatttgttaattgggttatttgtttttttgctatcaacttgaagagtttccyatatatcttggacattaacccttatcagatatatggtttgaaaatattctctcccattccataggttgcctttttattttattcatggtttccttttccatacagaagattttttagtttgatgtagtctgctcatttatttttgcttttgctgcccatgattttggtgtcatatccaagaaaatgatttccaaaaccaatatgtccaggagctttttccttatgttttcttctaagaatttttatggttttacagtttcaggtcttacactgaagtctttaatccattttgagttaatttttttgtgtgtgtataaaatagggatccagtttcttttttctttttttttttttgcatatggatatccagtgttttcaacaccatttattgaagagactatcatt

SEQ ID NO: 621161 - DNA, 396 bp, Homo sapiens
tccttatgttttcttctaagaatttttatggttttacagtttcaggtcttacactgaagtctttaatccattttgagttaatttttttgtgtgtgtataaaatagggatccagtttcttttttctttttttttttttgcatatggatatccagtgttttcaacaccatttattgaagagactatcatttttccaatgtgtattctttgggtccttgtcaaagattagttagttgtgtatgcatgggtttacttctgggctayccagtctgttccattggactgagtgtctgtttttattctggtaccttactgtttttattactataattttataattaaatttgaaaatcaggaattgcaatgtcttttgttttttcttctttactaagattgca

SEQ ID NO: 621162 - DNA, 586 bp, Homo sapiens
gtaggggccacataatgtctggttgtctgacacttagtgatccattgagatgtattgcacagttaagctgttgtcagccctgtttctccgaagtaaagtttcattttccccactttaaacattatgtaatctgtgagataataactaacttcacaccatggaaaaattaaatttcccatcaatattttctttattggtttagccattgttgtttttaaatgtagaaatagggatccaattaatagacaagactaattgtgcttcttatttattcttggccccacatctccatgattgtgctgtaatatgaactggaattttcatattaaaaataagatatatgaagttatacatatgtggattggcaccctgactataccactgaccaggagtgtgatcttgagcaatcttttttaacatttctgtgcttcagtrtctgtaccacttaaattaggacaatgtcatttacttcctttcgttgtcagagcacaaattatgaaatgaataataatagcaaggagagcaaagatcacctgatgccatcaagcagaccatccggaagtaaaactccttatctgaggattca

SEQ ID NO: 621163 - DNA, 492 bp, Homo sapiens
tttgacagcttttgtcccggtgctaaaatgaaattgatcaaatggacgttagagcttttggcctccaaaacattcaggaacctacagggagttctgcttgaatagcatatgatttttcaaaactactgcatttacagccgtgttacttatactaaaactccaatttacttggatcacattgtatttctccttttttatttatatttttctaaatagcctacagcagttttgatgtgaggttctgtcttttaacttttattttagtttcagaggtacatgttcaggttggttctacagataaattaygtgttataagtgtttggtgtacataatgtttcatcacccaggtaataaggtagttttccatcctcacactcctgccatcctcaacccttaagcaggccccagtgtctattgtgcccttctttgtgtccatgtatactcagtgattagctcctacttataagttagaacatgcagtgtttggttttc

SEQ ID NO: 621164 - DNA, 603 bp, Homo sapiens
tgattttcttcccctcaaatcacaagtaagatggtgttcaactaataatgttatgtatcatttaaaattttcgaytcttcaaacagaagtttatgtaattagacaaaataattacttaaaagtaagtacgctttgggaataagattttgctttaatgcagtggtcttattaaaactaagtaataaaataacttttattaaaatattttcttaacttcccaaacatataatgaaaacactaaagatatcacacatattataaatatgtttactaataatagttgtgtgttttagaagtttcaaaaatgaatgcatgtgatgtggtcggaatttgttctaagttgttctgtctgtccatttccaggtcttttagttagaaagaggacttatcttcctctgagaacaatgcatggacagtaggatactacagattccagtctagtctttcttgtcattgtatttgtagtgcctaatatttcgtaaggatatgcagtgcctaatatttggtaaggatggtattctgtatttggaggatgtgttgattaaaatacaagatgctcaatctctagaaattcataatttagtggaaaagggacacttttga

SEQ ID NO: 621165 - DNA, 603 bp, Homo sapiens
tgattttcttcccctcaaatcacaagtaagatggtgttcaactaataatgttatgtatcatttaaaattttcgactcttcaaacagaagtttatgtaattagacaaaataattacttaaaagtaagtacgctttgggaataagattttgctttaatgcagtggtcttattaaaactaagtaataaaataacttttattaaaatattttcttaacttcccaaacatataatgaaaacactaaagatatcacacatattataaatatgtttactaataatagttgtgtgttttagaagtttcaaaaatgaatgcatgtgatrtggtcggaatttgttctaagttgttctgtctgtccatttccaggtcttttagttagaaagaggacttatcttcctctgagaacaatgcatggacagtaggatactacagattccagtctagtctttcttgtcattgtatttgtagtgcctaatatttcgtaaggatatgcagtgcctaatatttggtaaggatggtattctgtatttggaggatgtgttgattaaaatacaagatgctcaatctctagaaattcataatttagtggaaaagggacacttttga

SEQ ID NO: 621166 - DNA, 598 bp, Homo sapiens
ttcttttttttaagaatgttgaatattgatcttctggcttgtagagtttctgttgagagatctgctgttattctgatgggcttccctttgtaggtgacctggccttcctctgtggctacccttaacaggttttccttcattttgaccttggagaatctgatgatatgygtcttggggttgatcttgccatggagtatcttaatggtgttctctgtatttcctgaatttgcatgatagcctgtcttgctaggttgaagaagttctcctgaataatatcctgtagtgtgttttccagcttgtttccattttctccatcttcttctggtacaccaatcaatcagaggttcgatctttttatgaagtcccatatttctcagaagctttgtttattccttttcattcattcttctctattcctgcctgcatgtcttatttcagtagggtggtcttcaaaccctgatatcctttcttctacttggttgatttggctgttgataattgtgtatgcttcatgaagttctcttgctgtgattttcagctccatcaggtcttttatgttcttctctaaactgattattctagttagcaattcctctaa

SEQ ID NO: 621167 - DNA, 495 bp, Homo sapiens
tgattctccatccagttctgtacccttgatggagagacattgcaatcatttgaaggaggagtggtactctggccttttgtgttttcagcattttttcatggaatctttctcatcttcgtgagtttgtctagttttgacctttgaagctgcagacccttagatggcatttttgtgggggcctttttgctgttgttgttgatgctattgttgtcactttctgcttgtttttctttcaatagtgagrtccttcttctgtagggctgctgtagcttgctgggggttcacttcaaaccctatttatgtgatttgctcctgggcctggagatgtcacttaaggaggctggagagcagtaaagatgtgtgcctgctccttcttctgggacctctgactttgagggacacaaacctgatgccaggaggattgctcctgtatgtggtgtctgacaacccctgttggagcttcttacccagttgtttggcatggggagcaggacc

SEQ ID NO: 621168 - DNA, 495 bp, Homo sapiens
tgattctccatccagttctgtacccttgatggagagacattgcaatcatttgaaggaggagtggtactctggccttttgtgttttcagcattttttcatggaatctttctcatcttcgtgagtttgtctagttttgacctttgaagctgcagacccttagatggcatttttgtgggggcctttttgctgttgttgttgatgctattgttgtcactttctgcttgtttttctttcaatagtgagatccttcttctgtagggctgctgtagyttgctgggggttcacttcaaaccctatttatgtgatttgctcctgggcctggagatgtcacttaaggaggctggagagcagtaaagatgtgtgcctgctccttcttctgggacctctgactttgagggacacaaacctgatgccaggaggattgctcctgtatgtggtgtctgacaacccctgttggagcttcttacccagttgtttggcatggggagcaggacc

SEQ ID NO: 621169 - DNA, 593 bp, Homo sapiens
ctgtgtacttgatatggtttggttctgtgtcctcacccaaatctcatcctgaattgtactcccataatycccttctgttgtgggagggacccagtgggagataactgaatcatggggacagtttctcccatactgttctcatggtagtgaataagtctcacgatatctgatgctttgataaggagaaacctacttcacttagctctcattctctctcttgctgctgtcatgtaagaagtgcctttcaccttctgccatgattgcaagggctccctagacatgtggaactgtaagtccattaaacctcttcctcttttaaattgcccaatctcaggtatgtctttatcagcagcatgaaaatgaactaatacagtactcaaatcattagatgcttacattgtattactatgcttccagaaagtaacatagactctccatttgcccgttaatgaggtaagtcttactgatgctgaaagaagtgattcttattactaagccatgggtcagtttaggacactgctcagtttattttaaaattatgtttgattgaagtgtatcaatgacagatttcatttgtattgtatagaaaatgt

SEQ ID NO: 621170 - DNA, 596 bp, Homo sapiens
tatgcataaaacaaaccaagagtgaaccacgaagaaaattcaaaacctaaacgaccaataaaaagattgaagctgtaatagaaagtctcctagtaaagaaaagcctgggaccagatggctccactgctgaattctgccaaacatttaaagaataaataatataaatcctattcaaactattctgaaaaatagagaagaaaatacttccaaactaattctttgaggccaatgctacccaatacaaaaaccagacaaagtcacgtcaaaaaagaaacctgaaggccaatatctctgatgaataytgatgtaaatatcctcaacaaaatactaacaaactgaattcaacaacacattaaagagattattaaccgtggccaaatagaatttatcccaaagatgcaaggatgtctcaacatatgcaaatcaatgaatgtgacacatcatagcaacagaatgaaggacaaaaccatatgattctttcaattgatgctgaaaaacgtgataaaattcaacattcttcttgataaaatccctaaaaaaactgagtatataaagaatatacctccaaataataaaagtcacatatgacaaaccca

SEQ ID NO: 621171 - DNA, 562 bp, Homo sapiens
tgtaatttgcttgtttacaaataggtgttttaattagtgatgaatgtgaggagattttacattattttctaacaaaagtatttccagtatatgagaggagctatgtaagwtaaaaaagatatgaataagacaacacttagaaactccctaacacattctgtaaatcatagaaatgtggaaactagatatgacttgcaagatggacagtgaggaaaaggcaggatttgttggaatactcagattttcctttccttttaatctttccctttaaatattaatgtacctaaagaacatctcccagtgaaagaagagttagctaaggtcagatttttataaaaaagatggtagaggccagtcagagtgtccaagatgaataagattttatcatacaaagaccttttctccctatagcaatatgaaaatttcttttctagttctttggtgacatgaaaattctaactacattgcttaaagaatggaacaaaagagactaaagtttaattatactgttttattttccttgcagctgtctcccattagctagtgagcagtggggaaagtt

SEQ ID NO: 621172 - DNA, 430 bp, Homo sapiens
ggttgtctttaatatagtaatacaccattaagaattgtgatatttccgaactcaatctcaccatcagaggttgatttttgtgggtagaaacattttcacgtgttcttgggcatcaraagcatgcaagccttggctcccgtttgaaagttccatgacaatgacaattggaagaccaggtaaaatttaacagatattatttaatgaagttaacgtattaacacattcaattctcataagaaacgtataaagtaggtaccactatttaccctctttaatatatgaggaaactgagacaaagaaaagaatatttcctcagggttgcaccgttaggaagcactagctcaaggaattgcactcaagtcctctagcttagagttcatcctcttatccaagagcctctactgcctcattgcctgtggggaactttatg

SEQ ID NO: 621173 - DNA, 430 bp, Homo sapiens
ggttgtctttaatatagtaatacaccattaagaattgtgatatttccgaactcaatctcaccatcagaggttgatttttgtgggtagaaacattttcacgtgttcttgggcatcaaaagcatgcaagccttggctcccgtttgaaagttccatgacaatgacaattggaagaccaggtaaaatttaacagayattatttaatgaagttaacgtattaacacattcaattctcataagaaacgtataaagtaggtaccactatttaccctctttaatatatgaggaaactgagacaaagaaaagaatatttcctcagggttgcaccgttaggaagcactagctcaaggaattgcactcaagtcctctagcttagagttcatcctcttatccaagagcctctactgcctcattgcctgtggggaactttatg

SEQ ID NO: 621174 - DNA, 556 bp, Homo sapiens
gccatagtaaaaaggagtataaacaggtagagatagcacttactacactactgaacagcccattgggatcaataatttcttattgactgcctcttctctcatttagctttaaaaggaatgtggctttccacggagaatgttgtgatttatcagattctcatcacatatccactgcaatgtgatagagaaaaggtgattggcttagcccctactgtttagttctaagtgcctaaatattttatctttcattgtatctctggtcaatgcagcactaaacagattgtggagttttgagtgaaatatgaaggaaagagacctaagtagatgcttttggccacattcccccaattttctgggaycaacagggggcataaaagacctgttaaacaattaaggatacttagaatatgctaagctaacaaaagcttacacaccttccacacaaaacatgcctcataaatttgcagaaccaaatgcaaaatgaaattttaagacctatttttcaaaaagtttatagaatttcaagatagtgaaagcaaagcatcaaagtaaacat

SEQ ID NO: 621175 - DNA, 556 bp, Homo sapiens
gccatagtaaaaaggagtataaacaggtagagatagcacttactacactactgaacagcccattgggatcaataatttcttattgactgcctcttctctcatttagctttaaaaggaatgtggctttccacggagaatgttgtgatttatcagattctcatcacatatccactgcaatgtgatagagaaaaggtgattggcttagcccctactgtttagttctaagtgcctaaatattttatctttcattgtatctctggtcaatgcagcactaaacagattgtggagttttgagtgaaatatgaaggaaagagacctaagtagatgcttttggccacattcccccaattttctgggaccaacagggggcataaaagacctgttaaacaattraggatacttagaatatgctaagctaacaaaagcttacacaccttccacacaaaacatgcctcataaatttgcagaaccaaatgcaaaatgaaattttaagacctatttttcaaaaagtttatagaatttcaagatagtgaaagcaaagcatcaaagtaaacat

SEQ ID NO: 621176 - DNA, 567 bp, Homo sapiens
cctttggggcatgttgagcttttattccagtgttgtctttcgctcctgaagccttatcgctatcatttctttgaaaggctgacccagtttaatatctgaaggttagtctytgatagaaccttttaatcacatcagcagggaactcaacggttagtgttactattcaagtctcatattaatgggtttaattagcatggttagatatacagccgagaaactttggccattgaagagtatttattgataattatttaaattcttgcatcctttgtagtaacctacctgaatatgcttataattaaataactaaactgctgctaaaacaacttttaaaaatccacctttgattatttgtacgtatatattatatatatataaagaatataaatatatatatgtatagacattgttatagcaatttttccacaacttcatacctgatttctactgaggaactaagcatcaggagcgtgttgtatattttccttagtaaatgggtgccacttccataagaaaatgcattgaaaaatcctactaagatttctctcccagaaatattattgtgtg

SEQ ID NO: 621177 - DNA, 539 bp, Homo sapiens
ttattgtgtgcttcatgcagaatttaaaaattatttaaacaattaaataaataactcaaattaaacatttatgttattamcctgagggcagcgttagtttttgaggcttattagcaggggaacacacaaacctggaaagatataaaaaaggtttattttctttgttggcctccaactaattgcagtaaaataaacttagtgtttttgccagcttgaactctcatggaagagtaagcaatccaaactctagtctcttgatgtggtcacatatctattgccaagtttctttttaaagttccccaaacaaacatgtatgccaattaagcaatataaataagggagaaacttgttgtgccctcgtgccattttctcattaattctaggagatgaccccaagacttcttcccatttttatccaaaagattaaatggcatcttatcccaaacgcctcaggtaaacacgccaggtttactttcatcttggactctatactctttgaatgaagatgagaccaaacagtgccctttgaggtggaagat

SEQ ID NO: 621178 - DNA, 598 bp, Homo sapiens
tgtcaaaccataagcagcagacaggtggggggataataagaacccagatgttctttcctctcttcctgggatctgctaattgtaccttccctcgaccagaccaaaggagaagcaagaatgaaaggtagcattagagattagtatttatggcctcaaaagaaggcatagacggatagaaaattgatctgtaagaaaatggagcaaaaccagtacacacacacacacacacacacacattataatatatcttctttgagactggaccttgtatcttaacacacataycttttccccccatatccttgacacttttccaatagaagcttagaaaccgaggtctgccaatatgagaacagtttggattaaaaaaacattgatggaaacagacattaaaagtttaagctgttctctccacttaaataaaatcattatgttaataattacattatttttccccttcatattgctgctattgagatgtcctttgataattatacagagacagtgccattttgattttagccctctggcacattaattatatattcttacttcttagaaatactgacagaagttggccccataccaaagaaccagc

SEQ ID NO: 621179 - DNA, 598 bp, Homo sapiens
tgtcaaaccataagcagcagacaggtggggggataataagaacccagatgttctttcctctcttcctgggatctgctaattgtaccttccctcgaccagaccaaaggagaagcaagaatgaaaggtagcattagagattagtatttatggcctcaaaagaaggcatagacggatagaaaattgatctgtaagaaaatggagcaaaaccagtacacacacacacacacacacacacattataatatatcttctttgagactggaccttgtatcttaacacacataccttttccccccatatccttgacacttttccaatagaagcttagaaaccgaggtctgccaatatgaraacagtttggattaaaaaaacattgatggaaacagacattaaaagtttaagctgttctctccacttaaataaaatcattatgttaataattacattatttttccccttcatattgctgctattgagatgtcctttgataattatacagagacagtgccattttgattttagccctctggcacattaattatatattcttacttcttagaaatactgacagaagttggccccataccaaagaaccagc

SEQ ID NO: 621180 - DNA, 443 bp, Homo sapiens
gctattgagatgtcctttgataattatacagagacagtgccattttgattttagccctctggcacattaattatatattcttacttcttagaaatactgacagaagttggccccataccaaagaaccagcctgggacttttacttgtattcacttcgtaattccttgctrtgacactcataaaaatgagcaattcaacagatattttgtctttgtatccttgagtgttacagtataaaataataaacaactgcacagatccctatgtaggacaatcctacactgtacagatctaaacataaaaaaaaacccacattcctctcagatatatcatttcacctttattttcacctttagagcatttcacgtttatttattttcaataagtttattgctgtctacagaacatataactgtgttgctggaaataggaatgcaatgtat

SEQ ID NO: 621181 - DNA, 532 bp, Homo sapiens
attactggttttgaacaacattttatatctctggaccctaagtgaaatactagagaagatgatctctaaaatctcattaattgcaatattttgtgattatttgctttatggccttgataagatctgctatctgcctgtgtgactgatacaaagtctaagctccaaggcaggatgcaaactacaagaactccaatcccttttccatctatgtcattacctcaatttcagtttagctaatcataagtgtgtgtatatatatatcaacgactcagtggtgattggcctcatgctgaagacaagattgcaattcagcagaataacacaggcaagttggcaagagtgagcaagttgccactcgatacaaatgtgatgagatgtacgggtaagttatgaaaattggttctgctgacatctgcagaagaaatcatattaaggataggtgatgctgaacatggcactatgctaacagaatttctggtgtactttcaawtcctctggggagtagacctgactaaatatgtttgagattaag

SEQ ID NO: 621182 - DNA, 532 bp, Homo sapiens
attactggttttgaacaacattttatatctctggaccctaagtgaaatactagagaagatgatctctaaaatctcattaattgcaatattttgtgattatttgctttatggccttgataagatctgctatctgcctgtgtgactgatacaaagtctaagctccaaggcaggatgcaaactacaagaactccaatcccttttccatctatgtcattacctcaatttcagtttagctaatcataagtgtgtgtatatatatatcaacgactcagtggtgattggcctcatgctgaagacaagattgcaattcagcagaataacacaggcaagttggcaagagtgagcaagttgccactcgatacaaatgtgatgagatgtacgggtaagttatgaaaattggttctgctgacatctgcagaagaaatcatattaaggataggtgatgctgaacatggcactatgctaacagaatttctggtgtactttcaatwcctctggggagtagacctgactaaatatgtttgagattaag

SEQ ID NO: 621183 - DNA, 633 bp, Homo sapiens
ggcataaaacattttggcaaacctaattccacctcattagacattctttcaaagagtcttagataacacaagtacaaaactggatcaatgatatggtttyaatatcctttttccccaaggtattgaaagtaccaatccatcacctactctcattggccacctcagtaacttaatttcccactccaacttagactcatttaatttctttcttcattgatccctgttcttaaggaaaatggatttaacttcactgggaggtaggttttatgcattttaattgttttttattaagtgtttacaactaactttttccattctgaacataaaataagctcttattcttttatgtcttgtgtttcctttatttcataaaactcattttcatcttatttttcttctccgttttcctagttaagccaaaatctacagcaaatgcacacaaacacactaatatacatgtgggttatgttataggtttgtcctacatcttaactcttattgaaagaaacccttttttcttttaagttgaaacatcttttattcttttcagtgtatatggtcaatttatcaaaacttgactttacttgtcttcaaggttgatctttgtaaagttataaaatttgtttggtgcta

SEQ ID NO: 621184 - DNA, 590 bp, Homo sapiens
aactgtacgtgattgtgaagggctgttctatactctgaacaccctgtgaataacatgctccccaactctgtcaccaacagaattcaatttttatgttccttttcccccttcaactagggtatggcttgaagggtgtcrgaaagcctctttctcaaactatctctctcagtagctaataaaatatctcacatgacaccattagtttatttctcaacgttttctggacagatggcatattgtatcattttgtagcttttggtgtattagtggagaaaggagtgcgtattctcaacatatagcatattagtgaggattttcttcttttatctttgtccccaaaaatatggtggtgccctgctgactattaaataaactaaaattattctagcttcccttaatctaagtttaactccacttttccagtttatatcccatcaccttccatatccaaccatcttcctatatttattaattcttgatttgagtcagacatagacatgagattacaatttacattctaaaatacatatattcttcttttacatagagaggtttgctcaaatgattcacttacagtagagcatgttagg

SEQ ID NO: 621185 - DNA, 552 bp, Homo sapiens
attcttttatgtcttgtgtttcctttatttcataaaactcattttcatcttatttttcttctccgttttcctagttaagccaaaatctacagcaaatgcacacaaacacactaatatacatgtgggttatgttataggtttgtcctacatcttaactcttattgaaagaaacccttttttcttttaagttgaaacatcttttattcttttcagtgtatatggtcaatttatcaaaacttgactttacttgtcttcaaggttgatctttgtaaagttataaaatttgtttggtgctaactagtttgcagttttgatttctagattactgcatgtcaaatttaatcataatgctgtcagctggccgaatggctgaactccatttttctacttcactgattttttccttcattctagcataagtcwtcattccctgtaggggacttgacagaataattccagaaggaagcatttgcctaagtcattatttttgtgtttgtttcatgatgtacctgaaatagttttaaattaatatttatatgattttgttattta

SEQ ID NO: 621186 - DNA, 552 bp, Homo sapiens
attcttttatgtcttgtgtttcctttatttcataaaactcattttcatcttatttttcttctccgttttcctagttaagccaaaatctacagcaaatgcacacaaacacactaatatacatgtgggttatgttataggtttgtcctacatcttaactcttattgaaagaaacccttttttcttttaagttgaaacatcttttattcttttcagtgtatatggtcaatttatcaaaacttgactttacttgtcttcaaggttgatctttgtaaagttataaaatttgtttggtgctaactagtttgcagttttgatttctagattactgcatgtcaaatttaatcataatgctgtcagctggccgaatggctgaactccatttttctacttcactgattttttccttcattctagcataagtcttcattccctgtaggggacttgacagaataattccagaaggaagcatttgcctaagtcattatttttgtgtttgtttcatgatgtacctgaaayagttttaaattaatatttatatgattttgttattta

SEQ ID NO: 621187 - DNA, 618 bp, Homo sapiens
atgattttgttatttatatttttgtgtttatatcttttcatattttgcttgaactaatagtataaaattatttagaaaaaatagaaaatctttrggaaagtttttaatatgtttaaaatccccatcttacatattggtattgaggaatgtgatttgggagtcatttaagagatttgtggattattaaattggatttgctttaaaatattgaatattaggggaagcataatcatgtatttattgtaattctgtagacattttaaaataatattaccaaataatgtttactactgaattatgaagaaacttttgctgacataagagctgcaggtattgtgatttctgtttcattaaataattgaaactgaaagaaggaaaattcccatttactggcttttcagaaaatgtgaatgtttgtgtgtatgtatgatgcacatggtgaattacatgcaaacacactgaagaaactgaaaaggggctgatgactcttcttacccggtcagtaaacacaatcagatgtacagtgtatctagatgctcagctgactgtatgttcctactgggaggaataccaaaaaaaaatgtgtggtaagaggtttttgatacagcagtggcaata

SEQ ID NO: 621188 - DNA, 590 bp, Homo sapiens
aactgtacgtgattgtgaagggctgttctatactctgaacaccctgtgaataacatgctccccaactctgtcaccaacagaattcaatttttatgttccttttcccccttcaactagggtatggcttgaagggtgtcggaaagcctctttctcaaactatctctctcagtagctaataaaatatctcacaygacaccattagtttatttctcaacgttttctggacagatggcatattgtatcattttgtagcttttggtgtattagtggagaaaggagtgcgtattctcaacatatagcatattagtgaggattttcttcttttatctttgtccccaaaaatatggtggtgccctgctgactattaaataaactaaaattattctagcttcccttaatctaagtttaactccacttttccagtttatatcccatcaccttccatatccaaccatcttcctatatttattaattcttgatttgagtcagacatagacatgagattacaatttacattctaaaatacatatattcttcttttacatagagaggtttgctcaaatgattcacttacagtagagcatgttagg

SEQ ID NO: 621189 - DNA, 587 bp, Homo sapiens
taccaaataatgtttactactgaattatgaagaaacttttgctgacataaragctgcaggtattgtgatttctgtttcattaaataattgaaactgaaagaaggaaaattcccatttactggcttttcagaaaatgtgaatgtttgtgtgtatgtatgatgcacatggtgaattacatgcaaacacactgaagaaactgaaaaggggctgatgactcttcttacccggtcagtaaacacaatcagatgtacagtgtatctagatgctcagctgactgtatgttcctactgggaggaataccaaaaaaaaatgtgtggtaagaggtttttgatacagcagtggcaatagagatgagagtctggtagcctagcaacctgtattcggtagtgaaggtatttgtggtagtgactttataactacactggtcctgagtaatgatctggtgtataccaaactgtctaccttctttaaactcctgaccattttttccagcctttttgttggttctgtgaactacacaaagccttctaataaatccttttctacctatataaccagggttagttttggttgtttttgcatgaaaa

SEQ ID NO: 621190 - DNA, 581 bp, Homo sapiens
ttagtagtggcacttaactgtggcaccacatttcattgtgggtttgagcaagtaaaataattatagttaagttactgaactgtataaatgggtgattttaatacttttttaaaacgtagagtattataaaggtagtccatataataaccccactttctctcatgcacacatctattaaactttctttaatggaagaggaagatatagaagacaagagattgcacataacctgtggccttttttatatctggaacaccctgcaatttggtgcattcatgggactctttcattcatacatgtaaatacggtatatgtgttataatagaaaaaaataaggacttcgtacccattttcttcgtgctactatgttaagctaagaagtggaaggtgccaagttcaatttggaactctctagcaagccagattaatgtttactggcttctctatctctgcrcttcattgctcttgaaatcacttcctttccttttgaatattgctagcctcttttaggatgagccagttgtgagcctgaatccaaattatcacagtactcattacagccatcaagcaaactgcaagtg

SEQ ID NO: 621191 - DNA, 629 bp, Homo sapiens
ccattaactaacaggaagacaataagtacaataggcagggggggagatatctggtgctcagttttgaataagttacatttgagatgcctattatatcctccatattaaagtgtagaataagggtgaaatgaaagactataattcagcatagaaatctaggctacagctatgaatttgtgagctgtgacttcataaatgacattcaaagccatagattgaatgagatcaccaaaagaatgactatatgggtgaagcaaaaagtgttgacatraagacaaagctgatgacaaatcaacaagattaggaataattaattactgcttaatttaacaacatggaaatcgtcagtaacattattaaacagttttgatgcagtagtggggtccaagtctgattttagtaggttgaaaattagaggattgagtctagagaaggcaagtacacataaaatattccaggagttctgctggaaaagaaatacatggactaaggagatttgagatgaggaaaggagatgtgttttgtttttatttttcttaaagatggggcaaatagtgtattttcatactaaattaggattattcattatagaggtaaaagttgataatgcaggagagagaggaaagaat

SEQ ID NO: 621192 - DNA, 623 bp, Homo sapiens
taattatgtttaattgatggaatttataattaatttataaataaatgaaaaataatgtcattatatgcaagagagtagatgatattgaaatttgattacagacttctaattacattaatggtttggaagatctctgtttaatttagaatagtcagaaaacaaatgtgtttgattatcacttttgttcctagcccagtctactcattcttgaaattgtgttctttccttaaaatatctagtattttcaaatgtgcttctcattctccattttccttgcaacaactctctttcaagctctgattactttataatttgagtattctgttcattggaactttttacccttctacctggctcttcattcttttcactttctgcactgacaacagattcrcttttctaaaagtattttggttatatagtgatctactcacaagtctttggtaattctctttttccttaatataaatttaatcctttgtgttgatacaatttctgtcactctctgttgttgatctgtttcagatgaaatggtaaccatatctcttcctaatataaataattcagattttcctcaatataacttaaaaaaatagtatacttgttcttcctttctccacttt

SEQ ID NO: 621193 - DNA, 594 bp, Homo sapiens
ttggttttctacactgtcatgcacacctttgaatgatgtcttcactttaaacttttttgcatactcacaaaccaatcagcatgcactccccattctgagtccataaagggccccagrtccagccacgctggggacttttctgtccttcgggtaggggaaccaccgccctgcccctccctggcatcccttccctgctgagagttttcctttcgcttaacaaattctactccactcactctccagtgtccccatgcctaattcttcctggtagtgagataagaactcagacctagctgagctaaggagcagaaagaccacaacactatgtggattaaatgaactagaatacatagagtgtttagaaccatacatgtttcataatatatactctattaatgttaactgatgctggttctcagttaactttaatataacttttccatgatattttattctaacttcctggacagcgaattaatggccctcctttttgactgggatttatgtcctcttctttctttaatatacaggtattgacctctggcagtgaggtgactaatttaccagccacctaatgctattcctgccttcatc

SEQ ID NO: 621194 - DNA, 533 bp, Homo sapiens
cttaatataaaaatcgcagggtttctttggcagggagcagagactataagtaagaaaaagctaggagataatgagcagaaaatggaaaattatcaatatctagaagagatcagagagtttgcatccaaaaacaggaatacactgagaaaccccatgtagccaaagaagttagggtaaatgctcctctgagctgcctcattctatccaatgttccaattccagttcagaggttttcctaaaattcttgctaatgttttcttttggtaattttagaagagaactgttttaaacaaagcaaagcgattaactgaaaagttttcaattgcagggcaactgaagtggaggaaagcaagcatkcaagtgcagggcaactgaagtggaggaaagcaagcattcaagtgcatagatgcccttcaatttgcctgtgtccatctatcaaattggataaagaaaccacaatagcatgcatgcttgattagcagtctccaagtaaatattatgcttagatatactctgggctaggcatgccacaa

SEQ ID NO: 621195 - DNA, 534 bp, Homo sapiens
ttgagcataattatgtaactacaacccagatcaaagacataatattactcctcaaaccctctcattgtcctctttcagatacaatttacgctagtctacagttagccactatcttaactaaacaccatagattaattttgtctggtttgttgttatagaartgcagccatatagtatatactgctttgggtctggcttctttccatcaatattatgtttgttagattcatctgtgttcttgcatgtggttgcagtttgctcattttcattatggcatgcttcctcatgttaacatcccccaatttatttattcacctacttatgatgggcacctccttcattcaggttttaaatccataagactgtttaattttttttattattttcacagaagccagaattttatgtttcagctctagctaatacttttcaaaatttctgagtggctaaatgatgggccatcacctcgtagaataccgactaaatttggtagagacagagatatttattgtgcatacttcagggcacctttac

SEQ ID NO: 621196 - DNA, 534 bp, Homo sapiens
ttgagcataattatgtaactacaacccagatcaaagacataatattactcctcaaaccctctcattgtcctctttcagatacaatttacgctagtctacagttagccactatcttaactaaacaccatagattaattttgtctggtttgttgttatagaaatgcagccatatagtatatactgctttgggtctggcttctttccatcaatattatgtttgttagattcatctgtgttcttgcatgtggttgcagtttgctcattttcattatggcatrcttcctcatgttaacatcccccaatttatttattcacctacttatgatgggcacctccttcattcaggttttaaatccataagactgtttaattttttttattattttcacagaagccagaattttatgtttcagctctagctaatacttttcaaaatttctgagtggctaaatgatgggccatcacctcgtagaataccgactaaatttggtagagacagagatatttattgtgcatacttcagggcacctttac

SEQ ID NO: 621197 - DNA, 639 bp, Homo sapiens
gtttcttcagcaactaagtcatctccttattactccctatatttcayatgctgcctttctgctccaaagcacactactggcaactgagtactgggtactttccaagctgttgccacctctgtacttgtgagaagtaactttggttaaggttccttttccctaccacatagttcttcaggcaattctcttcaacaaatgttgaagatctcctcatggccaaaagtagtacaattttaaagagaaattacaatgtataaggaaaatttataatttgaagaggaaagccttggtgttaaaaagattagtgcggtctttagacctgatcttaatcaagctactaggatatgaaaccacattcaatgttaggaaagtaattttacctttctgcgccctagattcattcagacagcaattcctgcttacagaggaaagcaattgaaggttaatccttcatcaagaggtttctcgcaggtgtccctgctcttgatgggacatgccaatcttcatttccctatattctttcttgtgcaaacgtttcttcatcagtccatttccagaatatttacctactctagcctcatagaaaatcagtgtcactgtcaagtaaccccaacctggcccacacagagggccttgctc

SEQ ID NO: 621198 - DNA, 607 bp, Homo sapiens
aggcaattctcttcaacaaatgttgaagatctcctcatggccaaaagtagtacaattttaaagagaaattacaatgtataaggaaaatttataatttgaagaggaaagccttggtgttaaaaagattagtgcggtctttagacctgatcttaatcaagctactaggatatgaaaccacattcaatgttaggaaagtaattttacctttctgcgccctagattcattcagacagcaattcctgcttacagaggaaagcaattgaaggtyaatccttcatcaagaggtttctcgcaggtgtccctgctcttgatgggacatgccaatcttcatttccctatattctttcttgtgcaaacgtttcttcatcagtccatttccagaatatttacctactctagcctcatagaaaatcagtgtcactgtcaagtaaccccaacctggcccacacagagggccttgctcccggggtatattcaagcccctgatatgttgtgcagttgtgatccacttagattttctgaatgcagttacctttctgaaggagttgcctttaaaattacctggaaggccagtgatataccaagagcggaatgtggtatccagatt

SEQ ID NO: 621199 - DNA, 552 bp, Homo sapiens
ttacatacatattttttcttttgttgcctgtgctttagtatcatatttaaaaaatcattaccaacttcattttacaaagattgtcccctgttttcttctaaatgttttactgtgacattggatttaaattgtaggtattactataaatttgtgaataatgtgtatgtgtatatktgtttctgtccactaaaaggatgtaataaaaattacacctcagagcagtatatatacttaataccagaacttagtttccaaataaccttctctacttaaggggttactgacactaggctatatggctagttatagatttgggcaaagaaagtaaaatggtgagcccaggtcatcttgtatcagaaagcaagggtttctgaaagactaatggactcatagaaaaagacaaaaaattctacctaaagaggttgctgctggccaaatttgtgatgtttgagcatctaaaaaacattaatggtaatgcattataaaacagtacattaaaaaaatctatgagtctatataaatggagggaatgcaaacaaaataaaacccaga

SEQ ID NO: 621200 - DNA, 460 bp, Homo sapiens
acaggaagaaataccattcggcccaggaatcccattactcaatataaacccaaaggaatataaattgttctaggctaaagacacatgcatgcatatattcatggcagcactattcacaaaagcaaagacatggaatccacctaaatgctcatcaatgatagactggataaagaaaatgtagctcatatatgccatggactactatgcagccatgaaaaggaacgagatgacgttcttttcagggacatggrtggaactagagaccattgtacttagcaaagtaacacaggaacagaaaaacaaatactgcatgttctcacttataagtgggagctaagtgatgagaacacatggacacacagggggaacaacacacactggggcctgttggaggaggagtgggtgggaggagggagaggttcaggaagaatatatagtggatgctggggcttaatacctg

SEQ ID NO: 621201 - DNA, 563 bp, Homo sapiens
ctcatatatgccatggactactatgcagccatgaaaaggaacgagatgacgttcttttcagggacatgggtggaactagagaccattgtacttagcaaagtaacacaggaacagaaaaacaaatactgcatgttctcacttataagtgggagctaagtgatgagaacacatggacacacagggggaacaacacacactggggcctgttggaggaggagtgggtgggaggagggagaggttcaggaagaatatmtagtggatgctggggcttaatacctgggtgatgagatgatctgtgcagcaaaccacaatggcacacatttacctatgtaacaaacccacaccctggacatgtacccttgaacttaaaataaaaattggaattaaaaaaaagagatgcctgaagtattaccaaatattattgaaggtaataatcaggtagcatgatttagattttgtagtgctttttaaacttcctttcttgttctccttactttgatttttcagatttatttttagctctattataattgatagacagtaaactcaatatcactaaactg

SEQ ID NO: 621202 - DNA, 498 bp, Homo sapiens
ccttccttccttcgttctttccctcccaccctccttccttccttccctttcttctttccctccctccttccttcctttcttccttccgtccatcattatgttcttgtacatacttttaatagcatctttataaatctctctctaataatagaaacatctcatcattcatctacattctttttttcttgattgaattttcatttcctgtttttaaaaaatctgtctaatttattttgcttgtatactagacattgtaaatygtatatgtagtgattctattctgtttctgtaaatattttcatggtttattttatttcatttgattggcagttaatttagttgaactcaaactctaaattatttatctgctttattaggcaccagctgaagcttgttttagctcttttagctttagtgggatgctttgagttcattcaatttatacataattcagtaattttctatttatttgttcagagcatataagcagaatattgg

SEQ ID NO: 621203 - DNA, 563 bp, Homo sapiens
ctcatatatgccatggactactatgcagccatgaaaaggaacgagatgacgttcttttcagggacatgggtggaactagagaccattgtacttagcaaagtaacacaggaacagaaaaacaaatactgcatgttctcacttataagtgggagctaagtgatgagaacacatggacacacagggggaacaacacacactggggcctgttggaggaggagtgggtgggaggagggagaggttcaggaagaatatatagtggatgctggggcttaatacctgggtgatgagatgatctgtgcagcaaaccacaatggcacacatttacctatgtaacaaacccacaccctggacatgtacccttgaacttaaaataaaaattggaattaaaaaaaagagatgcctgaagtattaccaaatattattgaaggtaataatcaggtagcatgatttagattttgtagtgctttttaaacttcctttcttkttctccttactttgatttttcagatttatttttagctctattataattgatagacagtaaactcaatatcactaaactg

SEQ ID NO: 621204 - DNA, 509 bp, Homo sapiens
gtggtgataatgcagtttcatatactctacatctagtttctcctattattgatatcttaatttagtatgatatattattagaaactaataaatattgatacattaatattaamgttatattcagattttctttgtttttacctattttttttgtgtgttccagaatgccatccaggataccaagtgtcatttagatattatttttccttatgctcctctggcctgtgacatattctcagactttccttatttgtgatgacattgagagttttaagaaatattggctgggtgcagtggctcacatctgtaattgcagaaatgggaggccaaggcaggcagattacttgaggccaggaatttgaaaccagcctggcaaacatggcaaaaccccgtctctactaacaaaatacaaaaattagccaggtgtgttggcacatgcctataatgacaataagagctacttgggaggctgaggcatgaggatcccctgagcccaggaggtagaggtt

SEQ ID NO: 621205 - DNA, 509 bp, Homo sapiens
gtggtgataatgcagtttcatatactctacatctagtttctcctattattgatatcttaatttagtatgatatattattagaaactaataaatattgatacattaatattaacgttatattcagattttctttgtttttacctattttttttgtgtgttccagaatgccatccaggataccaagtgtcatttagatattatttttccttatgctcctctggcctgtgacatattctcagactttccttatttgtgatgacattgagagttttaagaaatattggctgggtgcagtggctcacatctgtaattgcagaaatgggaggccaaggcaggcagattacttgaggccaggaatttgaaaccagcctggcaaacatggcaaaaccccgtctctactaacaaaatacaaaaattagccaggtgtgttggcacatgcctataatgacaataasagctacttgggaggctgaggcatgaggatcccctgagcccaggaggtagaggtt

SEQ ID NO: 621206 - DNA, 433 bp, Homo sapiens
atgttttatttcagaattttagcatctcttgccttctttgctgtgactgcagctttttgtagagtgaagctgcaaaatactagggtagagcatcactctgtacttactataagttccagatttccttcttttactctgtacttactataagttccattattttcatgaaaaatactaaacattttccttccctttacattgtaagactcatcaatcccatttccctaacaaagattaaygacaaatatgtagtttttaatttgaaatatccctcatggaagaaattactttgaaatgtttaactaattcagtgtgtaattttcttttccacctcctgttaatgaagtcagtttcaaaatgtttcttaaaagtcacaactcacaacccaaaactaactttcagcttatttatctgttttcccattcttgattta

SEQ ID NO: 621207 - DNA, 591 bp, Homo sapiens
attctacagggtaggcagtattataaatctctttctcaagggagtttaaataacgttctctgttttagagataacattcaaactgttgtctggctccagtgctttttgcttttccactacacctctcaagttcaatttgcaatgcctgcctatgcctttgtaattctgaataaaccattcaggcagcctggcataattttcatctcactggccaactcacaaactctaatttgtcctacaaagctcagcctatgtgtcatgtgctttaattagccttccatgattgcaccaggaaaatttatatacattcttctaagtgtgccctggcaatctgagcttgtacctagaaragaagatatcacactatattccaattttgttcttgtttgtctcactcttaatactgtgaactctaggaaggcagaggcatttgcacacttaatcctatattcctctcagtgagtatggagtagatctttaatgaattattccagcagagttggagtcaagtgaagctgttctgaaattccattaatctgatttttgcccactctattgtttctttctgatctcatctcctgcccccttttt

SEQ ID NO: 621208 - DNA, 632 bp, Homo sapiens
aaatgtcagtaaaggccactgaggaaacagctgaaggcaaagtcacaaatgtctctcacattagccagatatcataacagaagtagcatttccttaagagaagggaaacatggaaggaagacctttaagccttatgctactttctgtttttgcttatcttcctacaaatattggtctcagactgtaggtctaaagtcctttaagtgcaaactttctgtcattccaaggatatctgcatgttttcctctacgtgtatgactgaagctttcatatcttctttaatgaaataactaactttgtaattctaaatactatagcatttattatctgcaatcagaccaatgcaatcataaacagccattgtgctttttgttacattttagcatgtgtcttatttacttcactagattgtgaactccaggggccaaaaaaaagaaaaaaaaaaaaaatrtatatatatatactgactgtctaacaaacacagggatcctgctgtgccccatgtgcctcatgtgtttttacttggttcctaattctacatgtggcatagaagagtgggcagaagagtttatgatataagcttgggtttacaatatattgttcagggaaaacccacatattactgtttttag

SEQ ID NO: 621209 - DNA, 632 bp, Homo sapiens
aaatgtcagtaaaggccactgaggaaacagctgaaggcaaagtcacaaatgtctctcacattagccagatatcataacagaagtagcatttccttaagagaagggaaacatggaaggaagacctttaagccttatgctactttctgtttttgcttatcttcctacaaatattggtctcagactgtaggtctaaagtcctttaagtgcaaactttctgtcattccaaggatatctgcatgttttcctctacgtgtatgactgaagctttcatatcttctttaatgaaataactaactttgtaattctaaatactatagcatttattatctgcaatcagaccaatgcaatcataaacagccattgtgctttttgttacattttagcatgtgtcttatttacttcactagattgtgaactccaggggccaaaaaaaagaaaaaaaaaaaaaatgtatatatatatactgactgtctaacaaacacrgggatcctgctgtgccccatgtgcctcatgtgtttttacttggttcctaattctacatgtggcatagaagagtgggcagaagagtttatgatataagcttgggtttacaatatattgttcagggaaaacccacatattactgtttttag

SEQ ID NO: 621210 - DNA, 510 bp, Homo sapiens
aatatttataataaaacatttattagttaattcacccatcacacttaacaagtacataaaattctcagattacatccttcaatattttcttgattgtaaacaagatttcatgatccatcatttgtttaaaattatttttcaagtcataaaattattcagagttgccataactggaagtcatctgttcagtttcacaaaacagcttttccactaacctttccgggaaaaccaaccctaacctggactagccctaaacaagggtcctctggcacaaaatcacctactatttgaaaagtgtctcacccctaattcttctgcaagtgcaggcctctaataatyatatggataatcatcaacaaaattcttcacattttaggcactattatccatggattactgaaacgtaaattggaaattaattatagattctcatgtttcttttgttggctttgttagatcaactaaagagatgggttactacttggcaatgccattttattcaccccacta

SEQ ID NO: 621211 - DNA, 534 bp, Homo sapiens
tgaaaagtgtctcacccctaattcttctgcaagtgcaggcctctaataatcatatggataatcatcaacaaaattcttcacattttaggcactattatccatggattactgaaacgtaaattggaaattaattatagattctcatgtttcttttgttggctttgttagatcaactaaagagatgggttactacttggcaatgccattttattcaccccactactgttagcagcatgttgatgaggctctttttttcaattataaaatgcagggtgagataagagaaggctgaagaagcctccttgcaataaaacaaatgcaacacataaattctttgtgatggatatggtgctaaaagcacagatgastagcccacatctataattctatctcaaatgtatctcatggtacaatgtaatgctatgatggagagacttgaggagagataaatgacagagatggaggagacagaactggccttttgtctatgacaacttctcctggagtagggttcatttgaggaggctttcctct

SEQ ID NO: 621212 - DNA, 692 bp, Homo sapiens
atatctggtatattccaaaacacgaagagccctgttcctagagcagaatgaaaaattgggaaagaaaccggatgagataagagcaataatgtgaggccaggtcttttatggccatttaagactttgtaagaattctgacatttactctgagaaaaatggagaataattggaaagactttagctaaatagtgacatgatcaaatacacatttgaacaggatcattctggctgctcttcaggatggactacggtgaacaggtttgtgcaggagattattacaatgatccaggcaaaaagtgactgcttaagaggattctaattttgtttgtgtatttaagaatgttttcttttagcattaatttttgtaacagcaaagataatattaaggagacatactttttgccatctgaagtaggagatgtaattgaatgacaagtctttggagatctcattgccagtgttgagaataagaaaatcaaaatcaaaataaggtggtttttaaaataaagagaactatatacyagtgctattaaagagtagcactttattatagatgcaatttttaaccagtaacatttgcaacaaaaatgtttttatgacattacataaaacattttgagtgttcttgtgtaggatctagaaagctatttgtataacagtgaaaatatgctaaagtaaaatttaaatcctca

SEQ ID NO: 621213 - DNA, 622 bp, Homo sapiens
caacatattccaactagattaatataaaaccaataaatatatgaactgcataaataattaagcacacaawtcgttgagtagggatagtgagcagattttctcccaaggaaaagatggataagaatttttcagtgtccagtaatctattgccaaagtttaataaaaatgtccctctcctacacctgaataaatgcataaattaaaggtataaatttgatatgtcagaagaaaaaaacaaattatttatcttctatttgaaatcgggcaaagtaagcagttgagagttctttgaatacagagattatgcaaatataatcattttggattacccttttaaaatattggctttggatcttttatttctttttttcttccattttttattttctttttttttttgaacatctcagaagttttgtttacacccttggacaatgtaatgcaataccattcagatgagttaaaagtttttgatgttctttattctttgtttgaaagtgagagaactgtattgggaaaagacgcgatgtattgaacttcagaaaaatgtaattttcacaaagcaggaaatatggaggcagatatttgattcaataaatctgagaaaattacatggatttga

SEQ ID NO: 621214 - DNA, 622 bp, Homo sapiens
caacatattccaactagattaatataaaaccaataaatatatgaactgcataaataattaagcacacaaatcgttgagtagggatagtgagcagattttctcccaaggaaaagatggataagaatttttcagtgtccagtaatctattgccaaagtttaataaaaatgtccctctcctacacctgaataaatgcataaattaaaggtataaatttgatatgtcagaagaaaaaaacaaattatttatcttctatttgaaatcgggcaaagtaagcagttgagagttctttgaatacagagattatgcaaatataatcattttggattacccttttaaaatattggctttggatcttttatttctttttttcttccattttttattttctttttttttttgaacatctcagaagttttgtttacacccttggacaatgtaatgcaataccattcagatgagttaaaagtttttgatgttctttattctttgtttgaaagtgagagaactgtattgggaaaagacrcgatgtattgaacttcagaaaaatgtaattttcacaaagcaggaaatatggaggcagatatttgattcaataaatctgagaaaattacatggatttga

SEQ ID NO: 621215 - DNA, 589 bp, Homo sapiens
tggaaaaattaaggctacataaatggagtagagaaaatgcttccttaacagaataagcgttcttcctcatgagaagaaaacaatgtacatttttcttttcctcacatactattgtctccatatgaattaacacaaaataataaccaaaatgttatttgtataaatgtcataatgcagtattgatgcatttaattawttgtagtttgtattccaaggcaggtagtttcttgacatacatattgtacatctagtaccttcatcactatatatacatttcatctatctcaaacatgtattcaaatgctatatttatttttgttttcttcatatatatttgtaagggatatttattttatcagctttaaagcaacattttacaaaaattttaaagtataaattgtatacattcagttcataggtcaaaaaacctgcaaaattggtatgaaagaaataataatgtgtatatcaatgctataaaatgctctgtacattataagttttctcatagtgataatttatcatccattcttctgataccaatatagaaatcacaggaaaatatgatactggaaaaagacaaagaaagcca

SEQ ID NO: 621216 - DNA, 610 bp, Homo sapiens
ctatatttatttttgttttcttcatatatatttgtaagggatatttattttatcagctttaaagcaacattttacaaaaattttaaagtataaattgtatacattcagttcataggtcaaaaaacctgcaaaattggtatgaaagaaatawtaatgtgtatatcaatgctataaaatgctctgtacattataagttttctcatagtgataatttatcatccattcttctgataccaatatagaaatcacaggaaaatatgatactggaaaaagacaaagaaagccaactttaatttattctttcatttttcaaatatgatgaacaacttatagtgtgtaagaaactatcctaaactatgatttgattgttctggatggggcctctgcatcatttttttttccaaagctgcaggtaattcttatggcagccggtatatactaaagacagatattacacagatagaatgctccaaagattttggagcacagtagggaaataatcatgcaaataaataattgtgtttcaaagtgaaatagagaagggttaggaggaaatgagaagttcctcaaaggatagaagtttcagttatgcaaggtgaataagtactgg

SEQ ID NO: 621217 - DNA, 610 bp, Homo sapiens
ctatatttatttttgttttcttcatatatatttgtaagggatatttattttatcagctttaaagcaacattttacaaaaattttaaagtataaattgtatacattcagttcataggtcaaaaaacctgcaaaattggtatgaaagaaataataatgtgtatatcaatgctataaaatgctctgtacattataagttttctcatagtgataatttatcatccattcttctgataccaatatagaaatcacaggaaaataygatactggaaaaagacaaagaaagccaactttaatttattctttcatttttcaaatatgatgaacaacttatagtgtgtaagaaactatcctaaactatgatttgattgttctggatggggcctctgcatcatttttttttccaaagctgcaggtaattcttatggcagccggtatatactaaagacagatattacacagatagaatgctccaaagattttggagcacagtagggaaataatcatgcaaataaataattgtgtttcaaagtgaaatagagaagggttaggaggaaatgagaagttcctcaaaggatagaagtttcagttatgcaaggtgaataagtactgg

SEQ ID NO: 621218 - DNA, 635 bp, Homo sapiens
cagctaagagttcagggactacaccaaagaaatatatagtttaataaagggatgaaccaattatgcaaataattaacagttctaagtggtatatgaaacatgtataaaagtgttattgcaaattaaaagagggagagatcacttggtgatcaaggatcctattgaccatatggtaatactaaacaagctgcaagttgttttgtrtttagaccaatgtactccaacatgtgtgcatatacccaagggagccatgtagataatattgacttatatttgcatttatttttatttactgtatatttagaatgcatgtgtggtttaaaaaaaatttagatatgcacaaactttgagtaaaactcatctaaacacactactttatttaaggttatgcctatttcaggctaaggtcatgtaatcctttttaaaatatgttctttaacatgcttccctgcattgagcattgtcctaagtctcaaactgaattatctacttgaacttttgataactttgttgatgtacttcaatgagatatttttatgagaatggattggtctctgcacaaagtcttatattccagtatcatttagtgtcataaggttaaaaaaaaaatgtgtcctatgagcattaaatagatg

SEQ ID NO: 621219 - DNA, 635 bp, Homo sapiens
cagctaagagttcagggactacaccaaagaaatatatagtttaataaagggatgaaccaattatgcaaataattaacagttctaagtggtatatgaaacatgtataaaagtgttattgcaaattaaaagagggagagatcacttggtgatcaaggatcctattgaccatatggtaatactaaacaagctgcaagttgttttgtgtttagaccaatgtactccaacatgtgtgcatatacccaagggagccatgtagataatattgacttatatttgcatttatttttatttactgtatatttagaatgcawgtgtggtttaaaaaaaatttagatatgcacaaactttgagtaaaactcatctaaacacactactttatttaaggttatgcctatttcaggctaaggtcatgtaatcctttttaaaatatgttctttaacatgcttccctgcattgagcattgtcctaagtctcaaactgaattatctacttgaacttttgataactttgttgatgtacttcaatgagatatttttatgagaatggattggtctctgcacaaagtcttatattccagtatcatttagtgtcataaggttaaaaaaaaaatgtgtcctatgagcattaaatagatg

SEQ ID NO: 621220 - DNA, 635 bp, Homo sapiens
cagctaagagttcagggactacaccaaagaaatatatagtttaataaagggatgaaccaattatgcaaataattaacagttctaagtggtatatgaaacatgtataaaagtgttattgcaaattaaaagagggagagatcacttggtgatcaaggatcctattgaccatatggtaatactaaacaagctgcaagttgttttgtgtttagaccaatgtactccaacatgtgtgcatatacccaagggagccatgtagataatattgacttatatttgcatttatttttatttactgtatatttagaatgcatgtgtggtttaaaaaaaatttagatatgcacaaactttgagtaaaactcatctaaacacactactttatttaaggttatgcctatttcaggctaaggtcatgtaatcctttttaaaatatgttctttaacatgcttccctgcattgagcattgtcctaagtctcaaactgaattmtctacttgaacttttgataactttgttgatgtacttcaatgagatatttttatgagaatggattggtctctgcacaaagtcttatattccagtatcatttagtgtcataaggttaaaaaaaaaatgtgtcctatgagcattaaatagatg

SEQ ID NO: 621221 - DNA, 634 bp, Homo sapiens
cttactcatgcattttcttccaagaagagaattgatacatatttgttgttttccacactatgacactcacatgttagtaatattattacaaatttatatttttgagtaataactagctataaagaggaagaagttaaaagagcaaaaataaattagtttcttcttttccaattttagcagctaccttttcttttcctctccctgcgtctctgccaaaatgttgataattaactgagtgcagctgagctcacaagagatttaatgttattgccacttctcacatctcttttaggagccagttctaatataagaaacactaggagttcctgatagaagtgttatcaatctccaaggcatgggtggctggggcttttgattatactatactttcacctaaaatactcaccattttatcattcatttaacaaatttccaagttcagaattccctttagcattctgaggcaaataccattcccaaaggctaccttttcctcsctactaagagactcctcattttatgtttaggtaaccttgcaggcattccccaatctctaagaaagcaagaccctcctacagcctcagtgggtggttatgatttgtgaaagccaaacatggcatcccctttgccagat

SEQ ID NO: 621222 - DNA, 368 bp, Homo sapiens
tcgttaacctttaattactctctacctatatatgtctcatatataatatgaaatcaataaatgtttgaatgaatatttrctttctgtattttaacatagaagtatatcctgttaagataattattttttctctttatatatttcagtatatttgaggtatcatcttttttacaaatagctagggaagatgtattttcattgatctgctcagtatgcagaaatctttggactatgttcaaaatcccatgctagtacagtttaattaagatcaactttaattttcagcatctttttaatagaaagaattatatgttgttaagtttatatattttcataaacttgtatcaaaaaataccaaatatcattta

SEQ ID NO: 621223 - DNA, 368 bp, Homo sapiens
tcgttaacctttaattactctctacctatatatgtctcatatataatatgaaatcaataaatgtttgaatgaatatttactttctktattttaacatagaagtatatcctgttaagataattattttttctctttatatatttcagtatatttgaggtatcatcttttttacaaatagctagggaagatgtattttcattgatctgctcagtatgcagaaatctttggactatgttcaaaatcccatgctagtacagtttaattaagatcaactttaattttcagcatctttttaatagaaagaattatatgttgttaagtttatatattttcataaacttgtatcaaaaaataccaaatatcattta

SEQ ID NO: 621224 - DNA, 491 bp, Homo sapiens
ctatctcgttaacctttaattactctctacctatatatgtctcatatataatatgaaatcaataaatgtttgaatgaatatttactttctgtattttaacatagaagtatatcctgttaagakaattattttttctctttatatatttcagtatatttgaggtatcatcttttttacaaatagctagggaagatgtattttcattgatctgctcagtatgcagaaatctttggactatgttcaaaatcccatgctagtacagtttaattaagatcaactttaattttcagcatctttttaatagaaagaattatatgttgttaagtttatatattttcataaacttgtatcaaaaaataccaaatatcatttaatccctgtttattctgagagtaaacatttcatgaaatccactccaaggattgaaaacatacatccacacaaaaacttgtacgtggatgttcactgcagtattagtcataatggccaaa

SEQ ID NO: 621225 - DNA, 491 bp, Homo sapiens
ctatctcgttaacctttaattactctctacctatatatgtctcatatataatatgaaatcaataaatgtttgaatgaatatttactttctgtattttaacatagaagtatatcctgttaagataattattttttctctttatatatttcagtatatttgaggtatcatcttttttacaaatagctagggaagatgtattttcattgatctgctcagtatgcagaaatctttggactatgttcaaaatcccatgctagtacagtttaattaagatcaactttaattttcagcatctttttaatagaaagaattatatgttgttaagtttatatattttcataaacttgtatcaaaaaataccaaatatcatttaatccctgtttattctgagagtaaacatttcatgaaatccactccaaggaytgaaaacatacatccacacaaaaacttgtacgtggatgttcactgcagtattagtcataatggccaaa

SEQ ID NO: 621226 - DNA, 532 bp, Homo sapiens
ctgcagaactatgagtctattaaaaatcttttcttcataaattacccattcttaggtagttataatagcagtgtgagaatggactaatacactgtcattcacagcaaaaagattattcacaaattaatagtcattaatggtaaattctgattcaaacatttgattatacgattatgttattccatactattgctaaatattttcaaagatgtcatttttacaaccaactgaaaaaattggggctactagaaaatctcataaaaattcttaaagagaatttaaatataattatatattatttctgataacagaaagaattgtacactgtagagatcacacaaatctgtgatgattatattattaactataaatgctgccaaacaataaaataattgcttgaaaatacattaacctctcygccaaagccagatctccttgagattgctcctctttgagattgctcctctttgaggttatgtgggataaacaggtttattctatatacaatatttataagtaggagcatttggtt

SEQ ID NO: 621227 - DNA, 543 bp, Homo sapiens
gattatgttattccatactattgctaaatattttcaaagatgtcatttttacaaccaactgaaaaaattggggctactagaaaatctcataaaaattcttaaagagaatttaaatataattatatattatttctgataacagaaagaattgtacactgtagagatcacacaaatctgtgatgattatattattaactataaatgctgccaaacaataaaataattgcttgaaaatacattaacctctccgccaaagccagatctccttgagattgctcctctttgagattgctcctctttgaggttatgtgggataaacaggtttattctatatacaatatttataagtaggagcatttggtttcaagtaaaaacaagagagatgtgtctcttgaaatggcttagatggagaagaaattkggtactgagaatataaaaaggaaatatcatgagtcttgagtaataatttttttaatagagctttgaggaaaagctgatgagaaatatggatgtacagaagaatgactcacagcaggagtcctg

SEQ ID NO: 621228 - DNA, 491 bp, Homo sapiens
aatttttttaatagagctttgaggaaaagctgatgagaaatatggatgtacagaagaatgactcacagcaggagtcctgggataaagttacttaccagcaaccatctgaacactggggaagaagaaagacaaatactacgtgaaactccctgctcctaatagctaagtgctttgacatctgaagacatggtagaatctgcagtggagagttttacctttcagarggtactaggatataatatataagagaggcaagagtcaataatttaagcaaaatatgactgttgttaacttagttcactatttttcttcatgattttagtggatataaaaatttataaaaagtggatatagaaattttactttattgcccattcctattttccccagaatgccttatattatttaaatcttagcaggtttatttaagaaaaacaactcagtgtggcttgagaggacaacaggtgagggatattatgataatgctacaa

SEQ ID NO: 621229 - DNA, 499 bp, Homo sapiens
gtaggagcatttggtttcaagtaaaaacaagagagatgtgtctcttgaaatggcttagatggagaagaaatttggtactgagaatataaaaaggaaatatcatgagtcttgagtaataatttttttaatagagctttgaggaaaagctgatgagaaatatggatgtacagaagaatgactcacagcaggagtcctgggataaagttacttaccagcaaccatctgaacactggggaagaagaaagacaaatactacgtgaaactccctgctcctaatagctaagtgctttgacatctgaagacatggtagaatctgcagtggagagttttacctttcagaaggtactaggatatartatataagagaggcaagagtcaataatttaagcaaaatatgactgttgttaacttagttcactatttttcttcatgattttagtggatataaaaatttataaaaagtggatatagaaattttactttattgcccattcctatt

SEQ ID NO: 621230 - DNA, 542 bp, Homo sapiens
agcctactatagcagcctctctttacttccatattcatatactttaaaatttaactatgaatttatttagaaaactagttttggagaagaaaattattagtaggatgtgcttcacctgaagcaacaaaaagtttcaaatcattgagttcaggaaaaaaatgatcaaaactgaagatttgtttaagtaatttatcttgaaagacaaagactataacaatgacacattattaaatatgtatgttacgttcacttgaygccatgatattttttatgtggcacataaaaaattgcatactaggcaatcaattaaggtttattaaaatgaataaattatgaattgtgttttaatttaacaggtatttttaagtatttgttattaaaattagctatttataattagtttctacaacataaaataaattttgaaaactatttgtagttacaggagaaaagagttaccagaatctaagggtcttttcaacattgcaccaatgtaaattactcatgtgcgtcatctatcaagacacaatttccatactcaa

SEQ ID NO: 621231 - DNA, 558 bp, Homo sapiens
tgttttgttaagataaaccttaactttagagctactacataattgacgataatatacattatacctgagaggctccctgttttctaaaggaaaattatgattcaattaaatattgcatatgcttcattagatcttaaaatgatcttatttaaatattgaacatcttttaagaatattgagatggcaatttcgccacgattaaaaatgctatctccattcttaaaactttaatttcaatcattatcctgtggttgtctcttctckcttcagggagcagctcaaagtttatgaacaacttctcagataaatctgtgtatctgtcaggtcattgtgtggaacagtcctgctttagtgagtgttcctaattgtcagtgttttcacttaagtgaaaatattctatgggcaacggcatgaatacaccattcattctatcattggcaatgtatataaagaaataacccatcataaatatatgactttatatctaaattaaatgaataattttattctgattccaggacaatattacttgataatgctgataatgaccagtgtatc

SEQ ID NO: 621232 - DNA, 586 bp, Homo sapiens
gagaatctaaagacagcactgttggttctggaaatttgatatgccggactccaatctctttgaactttgatttttttaattttaatgcagagataataatattcactctcctaccctgtagatctgtgatcattccataacaatatgcttataagacaatctgaaatattaaaagtgattaaaggaaakaaatagttaaagcagccagacagaaataaatccactggctttattgtagggaagtgccaggagaaaataaaataaggaaggtaaactggactaattttcttgtccgtaggacctctgggtaaatagactaatgatatttgctagaaggaagagaacttgttcctgaaatgcccatggcagaagttcccggataaggattacctctagtaaacagaacacaaagcctgcgaggaatggctccctggagaatgccacatagcctacacaattctggggaaataaaatggagatgttacataaattaaatgctctctactgtgtaaggatccctgcaaagctcacttagagactttacctattttgggccaaaggtgcagtcccatacagaagggaaatg

SEQ ID NO: 621233 - DNA, 586 bp, Homo sapiens
gagaatctaaagacagcactgttggttctggaaatttgatatgccggactccaatctctttgaactttgatttttttaattttaatgcagagataataatattcactctcctaccctgtagatctgtgatcattccataacaatatgcttataagacaatctgaaatattaaaagtgattaaaggaaagaaatagttaaagcagccagacagaaataaatccactggctttattgtagggaartgccaggagaaaataaaataaggaaggtaaactggactaattttcttgtccgtaggacctctgggtaaatagactaatgatatttgctagaaggaagagaacttgttcctgaaatgcccatggcagaagttcccggataaggattacctctagtaaacagaacacaaagcctgcgaggaatggctccctggagaatgccacatagcctacacaattctggggaaataaaatggagatgttacataaattaaatgctctctactgtgtaaggatccctgcaaagctcacttagagactttacctattttgggccaaaggtgcagtcccatacagaagggaaatg

SEQ ID NO: 621234 - DNA, 609 bp, Homo sapiens
agaagaaatgtagcagaatgctcaaacttagtcattagaatttggagcaatatgtgtctggatgctatccttaggcaagcaccaattactctggctctatcctggatgacccgaggggcctgtagcctcctcactttgtatgttccaagctgaattcctaggagaacacaatgtaactgagtattttagagcttgttgtctgattaaggacagtagctggaaagttctatatagaacatctgccccatttattccttttcccctcctctttctccttttcttcatccttctttttctttatcctccttctctcatggatccttctatataaatctgactatttgttaactagatgcagaagacacctccccaaaagttatttcctttcggtgtgttcaggtatttacataaatgacttatattcaaagactgaactctctrtaccctgtaaatcagactgttcccttccaatttttagaacaactatttacacgtaaaaaagtacaaaataattttcatatatatttttggttgactctattaggatttttatagtttaatcctttttaaattttttttaattttgtcagtatacatattttattgtaa

SEQ ID NO: 621235 - DNA, 602 bp, Homo sapiens
tgttgcaaataaaaagacatccttctacttaaaagatggacagtaatctattgtagtgtgtgtattgcactttgtatccattcatccaaaggtggacacttaggttgattccaaatcttgtctattgtgactaatgctgcaatcaacatggaggtgtaggtgcctctttgagatactgattttatttcatttggttatatacccagaaacaggtttgctggatcatatgctagttctattttgaactctttgaggaacctacgtgctttttttttttttacttttattttaagttcaggggtacaggtgcaggatgtgcaggtttgccacataggtaaatgtgtcatggggrgttgttgtacagattatttcatcacccacgtattaaggctagtattcattttttctgatcctctccctcctcccatcgtccactctccaatgggccccagtgtgtgttgttccccactaagtgtccatgtgttctcatgatttagctcccacctataagtgaaaactcatgctgtatttggtttctgttcctgagctagtttgctaaggataatggtctccatctccatccatgccctgcaaaggacatg

SEQ ID NO: 621236 - DNA, 531 bp, Homo sapiens
aaatatacatgtgcacatgtatttataatagaatgattaatattccttggggtatatacccagtaatgggattgcttcattcaatggtatttctgtgttaaggtctttgaggaatcgccacagtgtcttccacaatggttgaactaatttacactcacaccaacagtgtataggtcttcctttttctccacaacttcgccagcgtctgttattttatgacttttttttttttttttttatgagatgggatctctctctgtcaaccaagctgtagtgttgtgcctcaatcttggttcactgcaacgtccacttcctaggctcaagctatcctcacagttcagcttcctgagtagctgagaacacaagaacacaccaccacgctcagctaattttttgtatttttggtaraaatgggcttttgccatgttgcccaggctggtctccagttcctgagctcaagggatccacctgtctcagcctcccaaagtattgggattacagacatgagccaccatgcccgacctatttttt

SEQ ID NO: 621237 - DNA, 545 bp, Homo sapiens
gtcttttgcccatatttaattggattatttgtttacttgctgtcaagttagcttaagttcattatgtattttggatattaacttttattggatgaatggcttacaaacattttctcccaatctgtggattgtcttttcactctgttaatggttcctttgttttgcagacacttgttagtttgatgcagtcccatttgtctacttttcttttgttgcctgtgtttttagggtcttatccaaaaaaatctttgttgaaaccaacatgaacatgcttactccctgtgacttattctaatagttttacggaytcagaacttatatttaaatatttaatgttatcagtttatcttggtatgttatatgaaataaaggtccaattttattctgtgtgtggatatacagctttcccaacactattattctagctgggttttaagacatttttctccttatcagtagagtatgaaataacattgtaaacatttaaaagaaggaatggagtcattgtcaaaaaataaaattatagggtagcattgtaacagaaa

SEQ ID NO: 621238 - DNA, 566 bp, Homo sapiens
agctgggttttaagacatttttctccttatcagtagagtatgaaataacattgtaaacatttaaaagaaggaatggagtcattgtcaaaaaataaaattatagggtagcattgtaacagaaaactaatgattgatagttttatgtccttagttataaaaaataacatggatataatctgagtttgaaaaataaaaagtagtggggtatttcctcaaaggatggaaggtaatcaacatagacaaatattttggggttgaggaaagtatctcttagatatggtgcgtatttagagaaacacattgccatttctagaatttacatgtayacttaggatcactcaaactatcgactttttaaaaaactaatgctaaagttctaatattcatttagcatacagaaggaatttattaattttggtaaggtagatgcaacttttataaaatcgaatagaaaaaatgagaaaaaaatatgacatgtttaatttgtagcaagattgacttaaatactaactaaactcatttttactttacatgttgttgtcatgatttcaggtaagtttataagc

SEQ ID NO: 621239 - DNA, 607 bp, Homo sapiens
atgtaacattgaatacttgaatacagaggtagaaaataggggagaaaatcacagtgtctgtgttgraaaactgaagaatttaaataaagatatagttttcaaaatcatccaattatgtgtgtcttagtagagtgggttctgccaacaaccagacaactgtggtcctcctctatgcagctttagtcatctagtttggagaggcacctagatgcctagaaaccccgagctggaaaagagaagtgaatggatggtaaactgaccatggttccttgggaagtgtgtctaccctgtcttaatcccaattcgggtggttttggtcaccgcccaggagatcttggtctgagcccaggtttgccaagtcctgtcctagcatatccaattcactcaaactcacagtcagcagaaaagagctaattttgcctcctgggtgtaagggccatcaccagggagtaagctgggggtcctgtgtgggaatatgaacagggagatggatatgagttgatttataagttttaaatatttaagaaatccaatacagtagtcttatctgtacttttgccctacacagggatgagaacgttctgcattttgctggcatattcaggca

SEQ ID NO: 621240 - DNA, 607 bp, Homo sapiens
atgtaacattgaatacttgaatacagaggtagaaaataggggagaaaatcacagtgtctgtgttggaaaactgaagaatttaaataaagatatagttttcaaaatcatccaattatgtgtgtcttagtagagtgggttctgccaacaaccagacaactgtggtcctcctctatgcagctttagtcatctagtttggagaggcacctagatgcctagaaaccccgagctggaaaagagaagtgaatggatggtaaactgaccatggttccttgggaagtgtgtctaccctgtcttaatcccaattcgggtggttttggtcacygcccaggagatcttggtctgagcccaggtttgccaagtcctgtcctagcatatccaattcactcaaactcacagtcagcagaaaagagctaattttgcctcctgggtgtaagggccatcaccagggagtaagctgggggtcctgtgtgggaatatgaacagggagatggatatgagttgatttataagttttaaatatttaagaaatccaatacagtagtcttatctgtacttttgccctacacagggatgagaacgttctgcattttgctggcatattcaggca

SEQ ID NO: 621241 - DNA, 607 bp, Homo sapiens
atgtaacattgaatacttgaatacagaggtagaaaataggggagaaaatcacagtgtctgtgttggaaaactgaagaatttaaataaagatatagttttcaaaatcatccaattatgtgtgtcttagtagagtgggttctgccaacaaccagacaactgtggtcctcctctatgcagctttagtcatctagtttggagaggcacctagatgcctagaaaccccgagctggaaaagagaagtgaatggatggtaaactgaccatggttccttgggaagtgtgtctaccctgtcttaatcccaattcgggtggttttggtcaccgcccaggagatcttggtctgagcccaggtttkccaagtcctgtcctagcatatccaattcactcaaactcacagtcagcagaaaagagctaattttgcctcctgggtgtaagggccatcaccagggagtaagctgggggtcctgtgtgggaatatgaacagggagatggatatgagttgatttataagttttaaatatttaagaaatccaatacagtagtcttatctgtacttttgccctacacagggatgagaacgttctgcattttgctggcatattcaggca

SEQ ID NO: 621242 - DNA, 589 bp, Homo sapiens
cctggcagaaagatgttccctcctctgagttcacaaagtgctttgtacataatcttacagccaaagagaccatcttttccaagtcagaagttggtgcatatattttggaaagtatgagggacagtattttaaatggatactgtttaggaaaatcaggttcatgagcttaccatatttattgcattctatcatagcctatagtgtcttagyttcatgtgtttctgcctgacttagtttcatgtttctgaagaaaaggaattatattcatttacctttgtagctgttctcacattagcaacatgcttgacaggtgatagcttcttggcttgtcggtcaataaatatttatggaacaaataatctgtttttaaaatatatacaataatattacagtattccatgtcttagtttgtgtttaatactatgtctagtctataaaacttctttttaactaaaaataataacttttaaaatctattttatcacacaggtgttttaagccattttgttttcaaactccaatcatgaagcatgaattattttattttttccttaataagaatcaaagcatgcaaacaatcacacccttg

SEQ ID NO: 621243 - DNA, 589 bp, Homo sapiens
cctggcagaaagatgttccctcctctgagttcacaaagtgctttgtacataatcttacagccaaagagaccatcttttccaagtcagaagttggtgcatatattttggaaagtatgagggacagtattttaaatggatactgtttaggaaaatcaggttcatgagcttaccatatttattgcattctatcatagcctatagtgtcttagcttcatgtgtttctgcctgacttagtttcatgtttctgaagaaaaggaattatattcatttacctttgtagctgttctcacattagcaacatgcttgacaggtgatagcttcttggcttgtcggtcaataaatatttatggaacaaataatctgtttttaaaatatatacaataatattacagtattccatgtcttagtttgtgtttaatactatrtctagtctataaaacttctttttaactaaaaataataacttttaaaatctattttatcacacaggtgttttaagccattttgttttcaaactccaatcatgaagcatgaattattttattttttccttaataagaatcaaagcatgcaaacaatcacacccttg

SEQ ID NO: 621244 - DNA, 464 bp, Homo sapiens
tggtcagtggctactggccctctctctcaggccactgctcctgttcacttttgcccaccctccttaaggtagaactcagaaatacagatgtgggcttctaatgcaaaaatatatatacawttttaaaatatatttatatatatatactttatctatatgtattttatatataaagtatatatttatataaatatataaagtatatttatatataaaatatatatatacacacatacacacatacatattaggccacttctgcacctgaaaaagtgagcaagcaattggagtaggaggggagctgccaaacttcgtgttttgagaaaacaaaacaattgtttgattaattgaagttcccactgtttctgttaccgcagcatcaaatcaataaacagtcatcatttattgaaacataataggatttgaaaggaataaaaaattataaaataaggtctctagaattc

SEQ ID NO: 621245 - DNA, 312 bp, Homo sapiens
ctccttggaattcttaaaatttcctggaccaagaattttttttatgcccttgtgtgaatttggtcagtggctactggccctctctctcaggccactgctcctgttcacttttgcccaccctccttaaggtagaactcagaaatacagatgtgggcttctaatgcaaaaatatatatacaatttwaaaatatatttatatatatatactttatctatatgtattttatatataaagtatatatttatataaatatataaagtatatttatatataaaatatatatatacacacatacacacatacatattagg

SEQ ID NO: 621246 - DNA, 610 bp, Homo sapiens
gctttcctaaaacaggaatataatgccatgaaaagaaacagtcagaacactatcaaaggttcttttaaagtaaattgtgagcctaatttttctgaaacacaatagaagggttgtatgttacaaatcaaataagttttccataaagtagatcagaaaagagaaaaacttaaaaacagtagaaaaaagaaacctaacaccataagtcagagggagagaaaagagaaaaatggaagaaaggaaattatctaagaaatagctcaagaaaaatttccccaaacaagccctagcaaatgcccatcaaaatgaaagaaaaaaaaaaaagagacctacaaagacacattatcacaaaatttcccaccactaggttaaaatcttccaaaaaagtttaatagataggtcacttctaaattagcaggaatcggaatgacagcaagtytcacaatggcaacactggtagttaaaaggcagtagagtatatatgataaatgttttctctttattttgagatgggctccctatgtgttacccaagctggccttgaactcctgggctcatgtgatcctcctgccccagcctcctgtgtagctgggattataggcatgtgccacca

SEQ ID NO: 621247 - DNA, 610 bp, Homo sapiens
gctttcctaaaacaggaatataatgccatgaaaagaaacagtcagaacactatcaaaggttcttttaaagtaaattgtgagcctaatttttctgaaacacaatagaagggttgtatgttacaaatcaaataagttttccataaagtagatcagaaaagagaaaaacttaaaaacagtagaaaaaagaaacctaacaccataagtcagagggagagaaaagagaaaaatggaagaaaggaaattatctaagaaatagctcaagaaaaatttccccaaacaagccctagcaaatgcccatcaaaatgaaagaaaaaaaaaaaagagacctacaaagacacattatcacaaaatttcccaccactaggttaaaatcttccaaaaaagtttaatagataggtcacttctaaattagcaggaatcggaatgacagcaagtttcacaatggcaacactggtagttaaaaggcagtagagtatatatgataaatgttttctctttattttgagatgggctccctatgtgttacccaagctggccttgaactcctgggctcatgtgatcctcctgccycagcctcctgtgtagctgggattataggcatgtgccacca

SEQ ID NO: 621248 - DNA, 584 bp, Homo sapiens
gatggctgcttggaagcatttttggaggcagctaatgtcatttggtggcagagaccaccaaaacaaaggctaggaaggaggacaaatgcacttctagagttcccaactctcttgggctcccctgtctctggaccagggattggggcatggaggacctggcattccatgggaaatctcaggaatctcccctacttagcctaggagtggtgtgcaactgtggagttgtttggacaagcctagactatttagctttctttaccagaagactatgcccattcccagtgattaagtaactactcagatcatttccggacttgagatgaagacacaaagctgagaagatgctctggatgctcaaagataagacgacatttctaaattgctagcaytaaccatgctctggtcttgcatacccctctatgcatagtcaatgaactatgagatcagtattaagaacattttggggtaaagtacaggaggaaatgatggaaagagagttcagggagagtacatttgagcagagctactcaaagtatggtcagtccacacgctggtgccaaactcggaattgttcatttttgttc

SEQ ID NO: 621249 - DNA, 413 bp, Homo sapiens
gggcatggtggtgcacacttgtagtcctagctacttgggaggctgagataagaggatcacttgagcctagcaattcgaggcttcagtgagctatggtagtgccactgcacctcagcctggctgacagagtgacaccctgtctctaaaataatacaaataagtaaaataaacaaacacaaatttttttwaatgacatgaagacacaaagtgagcatgtgctgttggaaaatggcaccaatagaacttgctcaacacaggattgccacgaatcttcaatttgtaaaggatacaatatctgcaaagcactgcaaagcaaagtgcgataaaacaactacacctgtagacaggacttattttggtctgcttagctttccttcccttgagaatcaacctttcccctaatctgtaaacca

SEQ ID NO: 621250 - DNA, 551 bp, Homo sapiens
cgctggccgaagggctcctcaagtgccgccaaagtgggaacccaggcagaggaggcaccgagagcaagcgagggctctgaggactgccagcacgctgtcagtcacctctcaatatgaaatctgggcactttgaaaaaagaacaagataacagcaatgtttaggaaacaagagagataaccttaaactctgaccgccagtgagctgggtggaacagagccatatttctcttctttcaaaagcaaatgggagaaatatcactgaattctttttctcagcatggaacatccctgagaaagagaatgtgtgcctgcaggtaggtctctaagctggctcccctgggcgtagctgtctcttatgatcgaggctgcagagatgaaatagactccagtctcccatagcgctcccaggcttattaggaagaggaaattcccacctaataaattttggtcagaccagttgatttcaaaaccctgyctcctgataagatgttatcaatgacagtggtgcccgaaacttcattcgcaattttaatttcacctcggtcctgtgg

SEQ ID NO: 621251 - DNA, 584 bp, Homo sapiens
atgttagctcttaaatttaggtctatggtccatcttgagttaattcatatgtggggtgagataggaactatgaccctttatttacactatacatacaaattrattcaagatggatcatagagttagtttttcttttctttttcttttcttttttttttgttgttgttgttgagacagagtttcgctcttgttgcccaggctagagtgcaatggcacgatctcggctcactgcaacctccacctcccaggttcaagcgattctcctgcctcatcctcccgagtagctgggattacaggcatgtaccaccgcgcccaactaattttgtatttttagtagagatggggtttctccttgttaatcaggctggtctcaaactccggacctccggtggtctgcctgcctcggcctcccaaagtgctgggattacaggcatgagccaccgcgcccagcctagagttagtttttctttgcatgttttttaacatgttaggaacatatgtatatattgacatctaccccattccttcagtagtaaatctaggcgtaaatcaaaatgctattctacatcacagaatcattgatg

SEQ ID NO: 621252 - DNA, 567 bp, Homo sapiens
aatttaggtctatggtccatcttgagttaattcatatgtggggtgagataggaactatgaccctttatttacactatacatacaaattaattcaagatggatcatagagttagtttttcttttctttttcttttcttttttttttgttgttgttgttgagacagagtttcgctcttgttgcccaggctagagtgcaatggcacgatctyggctcactgcaacctccacctcccaggttcaagcgattctcctgcctcatcctcccgagtagctgggattacaggcatgtaccaccgcgcccaactaattttgtatttttagtagagatggggtttctccttgttaatcaggctggtctcaaactccggacctccggtggtctgcctgcctcggcctcccaaagtgctgggattacaggcatgagccaccgcgcccagcctagagttagtttttctttgcatgttttttaacatgttaggaacatatgtatatattgacatctaccccattccttcagtagtaaatctaggcgtaaatcaaaatgctattctacatcacagaatcatt

SEQ ID NO: 621253 - DNA, 586 bp, Homo sapiens
atgttagctcttaaatttaggtctatggtccatcttgagttaattcatatgtggggtgagataggaactatgaccctttatttacactatacatacaaattaattcaagatggatcatagagttagtttttcttttctttttcttttcttttttttttgttgttgttgttgagacagagtttcgctcttgttgcccaggctagagtgcaatggcacgatctcrgctcactgcaacctccacctcccaggttcaagcgattctcctgcctcatcctcccgagtagctgggattacaggcatgtaccaccgcgcccaactaattttgtatttttagtagagatggggtttctccttgttaatcaggctggtctcaaactccggacctccggtggtctgcctgcctcggcctcccaaagtgctgggattacaggcatgagccaccgcgcccagcctagagttagtttttctttgcatgttttttaacatgttaggaacatatgtatatattgacatctaccccattccttcagtagtaaatctaggcgtaaatcaaaatgctattctacatcacagaatcattgatggt

SEQ ID NO: 621254 - DNA, 584 bp, Homo sapiens
atgttagctcttaaatttaggtctatggtccatcttgagttaattcatatgtggggtgagataggaactatgaccctttatttacactatacatacaaattaattcaagatggatcatagagttagtttttcttttctttttcttttcttttttttttgttgttgttgttgagacagagtttcgctcttgttgcccaggctagagtgcaatggcacgatctcggctcactgcaacctccacctcccaggttcaagcgattctcctgcctcatcctcccgagtagctgggattacaggcatgtaccaccgcgcccaactaattttgtatttttagtagagrtggggtttctccttgttaatcaggctggtctcaaactccggacctccggtggtctgcctgcctcggcctcccaaagtgctgggattacaggcatgagccaccgcgcccagcctagagttagtttttctttgcatgttttttaacatgttaggaacatatgtatatattgacatctaccccattccttcagtagtaaatctaggcgtaaatcaaaatgctattctacatcacagaatcattgatg

SEQ ID NO: 621255 - DNA, 597 bp, Homo sapiens
aatcccagcactttgggaggccgaggtgggcgcatcatgaggtcaggagattgagaccatcctggctaacaccgtgaaacaccatctctactaaaaatacaaaaaatcagctgggcgaggtggcgggcacctgtagtcccagctactcgggaggctgaggcaggagaatggcgtgaacctgggaggcagagcttgcagtgagccgagatcatgccaatgcactccagcctgggcgacagagcgagagcgagactccatctaaaacaaacaaacaaacaaacaaacaaacaaaaaaaaaccaaaaagaaaatataactttaaaagttatatattttaaaagaaataaatatacaggcctggtgcagtggctcatgcctgtaatcccagcactttgggaggccaaggcagaaggctaggaattcaagaccagcctgggcatcatagggagaccctgtctcttcaaaaaaatacaaaaattacttgggcgtggtggtgcatgtctgcaggcctagctacttggaaggatgaggtgagaggawtgcttgagcccaggagttcaagcctgcagtgagctacgcttatgccactgcactctag

SEQ ID NO: 621256 - DNA, 590 bp, Homo sapiens
tatatatatatattatattttagatttcaacccatataggttgaattaaatagaacttgggtacttggaaggagaataatctttattacctggaaaattcatatatatgcaatagctcattttccctgaattacgtggaataagwgatgggatagtgtatctcatttgttctcttgaaattctggagtttttaaaaaataaaatttaggagtattgaatgttgaaaaaatatattttatttatttattcattctttttttagagacatggtctctgttgcccagcctggagggcagtggtgcagtcatagcttattgcagccttgaactcctgggctcaagtgatcctcccaactcagcctccctagtagctgggactacagacatgtgccatcacacctggctaattttttaaaattatttttttgtagacatagagtcttgctattttgcacagtgtagtcttgaactcctgggctcaagcagtcctcccaccttggcctcctaaggtgctgggatcccaggtgtgagccaccatccccagcctaaaaaaatatttttaacttgaatattgtaattttaaagagcagt

SEQ ID NO: 621257 - DNA, 590 bp, Homo sapiens
tatatatatatattatattttagatttcaacccatataggttgaattaaatagaacttgggtacttggaaggagaataatctttattacctggaaaattcatatatatgcaatagctcattttccctgaattacgtggaataagtgatgggatagtgtatctcatttgttctcttgaaattctggagtttttaaaaaataaaatttaggagtattgaatgttgaaaaaatatattttatttatttattcattctttttttagagacatggtctctgttgcccagcctggagggcagtggtgcagtcatagcttattgcagccttgaactcctgggctcaagtgatcctcccaactcagcctccctagtagctgggactacagacatgtgccatcacrcctggctaattttttaaaattatttttttgtagacatagagtcttgctattttgcacagtgtagtcttgaactcctgggctcaagcagtcctcccaccttggcctcctaaggtgctgggatcccaggtgtgagccaccatccccagcctaaaaaaatatttttaacttgaatattgtaattttaaagagcagt

SEQ ID NO: 621258 - DNA, 597 bp, Homo sapiens
aatcccagcactttgggaggccgaggtgggcgcatcatgaggtcaggagattgagaccatcctggctaacaccgtgaaacaccatctctactaaaaatacaaaaaatcagctgggcgaggtggcgggcacctgtagtcccagctactcgggaggctgaggcaggagaatggcgtgaacctgggaggcagagcttgcagtgagccgagatcatgccaatgcactccagcctgggcgacagagcgagagcgagactccrtctaaaacaaacaaacaaacaaacaaacaaacaaaaaaaaaccaaaaagaaaatataactttaaaagttatatattttaaaagaaataaatatacaggcctggtgcagtggctcatgcctgtaatcccagcactttgggaggccaaggcagaaggctaggaattcaagaccagcctgggcatcatagggagaccctgtctcttcaaaaaaatacaaaaattacttgggcgtggtggtgcatgtctgcaggcctagctacttggaaggatgaggtgagaggaatgcttgagcccaggagttcaagcctgcagtgagctacgcttatgccactgcactctag

SEQ ID NO: 621259 - DNA, 563 bp, Homo sapiens
tccttggcacaaacataagttgttcaacaagttataatctacttgtttaagagaatgagtatttggatggataggaccttatttatgtgtaatttttaaaaatcgcatgacttcagcatgcagaagtcttccaaaactgtttaatcagcacaaagccagtttatttcttttagcccacattttgtcaaaaaataaacaaccaaatagaaaatcctgcacatatcatgtatgtagcggtgttttagtcttcagactcaaacttgagaataagacyaaaataaaatttgagagacaatttcagctaggagacaattttacctataaacttttaaagtcttcaaaatgaaggccttggttgaagtaactcaaataaaactttacttattctaccaccttccaaacacatcttcagtgtaattcagaccatatcatgggctccagacacatatatggtcaatgtctttaacatcattatattcaacagcctaataaaaaataaaacattaacacattttatgcttcctctgcaacattaatgctcaataaagattttatggatgaaa

SEQ ID NO: 621260 - DNA, 372 bp, Homo sapiens
tgaaaacttccttgcccctgactttttcttcctcaacagccaagagtactcttccctttctgtctacctgactttgaacacacataaaaaatttcctcttccatctctttctcattggtttgccattttgtttgtaacagctagagaagaattagagcatttaagcccattgatgttcagaagattaaaaattaaatgtatctacaggatgtgaaagtatcagaatattacctttccctgacaaaagtataataagccctgaaatgatggctgtattctggcagggatcacagaagagtgtggttgggaragaaatcttccctacaatgagcagctctgagccacaaatatgttattagcttctgcataaat

SEQ ID NO: 621261 - DNA, 620 bp, Homo sapiens
agtttgagaccagcctgggcaacatagtgagacccgccccctgtctataaacaattaaaaaattaacctggggctgtggcacatgcctgtagtcctagctactttrgaggctgaggcaggggcatcatttgaacccaggaaatagaggctgcagtaagttatcacaccactgtactccagcctaggtgccagagtgagaccctgtctctaaaacaaaaaataaattttaaaaaattatgcatgtgtaaaggctaaagcaactccatcatggaaactaattcactatgctgacttctgcttaaccccagttcctctcagatttctattttcaagtacttaccataaatcctgcttataggcaaattccttctgaaacatctataccctttctctatggtatagaagccctggctctgggggttaacagtgcggggatccaccacctctcagctacccgagacatggcttctgcttgtaaatccctaggaaatgcttctttcagagaaactggatctatcagtttctttttttagcctctcagctcccatggcctttgggagtaggttcacatagatagacctgctcatcttgaaacagcatctctagaggtttagaatacc

SEQ ID NO: 621262 - DNA, 527 bp, Homo sapiens
atcattacatttttacctaggagaatgaaatcagtaataatcctagggtactcattttccagcaataatcaaaagattcttatattactaattgtgagcagaatacttaaagagagaaattttggcaaaactattatgcgaatcactaaatttgcatatagtggtttttcccctaaaatgtaatgtgtgttttaagacttaactctcagaatggcaattccattttcctgcttccaagttcttgattgggaactctttattattacacatatattttctattcagctaaaacctccacaacatacagaataaaagatttgatttttcctgactgaaagaaaagctgatatttgtatatatgcatttgttatttatcaaatgaactctaggacaatgtcaactgcttactaatatccaatatattccatggacagcctccctcaagyaatgaatctcagaatatcatggcaatgtgaaaattcctataactcacatatttctatatatcctatggagtacgttctcgt

SEQ ID NO: 621263 - DNA, 572 bp, Homo sapiens
ttaacataatgttttctggcaagtaaatgctgaattgacaaatatatttttcttcctaagtctcattaaataaatacatatttattcactctctaaaccagctaccaaaataggtatatttaaacatttatcagagaagttattttcctcctataagaagtcgtgcagcaaggtgagttatatcaaacataaaatgttttatttagtttgttatctcactctcattattcaagagttttaaagttgctataactattctaaatctgtatggatgtttatttgagtaataaacatttagtttgaaaattacaaaatacaaacataaactaacttagacaaaatgaggaattaattaaatcatgtaatgtaatgtcaggaggtcaggggaatagtactttccagggatacatgaatcatagtcttgaaatacctttaaacttctaccttaatatgtttttttgtcttattttatggggcagcattattttcaagattagctaccacrtcaaggatgtaaatacggccaatagcatttcttgcactcactcaaattaccatctataaaaataaat

SEQ ID NO: 621264 - DNA, 562 bp, Homo sapiens
agctaccacgtcaaggatgtaaatacggccaatagcatttcttgcactcactcaaattaccatctataaaaataaatcatcttccttttttcctttttacttaaagmctatggacagcactctggcctaacttgggtcatgggcccacactcatggggaaagtgacaggtggaacaatgacagtaacttgaaaccccatttgagcctacatggttagagtttaggggaagggccattcaccaaatgagcagaataagaaggaaagagaaatgccagaggaaaattataactgtccattgtcattttttgttgattcagtctttcagtaggcaagactatgagtttttaatcatcgtatttatataccctacctggccacattcgaaggcacatatggaaactttatgcctcatgttaccaaggcatcaaactgaataaaaaactgttttctaacctgcagtctttaactccttcctgcctaactgcccttttctgtccctaattggttattctggcctacttcttccacaatgacattcacacatccatgccttctcatcaa

SEQ ID NO: 621265 - DNA, 331 bp, Homo sapiens
ctatcatcaattatttcttctttgaagaccaaagttgtaagcrctaactccaagttaagaatttttgatcatggaatgcaatgtaaagtcttgaaatgagaatgcagattctctgtctgggaaataatttttccttttttttctgtataaaaatcaagtgaagtaaaacccagactttacaggtcataatgatgaaaaacttttaactactactttgacattccaagatctgagttaaattttgactcttaaagcattgctttacaactagcttgtaatatatcattggtctataaaaattgggacaataatagtcactaagatgcaggta

SEQ ID NO: 621266 - DNA, 331 bp, Homo sapiens
ctatcatcaattatttcttctttgaagaccaaagttgtaagcgctaactccaagttaagaatttttgaycatggaatgcaatgtaaagtcttgaaatgagaatgcagattctctgtctgggaaataatttttccttttttttctgtataaaaatcaagtgaagtaaaacccagactttacaggtcataatgatgaaaaacttttaactactactttgacattccaagatctgagttaaattttgactcttaaagcattgctttacaactagcttgtaatatatcattggtctataaaaattgggacaataatagtcactaagatgcaggta

SEQ ID NO: 621267 - DNA, 331 bp, Homo sapiens
ctatcatcaattatttcttctttgaagaccaaagttgtaagcgctaactccaagttaagaatttttgatcatggaatgcaatgtaaagkcttgaaatgagaatgcagattctctgtctgggaaataatttttccttttttttctgtataaaaatcaagtgaagtaaaacccagactttacaggtcataatgatgaaaaacttttaactactactttgacattccaagatctgagttaaattttgactcttaaagcattgctttacaactagcttgtaatatatcattggtctataaaaattgggacaataatagtcactaagatgcaggta

SEQ ID NO: 621268 - DNA, 331 bp, Homo sapiens
ctatcatcaattatttcttctttgaagaccaaagttgtaagcgctaactccaagttaagaatttttgatcatggaatgcaatgtaaagtcttgaaatgagaatgcagattctctgtctgggaaataatttttccttttttttctgtataaaaatcaagtgaagtaaaacccagactttwcaggtcataatgatgaaaaacttttaactactactttgacattccaagatctgagttaaattttgactcttaaagcattgctttacaactagcttgtaatatatcattggtctataaaaattgggacaataatagtcactaagatgcaggta

SEQ ID NO: 621269 - DNA, 520 bp, Homo sapiens
aaaaaattaaagcaacatagcttcaaacctattaaggaacttatgccttcttttagaaatgtgttattataactaaaactttcttttcatcggcttttatgakagagttagtttattgctgcacactattttgttattttgacacgatatgtaaattagtatattttgccttgcaagaggattcatatatgttatgttaaatgtccaacaggcagataaatcgtgctacattttagtattcaaagtttaaattaattgagaaaggtaagaaaaatatcctggacttaccaaaacattaattcatcttaaataaattctaggtttctttaacatgatcttactgttggttgacttggatataacaatgtaagttgaaatggttagataccattaagtaatttaatcacacaatgatgctatatttcttttgccaatataaggtggaaatatttttaaaaggtgcagacaggaatattatatatatcaatatttttattttaaaagtttagtttttgtttat

SEQ ID NO: 621270 - DNA, 677 bp, Homo sapiens
caggaatatccctactaacactatgaggcaagttttggagccatcaaagtgtacttgggactagaggcccagtgaaagattggtgcgagaggaaggaatcacacaatcgcaattcataggaaaaaaagaaacaaaatcggcaacaaccmcaataatacagttctcaggctgaaatataacctgaaattccaaatcatatgaaaaaattaataataagataggtttgcaggtggtgttggtgttggttgggggtgtgtggtcatttggggcggcctctgccatcttcagtacatggttccaagttctgcctatgcattggcattgcagccagcacaaaggaggaggaagtgtgagggcatgcgtgccaggtggcatgcatcagtcccatccccttgccaccagggaagatttagattcttgatacatttaactgcgagggattctgggtgagagaaggaatgaagaacaagttgtgttggctagtcaggattttctgccattacatgcctttccatatgtttgaagattattataacagtatggagaaaatgtggaaaatatggagtgatttagactaggttgataatatggcttatgggagagatacaagcattttaaaatgattttgactaaacaaaacaacgcaaaaatcaatgtgcatgaatatgtgtaatatg

SEQ ID NO: 621271 - DNA, 604 bp, Homo sapiens
ggtatagtttccccttactccagacagtggcaaaggactggatttatgttgtgctattttgggtgtgttacaggctttgtcacaggaattaggttttagaattgtgtggcttcatttgtttcttgataggtaatattaaactgtatactttttatctttcttaaacgttgtgtaatttctctgtatggtcatccaratttttctctttatgcactcagaagccaatgacaaagcagatgaaacaaaagataatatttggaatttataatttgccaaaggcaggcaactcaggcctgtaatttccagggcattctgtgctttctgactgatttatttcccttgaaactcaagtatcacaaggaaaacagagagtcatcagtgaatggaaaaataatattttctattgatggtttgtttatcccactttatgtacaaaatagtttgtcagtgagatgattttaagttaccacacaagaaataagagtaattctttaccaggcagcaaatacctgtgaaataatcaggaatatttgtttaatttttattttttaattgacacataataattgtacatatttatggggtacgtcatgatgtttcaata

SEQ ID NO: 621272 - DNA, 555 bp, Homo sapiens
gaattctatttcataatattaagtgttttacacccttatcatatttgataggcttccaaaaatcaaattttagctttaaaataatattttctaacctttaaatttgggatgttacagagggatgctaaagcatccaaaagagaggtaaacagaattatttggcatgttttgttacatgggaaccattgtcaaaataaaagataatgtttaamcttcttcaggttgtattttagtgaataatattaatacatgttccaaaattgtatgggattaataaaattctaatatgtctaagtatatgccattaattataattatggttattatgttgttattattggtcaaataaataaccaaatttccttgtcaattatgtctttaactacaaaattttaaagtcatttctacagttaattgcttaatgctgatgcagtttctgaaaacttcacaatcgcataaaatcctagaatatggtgtctcttaggaggttcatgaaaggatgaaaaggactctgaaaagcacttttgaatacaggtggtccgataactttagaat

SEQ ID NO: 621273 - DNA, 493 bp, Homo sapiens
tttactaccaggcaaaaaatgaaactgattgatatggtttggctgtgtcccaacccaaatctcaacttgaattgtatctcccagaattcccacacgttgtgggagggatccagggggaagttatagaatcatgggggcctgtctttcccatgctattcttgtgacaatgaataagtctcacaagayctgataggtttatcaggggtttctgcttttgcttcttcctcattttggcagaggagtcaaattcttgggtggctctgtctctggttctgatctatggaatgattttttttttcttttttttgtccccatctccttcacagctcctggatctcttctttgggacaaacctcattttgtatttttctccatggccacatttgagatggaccataaggaaatgcctttcatggatgcacagcagttttctctattccttgttgcattgagttcagtgttccagcaaatgacctgggaattgaagccttac

SEQ ID NO: 621274 - DNA, 326 bp, Homo sapiens
aaatatctagaatggacaaattcatagagacagaaatttattagtgattagtagggagtgaggcgagagttaaataggtgctatkgttttatgagtatagtttttgtttggagtgatgaactaattttagaaatagttctgatggttatacattttgcatgtaattactactacagagttatccacttaaaaattttttaaatgatgtatttatatcatattaaaatttaaaaagcaaacaaataggaggtgcctaagcttgactcatgttcactaatttgctgaccccttgattgtggcagtggttaatatattttagaatttaa

SEQ ID NO: 621275 - DNA, 326 bp, Homo sapiens
aaatatctagaatggacaaattcatagagacagaaatttattagtgattagtagggagtgaggcgagagttaaataggtgctattgttttatgagtatagtttttgtttggagtgatgaactaattttagaaatagttctgatggttatacattttgyatgtaattactactacagagttatccacttaaaaattttttaaatgatgtatttatatcatattaaaatttaaaaagcaaacaaataggaggtgcctaagcttgactcatgttcactaatttgctgaccccttgattgtggcagtggttaatatattttagaatttaa

SEQ ID NO: 621276 - DNA, 583 bp, Homo sapiens
gatgtcagatcgcctggatggaactaaaatcccagttccatcaactttctcctctgtaacattggaacagctaatgaacttccctgagatttagattcccttgcctgtaaaagagaataaataacaaaaagtcctcatagagtattttaaagattacatggaatactgcttataaagttattagcaaaatggtacataacaagtcctaataaacagttacaaatgataaaaaaaaaaggacagagaataacattcatgataaatcaatctgaaaaatgctgatgtaaaaaattctagaactctcaggatatcgtcataaagtcagtgtattaaaataaatatggcataaaccctccaatctgagccttataaagagaggagatttgcttattgtgamaaagggaaagagtggagggtgtatgaggtaattattaacaatattagttttattaaatattatcacattttattaagtgggtatcagcaacctcaagctggtgttattaactgaacttgggagaacatttgagctcatgaactattccttgttctaaatctgagctaagtaaaaaatgtgataaag

SEQ ID NO: 621277 - DNA, 569 bp, Homo sapiens
taagctgatggggctaggttccctattcatataagacacaatttcctggtggcttcaccctattcccccagtatgcctacaggtccttagtccactgcagacagatttaggcaagccccctgtgcaagtcccattacctgcacaaaacatctgttgtaaagcacttgtggggtgggtctgaggttctccaggggcccttcccttactgtcttcctaaagcaagctgactaactcttttcactacaaaatatacatgaagtttttattattttgacaatttatgggatatgaattgttatacytattcgttggaagaagactcagtctcacagacattgaatattatgaccaaaaagtcctccaattagtaaaggggaagagtttctatttaccaaactgcaaagctcataatattttctataaacttttgaacttgcccaattcagcattcctaaattataaacacataaaagtctctccggttctatgggtatgcacgagaatgtatatgtgggtgtatttcattagtgttttaagttacaattctgtaatgccatatgatgttgagt

SEQ ID NO: 621278 - DNA, 569 bp, Homo sapiens
taagctgatggggctaggttccctattcatataagacacaatttcctggtggcttcaccctattcccccagtatgcctacaggtccttagtccactgcagacagatttaggcaagccccctgtgcaagtcccattacctgcacaaaacatctgttgtaaagcacttgtggggtgggtctgaggttctccaggggcccttcccttactgtcttcctaaagcaagctgactaactcttttcactacaaaatatacatgaagtttttattattttgacaatttatgggatatgaattgttatacttattcgttggaagaagactcagtctcacagacattgaatattatgaccaaaaagtcctccaattagtaaaggggaagagtttctatttaccaaactgcaaagctcataatattttctataaacttttgaacttgcccaattcagcattcctaaattataaacacataaaagtctctccggttctatgggtatgcacgagaatgtatatgtgkgtgtatttcattagtgttttaagttacaattctgtaatgccatatgatgttgagt

SEQ ID NO: 621279 - DNA, 598 bp, Homo sapiens
aataaatagtatacaatagataagaataacctttaaaaaatgataaaatattttaaaatgtgaaaagtatgacattctgctaactgaaagtgaaagtgaagaagtatttttacttcaattaactttatgtaactctagtaacctaagaacagctatttttatacccatgaaaaataatagcaattaatcaattaaaatgacagaattagtattttattttagaaaaatacaataagagaaagaacaattatactaatttgagcctcgcacatagtttgccttttatttggatttgttcaagtgaatagcagctctttgaaagcagttgatttttttawgataaatcttgataaaccaccatctttgatctaaatcctcataggtgttgagtgtaattgtcttataaaaacagactgaatgtaacaaagcgtcaaacattgaagtataagtcagtgttgtatgagtttctccaagagatttgatttgaaattaaatgttgttatagagactatatatatatataatattttatttatgagtgcctgatattaaaactggctgaaaaatacaaagatagaattattcacatttcatccat

SEQ ID NO: 621280 - DNA, 384 bp, Homo sapiens
tcttcaattaaaaaggtataattcactttattgctactgtggtggtctttgtattaatttagtaaggatttagtgaccaccaagtacgacagatacagagcaggccaaaaaaaaaaaaaaaaaaatctcattttttttctagcctccctctggtaacatgtgaggaaaataaataaataaataaataaatcaggttctataatcaaacagtagccagaaactacattcgtatccattagtggaagatattttagcaatgtaggtgataagacctagggtaattagrttttttttacacaccaagttcacagaagttaaatgttgaccataattataattacatgtatatgtaaaatgtgacaagaattaatttacatgtgttat

SEQ ID NO: 621281 - DNA, 549 bp, Homo sapiens
aatttatcctattgctataagtagattgatatatcaaatttcttttttaaatcatgtttccaaacatgattttattatagggttttttatgtaggaaaagagaaaaaatagaagcattctgaatgttctaaaataaatcaatgatggtgtataaatataataaaaaaatgtgcaggcacaaacataaaaaagataaatctatattttctaatatggtcatatttagatgtttatagcactcatatgaaaaaactcaattaaaaataatatagcatgattgattttttaatatattttgcrtatatcatagatatgtaaactaaatatctaattcaatttttatctattatttatctacttttccaaaattaaaatgcactagtaattataactggaattgcatttattttcattttcttcctttaaagtattaatgcatagattttttatgtcatatttgtattcaatatggtttagatatcaacttatcccaaactaatttatacatttaatacaattcaaattagaatgtagcatgtgtttggcaga

SEQ ID NO: 621282 - DNA, 588 bp, Homo sapiens
tctacccctgtggctctgctggatacagattccatggctgctttcacaacctggcattaagtgccttggcttttccaggtgcataatgcaagctgttggtagagctactgttctctggtctggatgacgatggcccacttctcacagctccaataggcagtgccccaggggcgactcagtgtttgggctccaacctcacattttccctctgcagtgccctagtagagattcttcatgagagctctgctcttgcagcagatttctgcawggacacccaggcatttccgtacaccctctgaaatctaggcagaaggttccaaacgtcaattcttgccttctgtgcacccacaggcccaatatcatgtggaacctaccaaggcttgggaattacaccatctgaagcaatggcctgagctataccttggccccttttggccatggctagagctgaagtggctgggattcaaggcaccaagtcccaaggctgcacagagcagtggggcccatgaaatcatgttccctccttggccttcaggcctgtgattgaagtggctgccacagatctctgaaatgccctggaagtatttt

SEQ ID NO: 621283 - DNA, 588 bp, Homo sapiens
tctacccctgtggctctgctggatacagattccatggctgctttcacaacctggcattaagtgccttggcttttccaggtgcataatgcaagctgttggtagagctactgttctctggtctggatgacgatggcccacttctcacagctccaataggcagtgccccaggggcgactcagtgtttgggctccaacctcacattttccctctgcagtgccctagtagagattcttcatgagagctctgctcttgcagcagatttctgcatggacacccaggcatttccgtacaccctctgaaatctaggcagaaggttccaaacgtcaattcttgccttctgtgcacccacaggcccaatatcatgtggaacctaccaaggyttgggaattacaccatctgaagcaatggcctgagctataccttggccccttttggccatggctagagctgaagtggctgggattcaaggcaccaagtcccaaggctgcacagagcagtggggcccatgaaatcatgttccctccttggccttcaggcctgtgattgaagtggctgccacagatctctgaaatgccctggaagtatttt

SEQ ID NO: 621284 - DNA, 605 bp, Homo sapiens
ctggacatccaggcatttccatacattctctgaaatccagccgaggttcccaaacgttaattcttgtcttctgcagacctgcaggaccaacaccatgtgggagctgccaaggcttgggacttgcaccctccaaaccaatggcctggcctgtaccttggtttcttttagccccagctggagatgctgggatgcagggcaacaagacctcaggctgcatacaacagcctggcactgtatctggcccataaaaccatttttctctcctaggcctttgggccttagaggggctgctctgaagttttctgacatgccctggagatatttttcccattgtcttggcaatttgaacatttggtatcttatyacttatacaaatgtctgcagcggacttgaatttctccccccaaaataggtttttcttttctaccacatcatcaggctgcacattttccaaacttttatgctctgcttcttttttaaacataaatttaaatttcagatcatctctctcaagttcaaagttccacagatctcgagggcaggggcaaaagctgccagtctcgttgctaaagcatagcaagagtgacctttactacagctcccag

SEQ ID NO: 621285 - DNA, 609 bp, Homo sapiens
gcccggctaattttgtatttgtagtagagacggagtttctccatgttggtcaggctgatctcgaactcctgacctcaggtgatctgcctgccttggcctcccaaactgctgggattacagtcatgagccaccacacccagcccacagttttaatagttatgggttttacatttaagtgtttaatccatcttgagttgatttttgtatatggtrtaaggaggaggtccagtattgatcttctacatatggctagccagttatcccagcaacatttattgaatagtgagtcattttctcattgctcattcttattgacttttacaaagatcagatggttgttggtgtatccctttatttctgtgctctctattttgttccatttgtctaagtgtctgtttttgtaccagtaccatgctgttttggttactatagccttctagtgtagtttgaagtcaggtaaagtgatgcctccagctttgttcttttagcttaggattgctttgtctattcgggctctttattggttccatatgaattttagaatagtttcctctaaatctgtgaaaaatttcattggtagtttgatagaagtaacattgactctagatt

SEQ ID NO: 621286 - DNA, 545 bp, Homo sapiens
taataattttacatgaaatttctgtattgtttcttactactgaatgtgaatctaaaattacctcaaaattaaaakttaaaaaagattaagcactgttagcatctttctttaaaaattatatatatatggatatacgtgtgtatacacacatacactcatatatatttcagtaaatgtatagtaagcattgatttttcccatttatgaagtttaataagttaaaagtctgtgagtaaagtagcattatttattaaaatcatagatttttcatgtcatgttagtcagattgtcattctgtatgccatacagcatttccaaaacaaatcatggttagccatactttacctcctcttttcccctgtcaatatgggtacatcagtaaaagttatacagtttaaaaactttcagttttccagctttcttttctcaattccatatctaatattgagctagaatatttagtagttcatcattttctgatctcttgttacctgagtgaccaactgggaaataaaagtgagatgaaatgaaactgcaagataatt

SEQ ID NO: 621287 - DNA, 625 bp, Homo sapiens
aaagaagaaaagagagaagattcaaataaacacaatcagaaatgataaggggactattaccactgatcctacagaaatataaacaaccatcaaataatactataaacacctctatgcacataaactagaaaatwgagaagaaataaattcctggacacatacaccctctcaagaaggaaccagaaaataattgaatctctgaacagaccaataacaagttctaaaattgaggcagtaataaacagttgatcaaccaaaaaaagcccaggacatggatggtactgaagtccattatcctaaatgaactgattcaggaacagcaacaaaataaatattgcatgtcatcacttattagttggggcaaaacactgaatacatatgaaaacaaagatgaaaatagtagaacctagggactgctttacgggggagggtagaagaagggcatactttggaaggctacctattgtgtactgatagggctcggctgtgtcctcacccaatctcatcttaaattgtaacttccacaattcccacatgtcttgggaggaacctggtgggaggtgattgaattacggaggtgggtctttcttgagctgttctcttgatagcgaatgagtcccacaag

SEQ ID NO: 621288 - DNA, 356 bp, Homo sapiens
gttaaatgggacataagatgttttgatacaggtgtgcaatgtgaaataaacatatcatgaaaaactgartatccaccccctcaaacagttgtactttgagttacaaacaatccaattacactttttgcattattttaaaatgtacaattaagttattgactatagtcaccctgttgtgctattaattaataggtcctattcatgcttttgaactattttatttgtacccattagccatccccactttccccacaattgcctcctacccttcccagcctatggaagccatcattctattctctaagtccataagtttaattattttgattttcagatttcacaaataagctagaaca

SEQ ID NO: 621289 - DNA, 356 bp, Homo sapiens
gttaaatgggacataagatgttttgatacaggtgtgcaatgtgaaataaacatatcatgaaaaactgagtatccaccccctcaaacagttgtactttgagttacaaamaatccaattacactttttgcattattttaaaatgtacaattaagttattgactatagtcaccctgttgtgctattaattaataggtcctattcatgcttttgaactattttatttgtacccattagccatccccactttccccacaattgcctcctacccttcccagcctatggaagccatcattctattctctaagtccataagtttaattattttgattttcagatttcacaaataagctagaaca

SEQ ID NO: 621290 - DNA, 498 bp, Homo sapiens
gtttattttatcaaggctttaataggaatgatgtgcttccatttaaggaatcaatgtttatttatagggccaataaaagccccttaggaaaactggcttcatatcttgtttacataggccctttacatggttyctgacctgtgttaagaaaagaatgtcactttctgacaggcccagcagcctcattatcgtggaacctcaagaggagaggaatttacccaacttacacagattttcagtggcacaaatccatggctggattcaaggattttaaaaaagtctcttaactagatccttgtgaaacaaagtttcatcaaagccaatttaaaaagaagcctatatgaaaaataattattttcgctgtgccttatgcaaacaataaggctaagtataataagactaaagcttattttgcaaacaaatcagtcttaccataattcgtttttattaaaaatgaggacagaagagagaaaaattatgttttaataattatggtac

SEQ ID NO: 621291 - DNA, 498 bp, Homo sapiens
gtttattttatcaaggctttaataggaatgatgtgcttccatttaaggaatcaatgtttatttatagggccaataaaagccccttaggaaaactggcttcatatcttgtttacataggccctttacatggttcctgacctgtgttaagaaaagaatgtcactttctgacaggcccagcagcctcattatcgtggaacctcaagaggagaggaatttacccaacttacacagattttcagtggcacaaatccatggctggattcaaggattttaaaaaagtctcttaactagatccttgtgaaacaaagtttcatcaaagccaatttaaaaagaagcctatatgaaaaataattattttygctgtgccttatgcaaacaataaggctaagtataataagactaaagcttattttgcaaacaaatcagtcttaccataattcgtttttattaaaaatgaggacagaagagagaaaaattatgttttaataattatggtac

SEQ ID NO: 621292 - DNA, 568 bp, Homo sapiens
tgttaaggtgtgttttatggtctagaatgtggtccatcttggttaatgttccatgtaagctggagaatagaagaatgtgtcatctgctgttgttggacgaagtagtctacagatgtcaattatatacagttgattgatagtactgttgagctcaactgtgtccttaactgattttctcactagtgtatctgttaatttctggctgcagtatcaatttctatcagtttttgcttcatatattttgacttcttttgttagtcacatacacattaaggattgttatgtctttttgaagtattaacacctttatcttattttattactctctttagtcctgataactttctttgctctgagtctgttctgttcataatatagtatttctgctttttgaaaattagcattagcacagtatacctttctccatttcctttttatttatttacttttatatggaacgcttcacgaatttgcrtgtcactcttgcacaggggtcctactaatcttctctgtatcattctaatttttgtatgtgtgctgccaaagtgagcacgatttcctttaaact

SEQ ID NO: 621293 - DNA, 558 bp, Homo sapiens
gtgtgtgttttatatatatatatatacacacacacacacacacacatttwtatatatatatatatatattttttttttcttggcatgttttacctccaagatactgatatttgatatgaaaaataacaacattagctattagtccaaggagttgaaagcagttggtgttgagttggaaaaaagataatcaaacctgtactttaggaagtttcaactggtgggtagcatgtaaaaagatggaaaagagctaatgctgaaacagagtaacccaatagttttttgttacaatctaaccaaatttattgatggcctgaatgaggatcctggaagtcaaactgatgagatgtgtattacccaagaagaactggtaatgacagtagctggaaaggatgggtattcatttactaacacaatatttaggtagagatgtttagcacagaattaaatagagcttgggcaccaaagagaattgaaactaggccacttagggggtagtaactgaaactctgagactagtataggctgaaaaatgtgggtagagaagacagaaagaggttg

SEQ ID NO: 621294 - DNA, 474 bp, Homo sapiens
gtggagattggtgatgacctcctgcctgggtggctattacacacaaagctgagagcagtttttaaagtcttctcaccattttgctctctctttaaaaattaaaggcccgacaccaaggtgttttattcccagaccagctggcctttaggaggatggattggaagtgagaatatctgatgacttccttcctaacctcagtggttttcaaggatgggaaaggccacagggaaggaaggtcaccttgttctttttktcaacttaatgaaaaaggaatgaaacatcagtcttgatgactgagttccatagtaagggagccatggaaaggacgtaggagcaatggcgtgatgtaggggttaagactcagtgagactgggaggttgcacagtctgcatggcatactggaatgagcactggactgggagcaaagagacctgagttctcatctcagatctgccactatctgtctgtgtggtc

SEQ ID NO: 621295 - DNA, 492 bp, Homo sapiens
tttttaattaattgaagccattccccagaataaaaatgtcatttgctttggagctcatagcagtggcaataaaaacttagtgcacattgagagcactggttctcaaatgcatattcccrggcaccatctctgaagatgtgggtttagtaaggttccaatgggtcttaggaatctgcatttgtgaaataaagaaaataactttgccaccatcatcaagttgttttcatttctaaatatggtagtatatttaagttcttagtcgagtacctggcttcatcagaagcacttggtaagtaaatccactattgttagttttgttcatgatatggtttccagtaggctcattcagtatggatccaagcactcactgaaagtaacaaccagccctaagggtggtatctctcaattctgtctatccccacctctactacattagttcaacttcaccctcatctcacacctgtgacattaccagggccctccctacagctt

SEQ ID NO: 621296 - DNA, 560 bp, Homo sapiens
ttggaacaattttgggtttttagaaattaattgagaattgttttatgcctgattgtgtgggtaattttagmgtatgtggcatgtgtggatcagaagaaggcatattctgttggtattgggaggagagttctatagtatgtttattaggtctatttggtcaagttgaattgagatcccaaatatctttgttaattttctgccttgatgatctgtctaatactgtcaatggggtgttcaagtcttccactattattctgtggtcatctaagtctctttttaggtctctaagagcttgatctatgaatctgaatgctcctgtgttgggtacatatttttttaggacagttaggtcttctagttgaattagacctttaccattatgtaaatgcacttctttgtcttttttttaaatccttgttggtttaaaatctgtgttgtctaaaattaaaagagcaccccttgcctttttgttttccatttgcatggtaggtttttctccatcccttttatttgagcctatgggtgtcactgcatgtgagattggtctcctgaagacagaa

SEQ ID NO: 621297 - DNA, 560 bp, Homo sapiens
ttggaacaattttgggtttttagaaattaattgagaattgttttatgcctgattgtgtgggtaattttagagtatgtggcatgtgtggatcagaagaaggcatattctgttggtattgggaggagagttctatagtatgtttattaggtctatttggtcaagttgaattgagatcccaaatatctttgttaattttctgccttgatgatctgtctaatactgtcaatggggtgttcaagtcttccactattattctgtggtcatctaagtctctttttaggtctctaagagcttgatctatgaatctgaatgctcctgtgttgggtacatatttttttaggacagttaggtcttctagttgaattagacctttaccattatgtaaatgcacttctttgtcttttttttaaatccttgttggtttaaaatctgtgttgtctaaaattaaaagagcaccccttgcctttttgttttccatttgcatggtaggtttttctccatcccttttatttgagcctatgggtgtcactgcrtgtgagattggtctcctgaagacagaa

SEQ ID NO: 621298 - DNA, 581 bp, Homo sapiens
ttttaatttgcttgtttccagaaacttgttttaattggtatgctttacttcctctcttaaaaagtgaaaaccatttataccttatcaaaatagaccatttagatacatattgttggtggtgaattagattgcattgaataatgacaagtttctgacaattataaagcagtgacattcaggaagaattttttttatttagttgcatactagttattatttcaggaataatattttaaaaatctagtttttcaactctagcaaataatgcatattcttacctgtaagggttggctttttttttttttttttttgacagcgtctcactgtgttgcccaggctgaagcgcagtggcacaatcttggctcactgcaacctcggcctcctgggttcaagmgattcttctgcctcagcctcccaagtagctggcactacaggtgcacaccaccaagcctggctaattgttttgtatctttagtggagatgggtttcaccatataggccaggctagtcttgaactccagacctcaagggatccacctgcattggcctcccaaaatgctgggattacaggcacgagccac

SEQ ID NO: 621299 - DNA, 587 bp, Homo sapiens
agcatacatgcaaaataacaataaacatttgcttatttttgtgaaaaagtttcttgcttaaacgtaggagaataaaaaatgtggtactcaaaacagataaaaatttatttccctttctcttccctgctaatggtgaataaatctcaggctgcagtaacatgttttaaaggcttttctacctttaaaatgtatctaattattagaaaaatcaatctaattaacccaaattaagtggatcttggaatttatattgaagaatgtttacccacttttacattttaaagaaaactgtacaattagagtggaataatagacattggaaactttaaaaggtgggtgggtgggagtggggtgagggatraaatacttcctattgtgtacaatgtacactatttgggtgataggtacactaaatgctcagacttcattactgcacaatatattcatgtaacacaacagcactggtacccctaaatctataaaaataaaaataacctgtataattagtaaaagatgactatttttaatggaatttttattgttcttataagtttttgttttttttactcttcgagtatcattcaatt

SEQ ID NO: 621300 - DNA, 633 bp, Homo sapiens
aaagtgttcaagcatccttcagggaattaacagcaaaattgaaaatggcttaagagggaatagaaagtgccagaacttagaaaaagccctaccagtcacgtaggaagcattagaagtaatgttagcggtcagagtgaatggcaccttatggaagatttgttctacaataatccctaaawccagacatttcagtcaattggtctcagtttaaattttatggagcaacgtcagttgatttaggaatttacgaatagttagatgtgaagagcatagcaattgcatttggaaaatgatataacagtatctattaaaactaagtatatacataacctatgacctagcatttcttttatttttttatttttattattattattttttgagacagagtcttgctctgttgccaggctggagtgcagtggcgcgatctccgctcactgcaacctccgcctcctgggttcaagcgattctcctgcctcagcctcccgagtagctgggactacaggtgcctgctaccacgcctggctaatttttgtatttttagtagagatggggtttcaccatgttggccaggatggtctcaatctcttgacctatgacccagcatttctactcttagatatatgcccaaaa

SEQ ID NO: 621301 - DNA, 633 bp, Homo sapiens
aaagtgttcaagcatccttcagggaattaacagcaaaattgaaaatggcttaagagggaatagaaagtgccagaacttagaaaaagccctaccagtcacgtaggaagcattagaagtaatgttagcggtcagagtgaatggcaccttatggaagatttgttctacaataatccctaaaaycagacatttcagtcaattggtctcagtttaaattttatggagcaacgtcagttgatttaggaatttacgaatagttagatgtgaagagcatagcaattgcatttggaaaatgatataacagtatctattaaaactaagtatatacataacctatgacctagcatttcttttatttttttatttttattattattattttttgagacagagtcttgctctgttgccaggctggagtgcagtggcgcgatctccgctcactgcaacctccgcctcctgggttcaagcgattctcctgcctcagcctcccgagtagctgggactacaggtgcctgctaccacgcctggctaatttttgtatttttagtagagatggggtttcaccatgttggccaggatggtctcaatctcttgacctatgacccagcatttctactcttagatatatgcccaaaa

SEQ ID NO: 621302 - DNA, 633 bp, Homo sapiens
aaagtgttcaagcatccttcagggaattaacagcaaaattgaaaatggcttaagagggaatagaaagtgccagaacttagaaaaagccctaccagtcacgtaggaagcattagaagtaatgttagcggtcagagtgaatggcaccttatggaagatttgttctacaataatccctaaaaccagacatttcagtcaattggtctcagtttaaattttatggagcaacgtcagttgatttaggaatttacgaatagttagatgtgaagagcatagcaattgcatttggaaaatgatataacagtatctattaaaactaartatatacataacctatgacctagcatttcttttatttttttatttttattattattattttttgagacagagtcttgctctgttgccaggctggagtgcagtggcgcgatctccgctcactgcaacctccgcctcctgggttcaagcgattctcctgcctcagcctcccgagtagctgggactacaggtgcctgctaccacgcctggctaatttttgtatttttagtagagatggggtttcaccatgttggccaggatggtctcaatctcttgacctatgacccagcatttctactcttagatatatgcccaaaa

SEQ ID NO: 621303 - DNA, 591 bp, Homo sapiens
gcccttttttttgaggggaatggtggcaggggagtggtagctcttgatgagggctgttaggaggataagatgccaggccagcgtctcttctcatgtgccacactctgtgttatgtgtatgtagggagtggaagttgggcggagaagaaaggacattgagaagttacatcccgcaactcaggactctaagactctaargcaattgtgagctttgggaatgtctgagtaaccctcagagaaaaatattctctgtaaattcagaggcaatcagagatgaagcaatgaaatgatatagctctaggggagaaataaagattcaaacttgtgattatataaaatgggagagggaaaagttaaaatcatcaattccagctgggactggagtcatagtagctaagaaaagttaatatgtactgacttcctgcatatttataatatgctaagcactttacatgtataatttcacttaaactacacaaccaccatataaaatacttttctcaccaattttcacaaaggaaaacaatagggaaacaggttgagataggaaaactgttgtacaaggtaatacacaaagcaaagcccagagcta

SEQ ID NO: 621304 - DNA, 587 bp, Homo sapiens
caatgtcagcaggagagaggagaattctcagatggtggccacattaaggcaaaggcacataagagctctccatagaygaagcttctctacaagtagcccattagagcatctgcagaaagtggagggccaggtggaactgcactgcagtctgtgcctgtcactcaaagaatcttatgttagactcagaaagggagaatatccactgtgcaggatccaatggctagggacccactgggcagggagatagactctaagcacaaattccagagacatctttctcttgatttgaaagaacctcttgctatgcagtatattgatatgtgattcctagaaggaaggaataaaaccagcaagctacatttgagaaaaaaattacaagtgtgtgcaaggattttccagcagacagcaatcttaccaggatgaaccttgaagaacacaggaaacctttggggtgaagtataggcaacatgtcagaccagcaaggagcagagcagagcattgatgagttatttctctattcatgcccagaatggagaggcctttgctgaaactgaaagcaactttacacaaaagtctaccaatgccaa

SEQ ID NO: 621305 - DNA, 587 bp, Homo sapiens
caatgtcagcaggagagaggagaattctcagatggtggccacattaaggcaaaggcacataagagctctccatagatgaagcttctctacaagtagcccattagagcatctgcagaaagtggagggccaggtggaactgcactgcagtctgtgcctgtcactcaaagaatcttatgttagactcagaaagggagaatatccactgtgcaggatccaatggctagggacccactgggcagggagatagactctaagcacaaattccagagacatctttctcttgatytgaaagaacctcttgctatgcagtatattgatatgtgattcctagaaggaaggaataaaaccagcaagctacatttgagaaaaaaattacaagtgtgtgcaaggattttccagcagacagcaatcttaccaggatgaaccttgaagaacacaggaaacctttggggtgaagtataggcaacatgtcagaccagcaaggagcagagcagagcattgatgagttatttctctattcatgcccagaatggagaggcctttgctgaaactgaaagcaactttacacaaaagtctaccaatgccaa

SEQ ID NO: 621306 - DNA, 532 bp, Homo sapiens
gaaaaagtatgtgactgtgtgaggtaaggcatatgttaattagcttggttttacaatgtacacatattttaaaacaacatgttgtatacaataaatgtatactttttcccacatgttgattaaaataaataaggagggaacagaaaatagatatatatctagcaatatttcagaagctgaggtgatcctcttttatttaattagaaaaaaatttaaggtgattaatatgcatcaacaatcattagcataaaattatacctgcatttatgttatggcctaagttctctctacataagactataacattattcaatgaaggaccacaggggaggcaacacctttttttcgacccatcttaggttcaggccagggctctgtaactctgactgccaaaagacagatgaacaggagaaargcatacacactttacttagtaattttcacatatgcttgggagccctcacaagagaaatgaagacccaaagaagcagttagagtcaaaagcttacataccaggcaggacaaagggtag

SEQ ID NO: 621307 - DNA, 456 bp, Homo sapiens
gctgctgggtatatacccaaaagaaaggaaatcagtctagtgaagagaaatccgtacaattttaaataattaagaatataattagattgtaacacacagaataaatatcttaggggatgaatactccattttccatgatgtgattgttgcatgcctgtaccaaaatatctcatgtatttcataaaatatacacctactgtatattttatatatttttataaaatattataaaaataaaaaaagttaaagataggggaaaaactggaggcgaggcctaataataaaaggctatgttttcagtggcagccaagataactttatttggaacttttgtcatcacaggcctgattagaaagttgcatagtatcaactcagttmtcttatctgtattttgtttatgcatcctagaggaagatgcacattctagtgtgactaagctcataattcagtggctta

SEQ ID NO: 621308 - DNA, 405 bp, Homo sapiens
ctaagctcataattcagtggcttattgagtaccatcatagtaatgagagcagcagatatagcaggtcctctataaacagaagtgacttgaacaaaattatctatttatatttctttcctcactatactatgaattcctcaaagacaatgactatttcttatggacctttatatatctctagggcatracccagtgcctggtacattagatgctcaatcaatgttgattgaatggagctgaattgaccaataactactcacatgtgataattggtgctacactagcctataagaattaacacatcttgccattgcaggtatagatttctctatagtacccaattcaaccaagtgaaacagatcatttgtttgaaatacgtatctaaaatgataagggagacaagct

SEQ ID NO: 621309 - DNA, 469 bp, Homo sapiens
gcccagaacagaatctagctcatattaggctttcaatacaaatktgttgaaaaaaatcaaatgttttaccaatattttaattactatccctttactaattttacaaaaaaaaaaaaaaaaaaaaaaaaacaaccaaaaacaagaggaagaaaactcacttctgcctctcatcagatttctaaatagctaagctgactaattctacatttggctgtttacactaaattgatgaatcccattcatacaaagaggtaaaacaagatattcatgcttggtctaaaatactccacttaatcaatgtaaaggagtggtcacctggccatgtccagcctgaaagaaaattcatttattgttattttagtcaagttcaaagccctaggattcaagactctctgtattctgtcagcagaggtaattgcccactaaagccagcattcctactgagctgcctttagtgatgccaacagtg

SEQ ID NO: 621310 - DNA, 568 bp, Homo sapiens
agtgacggaatcctggataatcactgaagaaagagccaagagaatttgtcaaaggattgcattagaaagaaagaggagggtcagcaaaatcatccattctaagatgtctgtcagaaatgctttttcttcagtgccataaagaaatagcatttgaacattaatttcttcagcaaggccattgttttactttctgcagaaggggtacactcgccagcagttttgccatgagagtacaccgaacaaaggagacagggtcatttataatttgaygcatccaccttactgctgtgtccggtttccattggctggaatgggacctcatattctgtatttgtcctgatggctagcaacttagaactttttaaaagaggcaaaggcagaggagaacaaaggaaggaggaagtaacttgcggaatgctgagaaaggtaaaaacaccttcaaataaggaagaggaacaggatgacctaatgcttgcttggaccagtataagcatgccagggcaaatatttaggctaagctgtgagagctaagaacataaagtacattgatttctttattatggctagc

SEQ ID NO: 621311 - DNA, 383 bp, Homo sapiens
acataacacactttatctgtatggcagctgtaaatgaaaatattggaacaaactagttgtcttttataattcaccacctaaagcccaamccaaaaaatcaaatgcagttgaatctgcttggacaagttttatgtagttgcatttatgggttctgacccattttcagctgattttgtaaaactgttacaggacctccataggccctacatcctgattctaggtactttcctaatgcttccccacccatttttacattcccaggggcctttttggaaaaccagtccagtccaagatgaccacagctcagggcttgcctctgagttatgatttacaattacaggcaccctgggaatctagtcctaaatttaattagtaatttccac

SEQ ID NO: 621312 - DNA, 700 bp, Homo sapiens
cacatgcatgagagatctcagtgatgagtaactcgaaggggtagttagaacttgggcttttatagcatcttagcaaaagaataataaattttagagaagtgacaagacaaaagaaaaggactttgagtgtttagggcagcaaattatggaaaggtaaatatataggagtaaccaatggacgattagtaaagctgattagtaaagtcttttaagtaaatttctctgagctgttaagggttgagagtttatctctggtgattcactttctgtccttgatgaagaggggagtggggacatctttacaaatttatgtcctgctcttaggcaaatgagggaggacagagagcttttcttgtatctgcttcttctcacttatgctcagctcaaaataatcactatctggaagtggcatatttggggtggcctattctgccaccagtcattaccctgtagatgacagagtgcaaggtagcctagtggctaagaggacaaggttctgaagcaagtccaagtttgagcttcctccactacttaatgatagtagagccttgaacaattatttaacctctttttacctctgtttcttcrtctatataatggagataataataataaaagcatctcctttatagagccttttaataagaattcaaaacatttttaaacattcaaaacattttaaacaaatgttgtcacatag

SEQ ID NO: 621313 - DNA, 633 bp, Homo sapiens
gtgtccatttgaatgtgccagctatttcccattgagactgtgattctggttcaaaaactttcagcaaaacaccctatcttctacttcaatcaaaaatagtttgagaatacataggatacttggatagaatgagtggatcactttttcayggtgtctatgaattatttaggcggaggggtaaattctcttcagtgtgacctgaacttgtttacaaagatttttttttttatttttagagctgaagggcaattgattaaacatctagttcagccctgatccaatcctattttcacactgaagaaactaaacgcaaagagaggaagagactgcacaggattacaccagtagcaatagaactgattctagaacccaggggaatttaaaattgttaaggtggaattttatgactcagaccatgattttaaaagtatcttagataaggagaattgttctgaacaaactataaaacaaattatttaaaagttattctgaaaattaaaaagaaaaagtcccacagaagagctcctgctcactggataagccagcattgcactttatcctcaatttgctctagttatgggtatttactctccaaaacattggtggaatacattagaagcatatatttatctg

SEQ ID NO: 621314 - DNA, 580 bp, Homo sapiens
tattttcttaaaacaaaacaatatctaaagatagggaagacacagcctttggtgtaaaatggaagtgcactctgaagaggggagaggatgaactggcatttatgtctttcaggggccatcttagacgtgtatttagcaggtttggaggaagtctatgaatatttatgggggaagtcaacccctgtggcagtaggcaaacatacataacagaaatattgtgcttatttttgggtggagttttaacattaaagtaaggtgaaattttatgtcaaaatgtgaactaaagagcataaagaagtttgcacattctccatgagctggctgaaactgggttgaagttcgtggctgtttatcaggcaagaatgtttgtaaggtcagtctcctatccarttggagttgctagtggggccacaaggaggggtgggggcagttcagttggctggagctgggtggtccacccaggtcagttgggaaactcccagttgtagctgttttgaaggtgtttttaagaactagtatttgttcaagtacaggaaagaagaccttatggcagctggtaatataggggtacctgattaac

SEQ ID NO: 621315 - DNA, 579 bp, Homo sapiens
acatgcttcaattttgctcacaaaggtatactttaccaaattgctgtaagctattggtagcctaagaaaaaagaaaaaggttttcttaaatcttgaaaacattaaagaattagcaacgtttcaaacaaaaaggccatagaaacccatttttttcatctgttcattcactcccatgtaattaattcttgttctgyttgatgtgagcagtttcatgaaccaatcggtttcttcactagaagtctggaaattcttactcattccaatggcaaaatccttaaagttagaagcttgtacttgtcagtccttttcatatatctccttgaatacaaaacactttaaaattataattgcttgcaaaagctttcagtaaaataccagaacaaaactgtctatgaatgacaagatttaaaatggccatggtaaaagatctgataagagttcattacaatgcaattgataagaaaattttatcaattcagtgacatacaacattttaagataataactagaattatgactgaaagttatatcaagactatcagatttttaggaatttcacacaatttctggaacacatta

SEQ ID NO: 621316 - DNA, 579 bp, Homo sapiens
tacaatagacacactgggtaattgtcataatcctccactcaacccaacttcatctttggcctatggggtaaaactattatagtagggatagtcaggtgaaaatccctaaaatgttctcctaccctccttaacaataataaatactgtgaaaaaaatcttatcttggggtataggggagaaatgagtgcctttcttaaagccctaaagttgtcttgatcccaccacacstccatttaacttaccagtttggaccctgcaactaccagattggtcctacagggtgatggcagattattgcaaattcaactcagcagttgatcggtcgcatatactgtgctggaagacatatctttgcaagattagactaacacagcttcaaatacatgatatctgaccactgatcagttacatgtattcctattattttcatcttcatccaaaaagaggaacagaaagagtttgtgtttactttaaatggaagttagtatttgccattttgttccaatgttatgtcacctcctcctccagctgtcaaatattgaccagatgaacgtcctgtagaacatcacactggtctct

SEQ ID NO: 621317 - DNA, 576 bp, Homo sapiens
aagctgtctgctcataaggcaatagactttatctaaatttattctcaattatttggacatgcatccttttgcagttctgtcacttgatctttgtgatactatatgccactcttaaaagtttggttactggcattttgggctatttcactcaattctctaggggaatgtcatttcttcatttccaaatttgtaccaaggcaagtgattgaagttattaaaatgagttagagctgctaattttaaaagctcaactgcagagattttcatggtataagtccagaagtggttcagttgtgtaggagtttgcaactccatgtccatgtgcccctaaggatcagtgtataggcttcatggggtccaggaaccctcggaaatattgagtatttgtgcatctgttcattttttttctagatagcaagttgattactttgtcataktcaccataagattaagaatcataaccttgaagggaggcagcatacgaaacctgcatggagactttagtgtgaaaacttgtgttaattcattgacaaaggcctagccaatagtgactcagaggaatctgggtgccagtgc

SEQ ID NO: 621318 - DNA, 453 bp, Homo sapiens
tacctgtgatgatgagataatagcagccatgagcactccagggaggaagggggatgaatcattgaacaggcattattatcattaataataaactctgtgaataargtaacatggttttcatcactactgctattgcacagattgtagatttgttttcaaagtttaaattgatgactacataaaactaagaacagtgccaacagaagtaatgtttgtaagttaatccattgcaaaagcctggaaaaccagtctttgctaattgctccaatgcatggcctggatattgacatttagtgggtaactgctgaaatgaaataacaatattttccaaacagtgatttggagcctgaattgattcctgcacacccacttggagatgcattcggccgggggtagcagatgggtgaagatggtggttgccttccacctccgatatcctatccaaatcttaac

SEQ ID NO: 621319 - DNA, 453 bp, Homo sapiens
tacctgtgatgatgagataatagcagccatgagcactccagggaggaagggggatgaatcattgaacaggcattattatcattaataataaactctgtgaataaggtaacatggttttcatcactactgctattgcacagattgtagatttgttttcaaagtttaaattgatgactacataaaactaagaacagtgccaacagaagtaatgtttgtaagttaatccattrcaaaagcctggaaaaccagtctttgctaattgctccaatgcatggcctggatattgacatttagtgggtaactgctgaaatgaaataacaatattttccaaacagtgatttggagcctgaattgattcctgcacacccacttggagatgcattcggccgggggtagcagatgggtgaagatggtggttgccttccacctccgatatcctatccaaatcttaac

SEQ ID NO: 621320 - DNA, 643 bp, Homo sapiens
taggtaaataaatataaagaacagctacgtggtactttagtcatgccccacacatttatmcatggacacatcctacttggcagttggggactgaggacaaatccaggaggaatgattaaaacgaatggccacttcttactcctttttccatcatttcctcacccgctggtggaggtgtatcaatgtactatgtatggctaataactgggcccatctggaaagacaagcaaacataactggataccaataaaaacaaccccatctgatgtcaaaaattcttgggacccaaaacattcagaaggtcagaaggcatttaatgaaaatggcagggcagataagactcaagtttctcaaaagataaactgccaggaccagaagcaggtccagaatttacattagttaacagctcaacctttagagaaatagtgaaaggacagcagcttccccagtttaaaaaaatactatctgtctctctcaatacatagactcaaaggtgcaacaaaatagacacggctcagagaatagtgggatgtccaccctatttaaagagcttagggacaggcccaacctataaaaattcttctggaaggaagaaaacacacacacacaaactgcgaatactgcttaaattcccactcaccac

SEQ ID NO: 621321 - DNA, 643 bp, Homo sapiens
taggtaaataaatataaagaacagctacgtggtactttagtcatgccccacacatttatacatggacacatcctacttggcagttggggactgaggacaaatccaggaggaatgattaaaacgaatggccacttcttactcctttttccatcatttcctcacccgctggtggaggtgtatcaatgtactatgtatggctaataactgggcccatctggaaagacaagcaaacataactggataccaataaaaacaaccccatctgatgtcaaaaattcttgggacccaaaacattcagaaggtcagaaggcatttaatgaaaatggcagggcagataagactcaagtttctcaaaagataaactgccaggaccagaagcaggtccagaatttacattagttaacagctcaacctttagagaaatagtgaaaggayagcagcttccccagtttaaaaaaatactatctgtctctctcaatacatagactcaaaggtgcaacaaaatagacacggctcagagaatagtgggatgtccaccctatttaaagagcttagggacaggcccaacctataaaaattcttctggaaggaagaaaacacacacacacaaactgcgaatactgcttaaattcccactcaccac

SEQ ID NO: 621322 - DNA, 392 bp, Homo sapiens
ttaacagccccttgggtggctrgtgagttggaggactggtatgtggtggtaaggtcaggcctgcaaaggcacagtgaaactgacagtttgcacagtgttatttgtgtcttcaactggaaaaggtttggcttttttcccagaaaatgtttacagtaggcagtgaatccatcattgtgaccatacgtttaaaaacaaaatggcacaagcagctaccaaatcaagttctaaagaaagcaatgtgcctgtgtaattgccacttttatggactagtgcatttcacagttgaaatctactccccttggctggctctgaagactgagctcttttaagctgtagcaggagctgcagagtttgcacatgagccagatttgtaatgtgcagctctaaaatat

SEQ ID NO: 621323 - DNA, 473 bp, Homo sapiens
ttaacagccccttgggtggctggtgagttggaggactggtatgtggtggtaaggtcaggcctgcaaaggcacagtgaaactgacagtttgcacagtgttatttgtgtcttcaactggaaaaggtttggcttttttcccagaaaatgtttacagtaggcagtgaatccatcattgtgaccatacrtttaaaaacaaaatggcacaagcagctaccaaatcaagttctaaagaaagcaatgtgcctgtgtaattgccacttttatggactagtgcatttcacagttgaaatctactccccttggctggctctgaagactgagctcttttaagctgtagcaggagctgcagagtttgcacatgagccagatttgtaatgtgcagctctaaaatataatctgggttggtggggggtgaaggggagaagaaggatggaaacaccatgattttatgaagaatgatcagggcagtggtta

SEQ ID NO: 621324 - DNA, 473 bp, Homo sapiens
ttaacagccccttgggtggctggtgagttggaggactggtatgtggtggtaaggtcaggcctgcaaaggcacagtgaaactgacagtttgcacagtgttatttgtgtcttcaactggaaaaggtttggcttttttcccagaaaatgtttacagtaggcagtgaatccatcattgtgaccatacgtttaaaaacaaaatggcacaagcagctaccaaatcaagttctaaagaaagcaatgtgcctgtgtaattgccactttyatggactagtgcatttcacagttgaaatctactccccttggctggctctgaagactgagctcttttaagctgtagcaggagctgcagagtttgcacatgagccagatttgtaatgtgcagctctaaaatataatctgggttggtggggggtgaaggggagaagaaggatggaaacaccatgattttatgaagaatgatcagggcagtggtta

SEQ ID NO: 621325 - DNA, 485 bp, Homo sapiens
gctcttaacagccccttgggtggctggtgagttggaggactggtatgtggtggtaaggtcaggcctgcaaaggcacagtgaaactgacagtttgcacagtgttatttgtgtcttcaactggaaaaggtttggcttttttcccagaaaatgtttacagtaggcagtgaatccatcattgtgaccatacgtttaaaaacaaaatggcacaagcagctaccaaatcaagttctaaagaaagcaatgtgcctgtgtaattgccacttttatggactagtgcatttcacagttgaaatctactccccttggctggctctgaagactgagctcttttaagctgtagcaggagctgcagagtttgcacatgagccagatttgtaatgtgcagctctaaaatataatctgggttggtrgggggtgaaggggagaagaaggatggaaacaccatgattttatgaagaatgatcagggcagtggttactaaatct

SEQ ID NO: 621326 - DNA, 556 bp, Homo sapiens
ttagagcaagggactggggcatcctggtcatagtcagggccttggaccccaaattccagagaaacaaatcagtagattgaacaggcaacaaagctgagctgcagtccagaaagaaaggccagggcaggagcctgaaacatgggaaccctgtgggggcgtccggcgacaccttgctccaggtcccagcccacaccagtggaatccattttggagaggcttggccgggcgagtgcaaaagsccccattccagacactgttcccagccgctctggggtctgcagggcctggcttgtctctggtccgggtctcctaacccaggagggcactgacataggggcagcaggcaggacgggagggcagggcatgggcagccgctcagactttgcctcagcattcctcagccccccgggtccccggcttcagcttctccagggtcctgctcacggtggacaggctgctgcgggctcctgggggagagaacagggacgaggactgcctccgtagacaggtccccatggagttgtcagggtcagaggaactcagagggacccaaggc

SEQ ID NO: 621327 - DNA, 556 bp, Homo sapiens
ttagagcaagggactggggcatcctggtcatagtcagggccttggaccccaaattccagagaaacaaatcagtagattgaacaggcaacaaagctgagctgcagtccagaaagaaaggccagggcaggagcctgaaacatgggaaccctgtgggggcgtccggcgacaccttgctccaggtcccagcccacaccagtggaatccattttggagaggcttggccgggcgagtgcaaaagcccccattccagacactgttcccagccgctctggggtctgcagggcctggcttgtctcyggtccgggtctcctaacccaggagggcactgacataggggcagcaggcaggacgggagggcagggcatgggcagccgctcagactttgcctcagcattcctcagccccccgggtccccggcttcagcttctccagggtcctgctcacggtggacaggctgctgcgggctcctgggggagagaacagggacgaggactgcctccgtagacaggtccccatggagttgtcagggtcagaggaactcagagggacccaaggc

SEQ ID NO: 621328 - DNA, 631 bp, Homo sapiens
ccaggctgttcttgaaatcctggccttaagcaatcctcctcccttggcctccctaagcatggggattacaggtgtgagccacctcgctaggcccactgagggttgctgtttttaagagaaaacctcygcactttggccaggcctcctgaaggcgactggagatagcagcttagcccatgaggggttaacctgctgacctggccaagaaggcacctcggggagagccctcttctaaccaaagaaagggacaaagaactaactctgggtcatggtgttttggtggaggacacagaaacctcccttttgtctttccttccacagcacatgcagcacagagacagggctggaaggctgagcaagagtcagagctacagttggaagtattggaaagcggcagcggattctcggggtgatgggaaaagcaaaatctgcttcactaaaactccgtcggtgatcaactttttcagcagtcctccgattcccgactagaaggcaaaagcctggcccaggccacgggaggcacttcactaaagaagaaaaacctgagctccagcaagctcagtaacttcatcagtcacctaattgaacgagaacccagagcaactcagtccaggctgcacaaattgagtag

SEQ ID NO: 621329 - DNA, 556 bp, Homo sapiens
tctactccagtttttccccacccaacgctggtgctatctcgcctcctccagatatagtccagagggtgtctaagaggagagaggaaggagaggtgggaagaaaagatcgccattgagggcatttgttgcaacaaattgagagagtgagggatgatggtttcagagaagccctattgattatgctcttgaaaattttggtagtttggggtcaaagttatgctatgtatgctagaaaaccttgtggaaatttgatgtttgataaaaatatccaggcaatggtaatgattatgatcttaaaatggagtttagaggcaaaggcaagatcaaaaggtaatcaatctaaattccataatgaccatgtcagaaaggcttaaagagtggatagaaattagaatagggaccagtagtagcrttatgagaatgggttaataggaccaagtctgaagtcagcagatattccaaactactttggccttcatactcaaccgctttgtctctgtggacggcccttgaatagcccacagtctgttctctatggattgtgacacttagtgag

SEQ ID NO: 621330 - DNA, 428 bp, Homo sapiens
actatgggagactcacacacttctgccatataaacccaaacttccactaggctgtaagctctatgaagtcaggagcttgtgtactgttcattattgtttctccakgtcctggcacttagtgggcactcaaaatatgcttgttgataaataaaggattgaatgaagaatgaaagttgaaagacttctttgctttgtatattttctgtgtttattttcattttatcacccttaatttttaccaagtttttttgtaaattcagtgttgtctcatatgcgtaggggttaggtttacacaaatatgctcatttgctcagtagttgggcccgaggttaaaaacagcatatgggaagtgacatttcctcacagccagcaaggcagaaaagaagtatgaatggaagaaaaaggccccatagaaaagaagacaccca

SEQ ID NO: 621331 - DNA, 524 bp, Homo sapiens
aaattgtggatttcatggacatttattagttccccaaattaatacttttataatttcttactcctgtctttactgcaatctctgaacataaattgtgaagatttcatggacatttatcacttccctaatcaatactcttgtgatttcctatgcctgtccttactttaatctcttaatcccgtcatctttgtaagctgaggacgtatgtcgcctcaggacccggtgatgattgcattaactgcacaaattgttcataaagcatgtgtrtttaaacaatatgaaatctgggcaccttgaaaaaagaacaggataacagcaatgttcagggaacaagggagataaccattaggtctgactgcctgagagctgggtggaacagagccatatttctcttcttacaaaagcaaataggagaaatattgctgaattctttttctcagcaaggaacagccctgagaaagagaatgcgttcctatgaggaggtctctaaaatggctgctctaggaatgtctgtcttatacggt

SEQ ID NO: 621332 - DNA, 443 bp, Homo sapiens
tcagtctgtctagttaaatgttaatttcatccaagaaaaccctcacagaaacacccagaataatatttaaccaaaaatctgggcatstgtggctcagtcaagttgacacataaaattaaccatcacaacacccatcttgaccacattacttatttcaatagaaattattaatttaaggggaaaactagcaggggaaaactagcaggggaaacaggaaaaggaaaatgaagggcatgatatctcactgtaatattgtttatcctgatgtccaagagggatacatgattgcttataaaatcagctgtttgaattatgaaacaaggcatggtgataccactcaatttagtgtaaattttttttaagtcatgagagaaacagaaactgaattgaaaaaactgaaataccaagtgctattgcacggacggaccttctactatcacatc

SEQ ID NO: 621333 - DNA, 443 bp, Homo sapiens
tcagtctgtctagttaaatgttaatttcatccaagaaaaccctcacagaaacacccagaataatatttaaccaaaaatctgggcatgtgtggctcagtcaagttgacacataaaattaaccatcacaacacccatcttgaccacattacttatttcaatagaaattattaatttaaggggaaaactagcaggggaaaactagcaggggaaacaggaaaaggaaaatgaagggcatgatatctcactgtaatattgtttatcctgatgtccaagagggatacatgattgcttataaaatcagctgtttgaattatgaaacaaggcatggtgataccactcaatttagtgtaaattttttttaagtcatgagagaaacagaaactgaattgaaaaaactgaaataccaagtgctattgcacggayggaccttctactatcacatc

SEQ ID NO: 621334 - DNA, 515 bp, Homo sapiens
attgcttaggagtttgctcagaggttaaatccagctgtattcctacagattttttttaacagtaataagcaaataccacaaaataattagcacaaaataattggcctctatgtctgaaatcatcacagaggcttaaatgccactgctaggtggycaaaaatttatgttgaatgttctcgtggatgaattggctttatacccagagttagcagtgcaagcaaaccataaaaaaaaatgtactaaaccaccaactgacattatggaaataagaccctggctggccaaaaaccacagtgtatcaattagcaggattttagtagttggcagagagaactctggttctggaaacagaatgctacatgttttatgtagtcatgtaatatttcccttgtattcaaagatggtacataacacctgctgtgtgcatcgaggaagctcagattactgtgttaatgtttgcatcaactgagtttggaccgtctatccattaagtctggtgaatgaaatgactaatt

SEQ ID NO: 621335 - DNA, 612 bp, Homo sapiens
tcacttacggcagcagtaaacctggcaggacatcagtttcctaaagcaggtaaaattacatcctggaaaggtgtttggtgctcataaattcaggataaagatttttggatgccttttaaggaaaatttgtttgtttgctttgtttgttaaatccattaatttcacccttgaccactttgaaatcaggcagatcttattttccctgtagcctctgggaagttactggatcttcccgagtctcattttytctgcagtagatagaatggacaaagtagtcctggttttctggtattgctgtgaagattaaataagatgatattcataagccaccttgtacagtatctgcacctttgtggaataaatgtgataattaattctcttctctttcttaaattttaaggatgacattttctgatatttgcttcaaactctgagtgagaccctatgcaggtcccacaggtatgtaagcactaactgtctctcctaagtgactgggccactgtccttgcacagacctgcccatcttcccttactatgtttcagtaaagacaaataagactgaaggtaaagttaaggatgttttaccacccaattagcatttgtagctcatgc

SEQ ID NO: 621336 - DNA, 622 bp, Homo sapiens
tttttttagtggctctgagtttagttgctctcccaagaaaattgaggcacaacagaaagaacagctgtttttttttttttcattcatgctgtgctttttggctgaattcatcaaggcacagaaagatgaagtatactgtattaaactacagtaataacatgaagcaataatgtgggacagtaccacggtattataagcgagagaataatatgggcctataggttaaataactcttagcattcaaactccagaaattactctcatgggcattttgttaggtgaaagtgactctaaraaaaactgggatggtgtagactaggagaccatgtgaggcagactgggagagggtaatactaggtaagggttcctccatgccagctgcacagtaggaccacctagggagctttatgaaagtacgatgcctggatcccaacctcagagactctgatttaattgatctgaataatttttaaatagctcctcaggtaattctaatacgcagtcaggattgagaatcactgcatcaaattagcctccattatactagcgacagttctgaaaatccctgtgatgaggcatcaaaacagagggttttaaggggcagggatagatcagaagagtc

SEQ ID NO: 621337 - DNA, 696 bp, Homo sapiens
gcaagcaatgaatgttacatcccaggagcagagtctgagagaagacgggtagtcgtaaatcctgaaattacaacaattccatgtaattcatcagcttctgagtatctctcaagtgacatttattagtagaaagctttgtagaacagagcggtatgctggctagccaagttgattgcacttcgagggtgagtggattcctgaatcccctatttagatatagggctagaacaagattgaggagccagtgtgaataytttcatctggcatttcttttctctactgagtgaattcctttctccaactcccagaacattgttcaatgaggtaataaaaactacaattccagaaattgtagttggatactactttgataataatatcatttgaatcttagcctttatttacaacacttcatttataggcactatagttcccagaatgcaccagcaacgtcagtttcctttaccccacaattttgcttcaatatttttttggaatttgcattttttacccatatgttaaaaatacctgtctggatgaaggaaaattgaatctgtgttcagcctatattacaaagcaccattttctgtactaagggttggactgtatcccagatttctagttggactcatgtctgaatcaagcagcaaatggttaagaaggcactcatttttttcccctacggttttgaagttg

SEQ ID NO: 621338 - DNA, 568 bp, Homo sapiens
aataataggatcatttggcacagagcttctaaatcccttggaatttcctgtgtgacaagagcatcttttgttctaaacaggcaatgctggatgagctcctggagagcctcaggatgggggctggttgccaacagaaccaaccatgtgrttagagggttggaaatttcaacctgagtccctgacctccaaaggaggggagaggggctgaaggttgagttgatcaacaatgaccaatgatataatcaatcatgcctatgtaaggaggcctccataaaaacccagaaggatgaggttcagagagctttggaagtgctgaacacatggtaatccctcctaaagggtggcacacccagatggggtgtggaagccctgcccccttcccacatgccttgccctttgcttctcttccatctggctgttcatctgtattgttcatagtgtcttttataataaatgagtaaacataagtaatgtgtttccctgattactgtgagctgatctagcaaattagtcaaacctgaggaaggtgtcatgggaatccccaattcacagccagttgattagaagt

SEQ ID NO: 621339 - DNA, 542 bp, Homo sapiens
agctggaatgaggctgtttgggaagcctcagtggggtacagaagacacgcaaggtgttgacagctgcagcaagcagcagcagtgggagctgcacacttagctgcactggaagcttgagccctttcagtagctcttgctcagctttcctgaccctatactctgctatggggagacaagtggagatcccctctgaccagatcaccttctgctgcctgtcactcaaaatgagattctttatgttgctttttttctttcttttttcctttttattaatgtctgtgatgtattttttcctaaaaatagttttattgagatatgattgacatacaaaagctgcccatatttaatgtakgcaatttgatgagtttagccatgtgcatagatccatccataaagccataaccaaaatcaaggtaataaacatatccatcaatttcaaaactttcctcttgcccctttgttttgtttctgtttgttttgttgtggtaaaaatgagagggagaaatggggacttgttcaataaatatacaaattcagttatg

SEQ ID NO: 621340 - DNA, 580 bp, Homo sapiens
tgtaaattttagaagttaatttactaagttaaagcataatcagccatataagtttaatttgttaattactcattagcaaattactactttgaaaggttatactaacttatatttgcttcagtggtggccagttgtgcacacccttgataacactaattattgttattttcaacctttattaaattttaggaacaaaaggcatatctttttctaaattatagttcttaatttattactgtttgaatatttttgcttatgtttaaaagccatttgtatttaccttttggggaatctccatattcttttttctcatgaagttcttttttgtttgctatatatactattaatattatcctaataatattattaataattwttacatattatacataatttaacactatatattaatatattgctatttatcagggacactattttttctatgtatttacagtatttccctagttatttgtttggctcaaacctgtctttttaatgctaagattagaatgacctgttattcctagattacaagcatatttttctaagaattttttcagttattttaaaattttat

SEQ ID NO: 621341 - DNA, 566 bp, Homo sapiens
ggtaatcagttgaatgctgttgaacaagatggataaggaaaagaaaatatttgaaaagtatgcagaaccagaaccttttggtgagaccagactgtgtgcataaatatcaaattagggctagtctgcaggtcaggccacttcttttatcaccaagatgacctgcatcactgcaaacatgatgcagtggggggcctgtgtttattgcttgctgtgttaacagcaagatttgygtctccggcaagactaatttaattggttcatttactcatttcacaaatatttgagcgccaagtatgagtcaggcactattctaggctctgggaaatcagtgatgacaaggaccagtccgtgtgctcaggaagagagcatcatgttggaagaaatggacaattaataggttgataggtacatatgcaatgtaatttcaggtgcataagactacaaggaaaaataaagcaagactaaatggaaggtgacagggagtgaaagagctatttcagaagaagcatttggggaactctctaaggggattatacttgggcaaagggctaaatgaagtgaagaag

SEQ ID NO: 621342 - DNA, 566 bp, Homo sapiens
ggtaatcagttgaatgctgttgaacaagatggataaggaaaagaaaatatttgaaaagtatgcagaaccagaaccttttggtgagaccagactgtgtgcataaatatcaaattagggctagtctgcaggtcaggccacttcttttatcaccaagatgacctgcatcactgcaaacatgatgcagtggggggcctgtgtttattgcttgctgtgttaacagcaagatttgtgtctccggcaagactaatttaattggttcatttactcatttcacaaatatttgagcgccaagtatgagtcaggcactattctaggctctgggaaatcagtgatgacaaggaccagtccgtgtgctcaggaagagagcatcatgttggaagaaatggacaattaatargttgataggtacatatgcaatgtaatttcaggtgcataagactacaaggaaaaataaagcaagactaaatggaaggtgacagggagtgaaagagctatttcagaagaagcatttggggaactctctaaggggattatacttgggcaaagggctaaatgaagtgaagaag

SEQ ID NO: 621343 - DNA, 580 bp, Homo sapiens
tcagggtaaatggggtatctatcacctcaaactgtgtcctttgtgttacaagcaatccaattatactgttattttaaaatgtacaattaaattattactgactgtagtcaccctgttgtgctattaaatactagatttttttcaacttttatttttatttcaatagttctttgggtaggtgctttttggttacacgaataagttctttactggtggtttctgagattttagtgcacccatcacccgaacagtgtacattgtacccagtatgtagtcttttatccctcacccccctcccaaccttycccctgattccccaaagtccattatatcagcattatgcctttggatcctcatagcttacttcccacttgtaagtgagaacatatgatatttgtttttccattcctgaattattatacttcacttagaataacagcctccagctccatccaagttgctgcaaaagacattatggctttttatggctgagtagtattctgttcatatatatatatatatatatatatatataaattttctttatccactcattggttgaagagtacttaggttggtt

SEQ ID NO: 621344 - DNA, 580 bp, Homo sapiens
ggacaattaataggttgataggtacatatgcaatgtaatttcaggtgcataagactacaaggaaaaataaagcaagactaaatggaaggtgacagggagtgaaagagctatttcagaagaagcatttggggaactytctaaggggattatacttgggcaaagggctaaatgaagtgaagaagtaaaatacaagacctgggggaattgcaacaagaaatgctgttggctctacctcccaattatatacagaatatacacacttctcccaaccttcatggccaaatctctgaccccattagcattaattccttattgtgggtcacccaatggcctccagaccaatatccttgctttactctctcttccctcccatcacacacagtctattcttaacacaatgtccagaacacatctttaaaattctgtcatttaatgccattttggtgctaaaaatcctgaatggctccctattttgttcagcatcaaatttcaagttcttaccatggcctaggaggactgatgagctctagttatttcctgtggatctgtgaacaggatgagtgctgtgtgcaatataggg

SEQ ID NO: 621345 - DNA, 580 bp, Homo sapiens
ggacaattaataggttgataggtacatatgcaatgtaatttcaggtgcataagactacaaggaaaaataaagcaagactaaatggaaggtgacagggagtgaaagagctatttcagaagaagcatttggggaactctctaaggggattatacttgggcaaagggctaaatgargtgaagaagtaaaatacaagacctgggggaattgcaacaagaaatgctgttggctctacctcccaattatatacagaatatacacacttctcccaaccttcatggccaaatctctgaccccattagcattaattccttattgtgggtcacccaatggcctccagaccaatatccttgctttactctctcttccctcccatcacacacagtctattcttaacacaatgtccagaacacatctttaaaattctgtcatttaatgccattttggtgctaaaaatcctgaatggctccctattttgttcagcatcaaatttcaagttcttaccatggcctaggaggactgatgagctctagttatttcctgtggatctgtgaacaggatgagtgctgtgtgcaatataggg

SEQ ID NO: 621346 - DNA, 586 bp, Homo sapiens
ttttattgcaatataagtagcctaagctgactaattcaggaatcttgaatgattatttttgaagtcagagtaaaagacagaaaggtataaatttaaagatgaaggacaaaatagatgtgggatagatagagtgaattcaaaacacatgcgaaaggtgttcagaagtgtatattaattggattggaaatacatgaagagtgcagattaatcaggggagaatttcattctttacaattatacatgtttcctttgaggaatgtgtcaccatttatgtgtcctcttaatttatttcaaygcagttttgcaaatttcttcctgcagttcctgaatatttttgcattatttaaatgaaagatgttaattttaaatatttatatttttaaaattcaccaaaatcgattttcaaattggtatgttcagattgtaacttttttttttttctggactgtccttcaagcttctatttgcagactctcaaactttttaagtatgatgttataatcaattgacaagtttgttaaagttagaaactcctgggccccacctctttagttgacttggatgtaacctacaaatctatagtttt

SEQ ID NO: 621347 - DNA, 548 bp, Homo sapiens
gaaacattttgctttcaagtggtttccaaaggtttcagctagtttttttttctttctttcaaatggtgagaacatcccaacattagaatcagaatttccctctacttttcagacagtcaaatcctcacccttcaaaaaggcaaccagctcttaaactgaaaattaaattaagctttgtaagggcagaaacccttttttttttttttttttttttttaracaaagtctactcttctaccaggttgaagtgcaatggcacaatctcagcttactgccattctgcctcccgggttcaagcgattctcctgcctcagccacccgagtagctgggattacaggcacgagccaccaggcctggttaatttaatttttgtatttttagtccagatgaggttttgccatgttgcccaggctggccttgaacttttgagctcaagtgatccgcccgccttagcctcccaaaatgttgggattgcaggtgtgaaccactgtgcccagctaaggaagttttatttcttgtttacctccagtcctcagtgtttagaacga

SEQ ID NO: 621348 - DNA, 575 bp, Homo sapiens
ggaaaattatagttttcaaaataattttgaaatgtggcttgagataatccatcrccttcctcctttaatggccccctgtccttggatattcagaaaaccaaagccccctgctgtggtctgaataagtcctccaaaattcatatgatgagaattaatcaccattgtgatagtattaagatgtggagacttcaggagatgattaaaccactaaggcagagctctcgtggatgggattagggccttcatgaaagagcttgagggagctgattcccctcctgtcccttctgccatgtgagatgcagcacttgtcccctcaggaggatgcagcagccagaagccgtcctggaagcagagagcagccctcaccacacacggagcctgccacaccttgacctggccttcccagcctccagtactgtgattaacaaatttctgttttttcataaattacccagtctcagtattttgttataccaacacaaacagactaagacaccccctcattttctgaatggaaaggtattatatatgaatgaccatttcagagtctcgatctccataaaaaggtgcacaag

SEQ ID NO: 621349 - DNA, 575 bp, Homo sapiens
ggaaaattatagttttcaaaataattttgaaatgtggcttgagataatccatcaccttcctcctttaatggccccctgtccttggatattcagaaaaccaaagccccctgctgtggtctgaatawgtcctccaaaattcatatgatgagaattaatcaccattgtgatagtattaagatgtggagacttcaggagatgattaaaccactaaggcagagctctcgtggatgggattagggccttcatgaaagagcttgagggagctgattcccctcctgtcccttctgccatgtgagatgcagcacttgtcccctcaggaggatgcagcagccagaagccgtcctggaagcagagagcagccctcaccacacacggagcctgccacaccttgacctggccttcccagcctccagtactgtgattaacaaatttctgttttttcataaattacccagtctcagtattttgttataccaacacaaacagactaagacaccccctcattttctgaatggaaaggtattatatatgaatgaccatttcagagtctcgatctccataaaaaggtgcacaag

SEQ ID NO: 621350 - DNA, 575 bp, Homo sapiens
ggaaaattatagttttcaaaataattttgaaatgtggcttgagataatccatcaccttcctcctttaatggccccctgtccttggatattcagaaaaccaaagccccctgctgtggtctgaataagtcctycaaaattcatatgatgagaattaatcaccattgtgatagtattaagatgtggagacttcaggagatgattaaaccactaaggcagagctctcgtggatgggattagggccttcatgaaagagcttgagggagctgattcccctcctgtcccttctgccatgtgagatgcagcacttgtcccctcaggaggatgcagcagccagaagccgtcctggaagcagagagcagccctcaccacacacggagcctgccacaccttgacctggccttcccagcctccagtactgtgattaacaaatttctgttttttcataaattacccagtctcagtattttgttataccaacacaaacagactaagacaccccctcattttctgaatggaaaggtattatatatgaatgaccatttcagagtctcgatctccataaaaaggtgcacaag

SEQ ID NO: 621351 - DNA, 575 bp, Homo sapiens
ggaaaattatagttttcaaaataattttgaaatgtggcttgagataatccatcaccttcctcctttaatggccccctgtccttggatattcagaaaaccaaagccccctgctgtggtctgaataagtcctccaaaattcatatgatgagaattaatcaccattgtgatagtattaagatgtggagacttcaggagatgattaaaccactaaggcagagctctcgtggatgggattagggccttcatgaaagagcttgagggagctgattcccctcctgtcccttctgccatgtgagatgcagcacttgtcccctcaggaggatgcagcagccagaagccgtcctggaagcagagagcagccctcaccacacacggagcctgccacaccttgacctggccttcccagcctccagtactgtgattaacaaatttctgttttttcataaattacccagtctcagtattttgttataccaacacaaacagactaagacaccccctcattttctgaatggaaaggtattatatatgaatgaccrtttcagagtctcgatctccataaaaaggtgcacaag

SEQ ID NO: 621352 - DNA, 632 bp, Homo sapiens
aggctttttattgttttctgtccatcctccactgaaatacaattaaaagggcaaccaaggatcctgaataaattgtgctagggttgaggggagagaaagcagagggggcgctttgtcggtggattagcttgtttacgacagagctaaaaacattttgtttcaagctgagtgttatgcatttgtcaataaaaccgggcttggaaagggcaaaaatcagcctgcttgtcacaaagtccctgaatgcttaagaatccagccccagcagaggggcttgcaaatgtcggtactcatcccaataacactcctgctctggccactcagtgggaaggagatgtataaagctttgctgcagcagaccccgagatgatgacttgaattcaagtagttatcccagaatgcaycggtacgcgagtgaggaaatagataaggaacgaagtcaatacaggctgtgttaatgagcaggttgcatctataggcaaccaggtctcagtctggctggggatctctgggggacagcgtggaacatgcctcaaagttgtcccactgaagaaaacagggagctccagtagatatctaccaaattccatttgttattggcacagggttttgcctaggggttcagattccccaga

SEQ ID NO: 621353 - DNA, 632 bp, Homo sapiens
aggctttttattgttttctgtccatcctccactgaaatacaattaaaagggcaaccaaggatcctgaataaattgtgctagggttgaggggagagaaagcagagggggcgctttgtcggtggattagcttgtttacgacagagctaaaaacattttgtttcaagctgagtgttatgcatttgtcaataaaaccgggcttggaaagggcaaaaatcagcctgcttgtcacaaagtccctgaatgcttaagaatccagccccagcagaggggcttgcaaatgtcggtactcatcccaataacactcctgctctggccactcagtgggaaggagatgtataaagctttgctgcagcagaccccgagatgatgacttgaattcaagtagttatcccagaatgcaccggtacgcgagtgaggaaatagataaggaacgaagtcaatacaggctgtgttaatgagcaggttgcatctataggcaaccaggtctcagtctggctggggatctctgggggacagcgkggaacatgcctcaaagttgtcccactgaagaaaacagggagctccagtagatatctaccaaattccatttgttattggcacagggttttgcctaggggttcagattccccaga

SEQ ID NO: 621354 - DNA, 506 bp, Homo sapiens
atctggccccagaactggaggaagtccaaatccagatctcctggagagcaaggaatgcacaccctctgtatgagagatttcaattaataggccatggacctcagcttactagagttgcattttatgtggcagagagagagagagaaaaagagagagagagagaaagagagaaagtatgtgagtaaataaattacttgcaatgtatacaaatctacattattcatataaaaatctagatttctagcttctgttttaaaaaatctgatgataatgcagagactgcctttacacgtgactgcattacctgggaggtaagtagcaaattcccttatggatgggacatggacttcctttgggcacagccccatcactccctaaattcttcccctgccactgagactgtcagttgtatttaccagagtgcttttgcttttgcttttcttatattctgcttcactcatttacattcccygcctaactgttgtcaacctctgcatgggtagccc

SEQ ID NO: 621355 - DNA, 505 bp, Homo sapiens
cccttccctggacaggaaatttcttctcaatacctaactaaatctagccaattctcagaatgtaggcaccttttttacatcttccaagaagtctttctcattattcttcctaactactacatttcctgaagttacgataatagatggaaaaagaccagtagaaatgattgcatgtttatccggaaaattgagaatgggattgtgggtctttatgacaatttcaacaagtaggtggaggcacaaaaagtgaccaaaaaaaaaaaaaaaaatctgtgtgaagctaccatctgtgctgcaaagctattccctctgaacttgctgaaccactttctcagactctactgggctgaagtagagacattcacggatttaaaaaacaatgtttsaggcagacaaagaagcaagagaaaataacagaaaagatagctgcatattttagcctactggttatctgttgctgcgtgataaactaccccagcacttaatggtctaaaacagcaggtgt

SEQ ID NO: 621356 - DNA, 535 bp, Homo sapiens
ctgtgaaaactactgccctattttattaaaagacagcaccctgcagacagtctccaggcccaaatctgggcatcatgtgaggcaccccagtcatccttacatgtctctcctccatgagagacatagtacccagaaggtaccccccacagcccattggtcacattacttctggtctatttctcaagtttccctcacctaatttttgctgtcatcactgtttagatgggtggcttgcaacgcgtggtctagggattcctcaggctctgcaagaccatcttatgaggtacaaagggtcaagaatatgttcacatttttatagtcacactgccattttcrttttcactcttattctttcacagctgtacagtggggttttctagaatgatgagtgatggcatcaattgctctgatggcaaatgaaatggatgcttgtgtagttgtgtgttttcattttcttttagttttaatgctcaatatgttaaatattgatagatgtaattaaaaccttgatatttttaagagtgcagtggggtcc

SEQ ID NO: 621357 - DNA, 600 bp, Homo sapiens
attaacttggctttaaatgttccagctccctttgctcaggaaagctcatgaaaaagaaacactaaaattaagkctaatgattatagagaaaaaacatgtagtacacctcacagataatacatgagactagcttcatcttccttctgtaacacgtttatgatgaacagaacacaacctttttctggatggcattttcagctgatgtgtcacagcatgaaagggtctaaagattacatgtacttcccattcttagcttgttataaggcaggaggaacagaggatgagggattttgtggctgtgatttttacatgaagagcagggatgggtgttaggtccctagcctgatatttaaatctaagattacctggaaactaagcaggagaaagaaaaaagcaggctatattataagcacagccaatatcaaataaactttgaaagacttctctggaaatgctgttaaaattcagctcaaacctttatttgtttatttgtttgatttttccctgagacggaggctacaagaagcagaaaagcaaataccctatgtgatgcttgtatttgagaactacagagagaggttaactgatgaagttcaagtg

SEQ ID NO: 621358 - DNA, 600 bp, Homo sapiens
attaacttggctttaaatgttccagctccctttgctcaggaaagctcatgaaaaagaaacactaaaattaaggctaatgattatagagaaaaaacatgtagtacacctcacagataatacatgagactagcttcatcttccttctgtaacacgtttatgatgaacagaacacaacctttttctggatggcattttcagctgatgtgtcacagcatgaaagggtctaaagattacatgtacttcccattcttagcttgttataaggcaggaggaacagaggatgagggattttgtggctgtgatttttacatgaagagcagggatgggtgttargtccctagcctgatatttaaatctaagattacctggaaactaagcaggagaaagaaaaaagcaggctatattataagcacagccaatatcaaataaactttgaaagacttctctggaaatgctgttaaaattcagctcaaacctttatttgtttatttgtttgatttttccctgagacggaggctacaagaagcagaaaagcaaataccctatgtgatgcttgtatttgagaactacagagagaggttaactgatgaagttcaagtg

SEQ ID NO: 621359 - DNA, 509 bp, Homo sapiens
taggctataagaaaatataatgatttctactatataaatgtacagctatcatactatttttgaggagctctagtcatcctaggacttatgctttaggacagatgagtaaatcacaatgatgaaattatatggaatttcttaaccaaaatgttcgaaaaaattccaacactttatcttgtttttgaaaataaaccaggarggaaaactagctttaaaatgcggatagaaactcactcttttcttatgtcaacttcaacattaagcactgtacagttagaaacaggtaagatagccaagaagctgacaattctctgaatatctgaatattgcatttgtatttttactatctttaagaaagaatttcagatttagcaagaatccagaaaaaatgcatttacttatattaaataaggtcatgagggtggggtctaatctgatagggtcagtggcccttaagaagaggtcactccaaatgatgagaacacatggacatatagaggggaacaaca

SEQ ID NO: 621360 - DNA, 602 bp, Homo sapiens
tcaatactttcagtagaggaaatgaaagaaaacatgcagaagaaaaataaaacatgttttaaagtcaatagtatagtgaagtgttgtgaaatgtcaaaatattaaaccacaaagaaaatgagataatggcgagataatgacaataacatttttttaaaagctaaattactaaaaatcaaatagtggtaaacagtaagtgcttaaaattaaataggtgacaggtggttgaaagcaaaacrttaaatgaggcagctggccaacgtgcaaattttaacagcttactagtaggataaaaaaaataaaaacaagacaaggatgtgttattttagtttctttctatggaagttgatggaagccatgagtatgggctctatggattgagggagctgggacagagctcagtttattgaaataagaaaggggtgaggaagaacagtgaagtcaacagcatgaaggctcaaagctgcataaaaattagtttgcaagaatggaagtttcagtagctagaatagaaaacacaagtatccacaggagaatttgatacagaacagatatgtctgccagcaggtgttattaaatagtcttctctgtggtatgaaatg

SEQ ID NO: 621361 - DNA, 602 bp, Homo sapiens
tcaatactttcagtagaggaaatgaaagaaaacatgcagaagaaaaataaaacatgttttaaagtcaatagtatagtgaagtgttgtgaaatgtcaaaatattaaaccacaaagaaaatgagataatggcgagataatgacaataacatttttttaaaagctaaattactaaaaatcaaatagtggtaaacagtaagtgcttaaaattaaataggtgacaggtggttgaaagcaaaacattaaatgaggcagctggccaacgtgcaaattttaacagcttactagtaggataaaaaaaataaaaacaagacaaggatgtgttattttagtttctttctatggaagttgatggaagccatgagtatgggytctatggattgagggagctgggacagagctcagtttattgaaataagaaaggggtgaggaagaacagtgaagtcaacagcatgaaggctcaaagctgcataaaaattagtttgcaagaatggaagtttcagtagctagaatagaaaacacaagtatccacaggagaatttgatacagaacagatatgtctgccagcaggtgttattaaatagtcttctctgtggtatgaaatg

SEQ ID NO: 621362 - DNA, 566 bp, Homo sapiens
aaacttctcacactgttactaagagttatgtattcccctgctataattataactttgaacacactcttcttgtgcctgattaaattcaagtactttttttcatcaggtttgccttccaggttatctaaatgggcttcccaaaaggagaagcaatcacagtgcagaaggttttttgttgccttttttggtaactggcttaagagaaaagattttacattttatcaagaaaatttccatgttgtctttattcaatttttttattacttaggaggactggaatttaaaaaattaagattcttacatccatataactttctattttgcctttgaggttttaaaattatcactattgattaaatgaatgactactatttataatatttatatatataaaaatttataataacytgtgatttgatcaaatattttgagccttttaacatctttgataaacaccatcaaaatcaaaattctaacctaaatttctgacctagacttacactggggacttatcaaaaccataaaaattaatcactgcaaagttatagaattgttttacaacttcc

SEQ ID NO: 621363 - DNA, 510 bp, Homo sapiens
agacgtgagtcactgcaccaggtcctatcactatggtaactttacatttatctggattcctttttatttttttttttttagacggagtctcgctctgtcatccagcctggagtgcagtggcaagatcgtggctcgctgcaacctccacctcctgggttcaaatgattctcctgcctcagcctcccaagtagctgggattacaggcatgcaccaccactcccagctaatttttttgtatctttagtagagacagggtttcaccatgttgaccaggctggtctcraactcctgacctcaggtgatccacccgccttggcctcccaaagtgctgggattacaggcgtgagccaccgagcctggactatattattttttattactttttttagtatatccttatctctggaagggtatgtcctctctcttatacttccttatctttttaaaacttatttatttatgaacacttattcttcaatttacattttagaataagtttgctgaattcct

SEQ ID NO: 621364 - DNA, 471 bp, Homo sapiens
ccatgaatactcctttttgccccattgtataggaaaacattctacttgaacttgctaccgctctagccaattccatagtctcctttaaccttgctcatccattgacaggagcaaccagaagtgaccaggtaagaatttatgctcccatttcagwgaaaacattgtttctcttggtgggaactttcttctcttggggactctaactctaatatagtagaaacaagagtcacagaaagtgagggtgtcactggggacttgtagaaggtattgccctctctttttggggtcatacaatcaggctatgggggaaatagcagcaaatattaagtaccagctcatagcatatgtttcatcctgaagtactgcaccacactaccgtaaaggacaaaccaggctgttctaataacacagaatacagtggctcaaacaagatataaattattttttctcttgcatctaggaaagacagat

SEQ ID NO: 621365 - DNA, 587 bp, Homo sapiens
agggtatggaccacacaggtgaccaaacttccaccctcctctatccagtttatgctttcattttgggggccaacccacatagccctgttccccattctggcctggggaagggtttggaataagatgagcaaagaagcagataatgtatatcagccccartggagggcagacggggaagataacttccctccagccatatggctccagcctccctccctcaaaggcgggataggcccaagttcaaactttctctttgtacatctggcaggcatgtgcttagagagcaggccctgcagcttctggaagccagagttctgttagtgtgggaggcctcccagggatattcagttttcatgtgcacatctgcataaactgtctgtgcatcattagaaatctttattggtgcctagccctgtgctagcctttgtccaatacagagtggtataagatctcgagctggcctcacctatctctctgcactgaactaagtcatgctccgctgttctctctcttgtacaaaagacggcagacagcaaaagggactgcagttagtaggtgcaactggggcttaggagagagggaaaagt

SEQ ID NO: 621366 - DNA, 260 bp, Homo sapiens
gaggtggattagtaaaagaggaaagcctcttgcagttgagatagaggaaggccactgtctcctgcttgcccctgggaactgaatgtctccrtataaaacgcgattgcacatttgttcaattctgagataggagaaaaaccgccctatggtgggaggtgagatatgtttgcagtaatgctgccttgttattctttactccgctgagatgtttgggtggagagaaacataaatctggcttacatgcacatctaggcatagta

SEQ ID NO: 621367 - DNA, 260 bp, Homo sapiens
gaggtggattagtaaaagaggaaagcctcttgcagttgagatagaggaaggccactgtctcctgcttgcccctgggaactgaatgtctccatataaaacgcgattgyacatttgttcaattctgagataggagaaaaaccgccctatggtgggaggtgagatatgtttgcagtaatgctgccttgttattctttactccgctgagatgtttgggtggagagaaacataaatctggcttacatgcacatctaggcatagta

SEQ ID NO: 621368 - DNA, 260 bp, Homo sapiens
gaggtggattagtaaaagaggaaagcctcttgcagttgagatagaggaaggccactgtctcctgcttgcccctgggaactgaatgtctccatataaaacgcgattgcacatttgttcaattctgagataggagaaaaaccgccctatggtgggaggygagatatgtttgcagtaatgctgccttgttattctttactccgctgagatgtttgggtggagagaaacataaatctggcttacatgcacatctaggcatagta

SEQ ID NO: 621369 - DNA, 621 bp, Homo sapiens
gaagtagcgaaggagtgccatctggtggatccttctggtagtgacactcagacctgggccaggggccttgagacaatttacttgactggaaaaatctgaataaaaaaaagatgcttcaatttgtattcatttaatgtatatgaatgtgcacatgtatgtgtagcatatattagtatgatatctatatgtaaaatatagtagttatgtgtgcattgtatgtatacatgtatacatctaatttcatatrtatgtatgtggatatattatacatgaagttttttttgagatggaatctcactctgtcgcccaggctggattgcagttgtgctatctcagctcactgcagccgggttcaagcgattctcctgcctcagcctcccaagtagctgggattacaggcgtacaccaccatgcccagctaattttttgtatttttagtagagacgaggtttcaccatgttggccaggctggtcttgaactcctgatctccagtgatctgcctgcctcggcctcccaaagtgctgggattacaggcgtgagccaccatgcctggcctacatgtaggttttgtatgtatgtatgtgtgtgcaaaagtcctcaaccctggggaaaaaaagagg

SEQ ID NO: 621370 - DNA, 621 bp, Homo sapiens
gaagtagcgaaggagtgccatctggtggatccttctggtagtgacactcagacctgggccaggggccttgagacaatttacttgactggaaaaatctgaataaaaaaaagatgcttcaatttgtattcatttaatgtatatgaatgtgcacatgtatgtgtagcatatattagtatgatatctatatgtaaaatatagtagttatgtgtgcattgtatgtatacatgtatacatctaatttcatatgtatgtatgtggatatattatacatgaagttttttttgagatggaatctcactctgtcgcccaggctggattgcasttgtgctatctcagctcactgcagccgggttcaagcgattctcctgcctcagcctcccaagtagctgggattacaggcgtacaccaccatgcccagctaattttttgtatttttagtagagacgaggtttcaccatgttggccaggctggtcttgaactcctgatctccagtgatctgcctgcctcggcctcccaaagtgctgggattacaggcgtgagccaccatgcctggcctacatgtaggttttgtatgtatgtatgtgtgtgcaaaagtcctcaaccctggggaaaaaaagagg

SEQ ID NO: 621371 - DNA, 621 bp, Homo sapiens
gaagtagcgaaggagtgccatctggtggatccttctggtagtgacactcagacctgggccaggggccttgagacaatttacttgactggaaaaatctgaataaaaaaaagatgcttcaatttgtattcatttaatgtatatgaatgtgcacatgtatgtgtagcatatattagtatgatatctatatgtaaaatatagtagttatgtgtgcattgtatgtatacatgtatacatctaatttcatatgtatgtatgtggatatattatacatgaagttttttttgagatggaatctcactctgtcgcccaggctggattgcagttgtgctatctcagctcactgcagccgggttcaagcgattctcctgcctcagcctcccaagtagctgggattacaggcgtacaccaccatgcccagctaattttttgtrtttttagtagagacgaggtttcaccatgttggccaggctggtcttgaactcctgatctccagtgatctgcctgcctcggcctcccaaagtgctgggattacaggcgtgagccaccatgcctggcctacatgtaggttttgtatgtatgtatgtgtgtgcaaaagtcctcaaccctggggaaaaaaagagg

SEQ ID NO: 621372 - DNA, 621 bp, Homo sapiens
gaagtagcgaaggagtgccatctggtggatccttctggtagtgacactcagacctgggccaggggccttgagacaatttacttgactggaaaaatctgaataaaaaaaagatgcttcaatttgtattcatttaatgtatatgaatgtgcacatgtatgtgtagcatatattagtatgatatctatatgtaaaatatagtagttatgtgtgcattgtatgtatacatgtatacatctaatttcatatgtatgtatgtggatatattatacatgaagttttttttgagatggaatctcactctgtcgcccaggctggattgcagttgtgctatctcagctcactgcagccgggttcaagcgattctcctgcctcagcctcccaagtagctgggattacaggcgtacaccaccatgcccagctaattttttgtatttttagtagagacgaggtttcaccatgttggccaggctggtctygaactcctgatctccagtgatctgcctgcctcggcctcccaaagtgctgggattacaggcgtgagccaccatgcctggcctacatgtaggttttgtatgtatgtatgtgtgtgcaaaagtcctcaaccctggggaaaaaaagagg

SEQ ID NO: 621373 - DNA, 616 bp, Homo sapiens
gtctcacagctgaggcagaaatttaaaacaaataaataataagtactgcatttattcactccaagaaaagtaaaagctaaggcccagaatgtggcaagrcaagggttaaaaagaagagaacaagttttcctctgcctagcaagcttacttcaaggacagttataagataacgctgtccaaatagccaaggtcaaaggaataggctccagacacccctcccttccagagcaaggttgaaggaagaaaaagagaaagattcttttactgttactctttccccaggcctcttaagcattatttacaaatgtctgtatttagccagtttttgtttttctttcgatgcaactacaaggtcaccagctatgcaaggtcacaagttatgttatgctatagattatgtgacctgtcactgtatgattaactgcttttgttttgtgtctgtaaggccgcttataaaaaccccactctgtctttgttcagtgctcagctttttagatgcaaacctgctgagccgtgcgtacctaaaataaacaacaatcctcctgtttttccatattggcctctcctttcctcagtttaccacaacatagccataatagtataaaaactgaaagac

SEQ ID NO: 621374 - DNA, 616 bp, Homo sapiens
gtctcacagctgaggcagaaatttaaaacaaataaataataagtactgcatttattcactccaagaaaagtaaaagctaaggcccagaatgtggcaagacaagggttaaaaagaagagaacaagttttcctctgcctagcaagcttacttcaaggacagttataagataacgctgtccaaatagccaaggtcaaaggaataggctccagacacccctcccttccagagcaaggttgraggaagaaaaagagaaagattcttttactgttactctttccccaggcctcttaagcattatttacaaatgtctgtatttagccagtttttgtttttctttcgatgcaactacaaggtcaccagctatgcaaggtcacaagttatgttatgctatagattatgtgacctgtcactgtatgattaactgcttttgttttgtgtctgtaaggccgcttataaaaaccccactctgtctttgttcagtgctcagctttttagatgcaaacctgctgagccgtgcgtacctaaaataaacaacaatcctcctgtttttccatattggcctctcctttcctcagtttaccacaacatagccataatagtataaaaactgaaagac

SEQ ID NO: 621375 - DNA, 616 bp, Homo sapiens
gtctcacagctgaggcagaaatttaaaacaaataaataataagtactgcatttattcactccaagaaaagtaaaagctaaggcccagaatgtggcaagacaagggttaaaaagaagagaacaagttttcctctgcctagcaagcttacttcaaggacagttataagataacgctgtccaaatagccaaggtcaaaggaataggctccagacacccctcccttccagagcaaggttgaaggaagaaaaagagaaagattcttttactsttactctttccccaggcctcttaagcattatttacaaatgtctgtatttagccagtttttgtttttctttcgatgcaactacaaggtcaccagctatgcaaggtcacaagttatgttatgctatagattatgtgacctgtcactgtatgattaactgcttttgttttgtgtctgtaaggccgcttataaaaaccccactctgtctttgttcagtgctcagctttttagatgcaaacctgctgagccgtgcgtacctaaaataaacaacaatcctcctgtttttccatattggcctctcctttcctcagtttaccacaacatagccataatagtataaaaactgaaagac

SEQ ID NO: 621376 - DNA, 545 bp, Homo sapiens
gaatcttcttccccagagacagttaaaaataggctaggcagccatctgtcttggtgggatacagcccttccaggaggctggcatcagaacaaaacccttcttccctccctcccagggagtccactaatgagaagtgattaagggctatgaagaataaaggaaggagacagcagcccaaccaggcccatgggctaggcggytgagatttcctgtagaaagggaagatacaagctgcaaagaggaatatacaaggggaaaaagacaggaaataaccacagggctgtgagcattttggggagggctgcaccaatctgcttcccagctgcaacagctcaatttggtcctggggactgggagctcagccacagctctttggggagggtattattccccttcctagctcccaaacccatgtatacatgaagcctaagtggaaaatgggaactgtcaaataaatccaagatttccccaggtgaccagcagcatccatgaaatagctccaaaaagttttcctttaaaatacattgtctttttttgttccttgc

SEQ ID NO: 621377 - DNA, 582 bp, Homo sapiens
caccacgctcggctaatttttgtattttttagtagagatggggtttcaccatattggccaggctggtctcaaacacttgacctcgtgatccgcttrcctcggcctctcagagtgctgggattacaggcgtgagccaccatacccagcccagaatggtattcttaacgtatggacttaaaaggagcatttgcaaggaagagtggcagtggcagtattgtatggggagctctgattctcatttatgcaagatatgtaatgcctttctaaagaatagtgttgctacttacagctcgggcttggagataagacccactactctgcaggtccacttgaacttctttgtaagcccacttgaactaatctggaagagtttcaagctttggtaccctatttgccaacagctgggtacaaaaccacctattgggtatgattttagggctattgtcaaggtccctgaaggtggatagactgaagacatctcttctactggtagctttatctctttaaaacattcttttattgtatctcactcaaaagactagctgtttatttatactttagtatgagattccatttgtttct

SEQ ID NO: 621378 - DNA, 582 bp, Homo sapiens
caccacgctcggctaatttttgtattttttagtagagatggggtttcaccatattggccaggctggtctcaaacacttgacctcgtgatccgcttgcctcggcctctcagagtgctgggattacaggcgtgagccaccatacccagcccagaatggtattcttaacgtatggacttaaaaggagcatttgcaaggaagagtggcagtggcagtattgtatggggagctctgattctcatttatgcaagatatgtaatgcctttctaaagaatagtgttgctacttacagctcgggcttggagataagacccactactctgcaggtccacttgaacttctttgtaagcccacttgaactaatctggaagagtttcaagctttggtaccctatttgccaacagctgggtacaaaaccacctattgggtatgattttagggctattgtcaaggtccctgaaggtggatagrctgaagacatctcttctactggtagctttatctctttaaaacattcttttattgtatctcactcaaaagactagctgtttatttatactttagtatgagattccatttgtttct

SEQ ID NO: 621379 - DNA, 531 bp, Homo sapiens
ctaaattgatgagatcaattcattaagataaagacttctacttccgaagcagtatggtgcttgggtcagtgtctcttgagaaattaatgtatagataaaatatttcatattagggagagctctgtgctgccctttcccaaagctttggttatttgatgggagggraagtcttctcgaacctatgtcagaatattccgctttgaaagatgagggtttttcttgaggctagttttgtacctgctgtttcttttagaaatgattgctttatggatttaaaaggtgacccaaatgacttttttattattattattttttaatgctgggaggagtttgcgtgtgtgtgtgtgtgtgtgtgtgtgtgtgtgtgtgtgtgttttatctccttcaactctgaccacctggaagtcagcctaatctctgccctcgtgttgatctttaattcaacatttaattacctatcttggtatccatatgaatttgattgtttttttggctttttttgaactcataaaaggtatccaagttcctgga

SEQ ID NO: 621380 - DNA, 531 bp, Homo sapiens
ctaaattgatgagatcaattcattaagataaagacttctacttccgaagcagtatggtgcttgggtcagtgtctcttgagaaattaatgtatagataaaatatttcatattagggagagctctgtgctgccctttcccaaagctttggttatttgatgggaggggaagtcttctcgaacctatgtcagaatattccgctttgaaagatgagggtttttcttgaggctagttttgtacctgctgtttcttttagaaatgattgctttatggatttaaaaggtgacccaaatgacttttttattattattattttttaatgctgggaggagtttgygtgtgtgtgtgtgtgtgtgtgtgtgtgtgtgtgtgtgtgttttatctccttcaactctgaccacctggaagtcagcctaatctctgccctcgtgttgatctttaattcaacatttaattacctatcttggtatccatatgaatttgattgtttttttggctttttttgaactcataaaaggtatccaagttcctgga

SEQ ID NO: 621381 - DNA, 604 bp, Homo sapiens
aagcttgcagtgagctatgatcatgccgctgcactccagcctgggtgacrcagcaagaccctgtctaaaacaaacaaacaaaaaactagggtggttaaaaaaaaatcttggtgaacaacctctcttgtggattgtaatttctcaaagaaaaatatgatgtaaagattctttcttttactctcccttccgggtgtctcatcaaaaagcgtatattcctgagctttgctggcaatcgtattattttttctctccacctcagtccctgtaactttcctctttgtccattctggagttgtggaggtgataaatgggtccaaaaatgctgttaagagtgatctttaggtgggcacaggttctttatgatatatccctaatcaagagcctttacaggttctccccaaagtctctttgtgcaggaatgggagcctgctgtgttttagactggatggggctctgaccaagtattttttgtctttccccgcagggcatagtagtaggtgctcagtaaagatttgttggattgaagtggtttgaattaaatatgatttgtatgtaattttatattcaaataaagtctgttcctggtctgagttacttttcaaat

SEQ ID NO: 621382 - DNA, 604 bp, Homo sapiens
aagcttgcagtgagctatgatcatgccgctgcactccagcctgggtgacgcagcaagaccctgtctaaaacaaacaaacaaaaaactagggtggttaaaaaaaaatcttggtgaacaacctctcttgtggattgtaatttctcaaagaaaaatatgatgtaaagattctttcttttactctcccttccgggtgtctcatcaaaaagcgtatattcctgagctttgctggcaaycgtattattttttctctccacctcagtccctgtaactttcctctttgtccattctggagttgtggaggtgataaatgggtccaaaaatgctgttaagagtgatctttaggtgggcacaggttctttatgatatatccctaatcaagagcctttacaggttctccccaaagtctctttgtgcaggaatgggagcctgctgtgttttagactggatggggctctgaccaagtattttttgtctttccccgcagggcatagtagtaggtgctcagtaaagatttgttggattgaagtggtttgaattaaatatgatttgtatgtaattttatattcaaataaagtctgttcctggtctgagttacttttcaaat

SEQ ID NO: 621383 - DNA, 604 bp, Homo sapiens
aagcttgcagtgagctatgatcatgccgctgcactccagcctgggtgacgcagcaagaccctgtctaaaacaaacaaacaaaaaactagggtggttaaaaaaaaatcttggtgaacaacctctcttgtggattgtaatttctcaaagaaaaatatgatgtaaagattctttcttttactctcccttccgggtgtctcatcaaaaagcgtatattcctgagctttgctggcaatcgtattattttttctctccacctcagtccctgtaactttcctctttgtccattctggagttgtggaggtgataaatgggtccaaaaatgctgttaagagtgatctttaggtgggcacaggttctttatgatatatccctaatcaagagcctttacaggttctccccaaagtctctttgtgcaggaatgggagcctgctgtgttttagactggatggggctctgaccaagtattttttgtctttccccgcagggcatagtagtaggtgctcagtraagatttgttggattgaagtggtttgaattaaatatgatttgtatgtaattttatattcaaataaagtctgttcctggtctgagttacttttcaaat

SEQ ID NO: 621384 - DNA, 411 bp, Homo sapiens
ccactgcactccaacctgggcaagagagagagagaccttgtctctttaaaaaaaaaaaaaaaaaaaaaaargtagaagaagaaagaagaaaaaattttaaaaagcaactcccctcacaactacccagcattcttgatgctccttactgtacttattaccttctaaacactagcaatttatatattcatcatgtttattgtttgtctccctcttccccaactgaaatgttaactcacagagatctttattgtattgactgaaataaagcatctagagtagtgtctgatacatgatcatcaaaaaatacctgttgcacagatgagtgaatgaataaatgaatgaataattgtaaaacatataagtatatcttcacctacttggtagtggctaaaagaaaaaaagggtcttcta

SEQ ID NO: 621385 - DNA, 411 bp, Homo sapiens
ccactgcactccaacctgggcaagagagagagagaccttgtctctttaaaaaaaaaaaaaaaaaaaaaaaagtagaagaagaaagaagaaaaaattttaaaaagcaactcccctcacaactacccagcattcttgatgctccttactgtacttattaccttctaaayactagcaatttatatattcatcatgtttattgtttgtctccctcttccccaactgaaatgttaactcacagagatctttattgtattgactgaaataaagcatctagagtagtgtctgatacatgatcatcaaaaaatacctgttgcacagatgagtgaatgaataaatgaatgaataattgtaaaacatataagtatatcttcacctacttggtagtggctaaaagaaaaaaagggtcttcta

SEQ ID NO: 621386 - DNA, 411 bp, Homo sapiens
ccactgcactccaacctgggcaagagagagagagaccttgtctctttaaaaaaaaaaaaaaaaaaaaaaaagtagaagaagaaagaagaaaaaattttaaaaagcaactcccctcacaactacccagcattcttgatgctccttactgtacttattaccttctaaacactagcaatttatatattcatcatgtttattgtttgtctccctcttccccaactgaaatgttaactcacagagatctttattgtattgactgaaataaagcatctagagtagtgtctgatacatgatcatcaaaaaatacctgttgcacagatgartgaatgaataaatgaatgaataattgtaaaacatataagtatatcttcacctacttggtagtggctaaaagaaaaaaagggtcttcta

SEQ ID NO: 621387 - DNA, 317 bp, Homo sapiens
tcatttttgaataaaactgtgcttagctcaccaattcctaaaatcagttcaggagacaattacattgcagcaactcaaaagaaaaagaaaaaatatactaacatgaatcacacatgccccaagtgccayatataccattcgaagaaaaaaaaaaacaattgttttttttttttttaaccacttcactatttaattacaagcaaagtcctctgtggttctccttggtctcctctctctaaaaaaaaaaaaaaaaaaaaaaaaaaaaaaaaaaagaagaagaagaaaagagaaaggaaaatcacttccaccattaactc

SEQ ID NO: 621388 - DNA, 317 bp, Homo sapiens
tcatttttgaataaaactgtgcttagctcaccaattcctaaaatcagttcaggagacaattacattgcagcaactcaaaagaaaaagaaaaaatatactaacatgaatcacacatgccccaagtgccacatataccattcgaagaaaaaaaaaaacaattgttttttttttttttaaccacttcactatttaattacaagcaaagtcctctgtggttctccttggtctcctctctctaaaaaaaaaaaaaaaaaaaaaaaaaaaaaaaaraagaagaagaagaaaagagaaaggaaaatcacttccaccattaactc

SEQ ID NO: 621389 - DNA, 468 bp, Homo sapiens
aacctctctgagcctcatttcttcatctttaacatgaggatcatagcagtacttcttaggatctttgcaaagatacattgagatcacatatgaagaagcacttttctctggttcctcgaaaatgccaaggggccctcacccccaagccttcatgcccacttttccttttgcttgaattgctcttcccagatctcctcatggtggacttcctcacttcactcaggtgtcacctctcaaagacggccagcctaagaattctctstcctccagcgccctagctcattcactcttctctcattccctgctttattttccatgtagcgcttgcagctcctgcattcgtgtccttgtttattgtctttctcacccaccagacggcaagacccaggaggatggaaacatctgtctccaccactgtattcccagagctaagaatagtgtctgtaaaggccccaaatatatttactg

SEQ ID NO: 621390 - DNA, 468 bp, Homo sapiens
aacctctctgagcctcatttcttcatctttaacatgaggatcatagcagtacttcttaggatctttgcaaagatacattgagatcacatatgaagaagcacttttctctggttcctcgaaaatgccaaggggccctcacccccaagccttcatgcccacttttccttttgcttgaattgctcttcccagatctcctcatggtggacttcctcacttcactcaggtgtcacctctcaaagacggccagcctaagaattctctctcctccagcgccctagctcattcactcttctctcattccctgctttattttccatgtagcgcttgcagctcctgcattcgtgtccttgtttattgtctttctcacccaccagacggcaagayccaggaggatggaaacatctgtctccaccactgtattcccagagctaagaatagtgtctgtaaaggccccaaatatatttactg

SEQ ID NO: 621391 - DNA, 599 bp, Homo sapiens
atttaagttgttctattgttgggagtgaggggagtaattcttgcttatatcagcagcttgccgagtcccaccatcattcctacccccctttattttatttatctctttatggcctatctgataatgctagaaccacttcctgttgtatactggctgaggaagctttctccaggcccaagagcaaatcaataaaagtaagccatagcgattcataaaaataaaattgtcatcattattgttctattattgctgtgtctgtggaaagaatctccagaactgaaggtttcttggctaatatttataatctgcgttgaatggtgctaatgaatgagtgggtgtgcattagactgaaatgcgatggtgtttgatttataccaagtccaggtctgattgctaatgttaaatcyattaaagtgtctcttagatctgccttaatgtactcccctgcatataatagagcttaaacatacccgtttatttagcttttcattattggttgaatatttgtctttattactttatccccatgataaatttgacttatgatagtttaaaaaaacagcacttcgagaaagctaagcttttaaaaagctacagaa

SEQ ID NO: 621392 - DNA, 578 bp, Homo sapiens
gctgtcttcttaatccatcctcatatggtggaaagagcaaacaaaactccctcaagcctcttttataaagacaataatctcattcatgaagactctacccttatgactctatcacctcccataagctttactatttaataccaccttgggggttaggtttcagcatatgaattttaaggagacacaaacattctgatcacatcttacttcttttatctctatttgagatggagcatggatccatccctcttaagggcttgccaggcttcccaagcayggaagtaaaagaaaaccttgagttccttcaaggaaattccagttacctagcaagccctgagaagttaatgagcaacctgagaagcaagaagtttttcagaaacccagacccccaccaaatgaatccactggcacatagacctcagacaagggaaactgagggctgacctgacttctgatcaccattctttattctaaattctttctgaaggtcctgggaaagtcatgcccacagtccagataataatacagttttttttttctgctgactccacatttttagacaaagcttcacttaatta

SEQ ID NO: 621393 - DNA, 615 bp, Homo sapiens
ggggacacagtgagaaatgtatcttttggaaacagaaactataattacatgtatgtgatggttcatctcgagaaaatgttctcaggaacagcccaccttaagatatgaatcaggatttgagaccactttagaacattagaagaagtcacaatttaaaatgtgattattttaagataaactgtggtttacctcatattaattaaatagactcaagtgaagttatagattttgattatttgtggtaaggattatttgtggtaattgatattatcatttccagttatttgccacttgcctgtacgagaactataaatctatayttgttgccaggtggcacacggtgtcccctttgggagaagtataatacctggcttcgttgttgggcctggccatgtgacttgctttagccaatggaatgtgagtaggaagtggtgtatactatgtctgaatggaagacttaaaaggcattgcctggtttggttattgtgtttttccctctaccacaagaatggcatgttccagatgggggcttctccttcaacctgagccctggaataaagacatgtggagcagggctacacctgcaggtacatgaaatgtgagtgagaagtaaat

SEQ ID NO: 621394 - DNA, 709 bp, Homo sapiens
aagtaagatcatattctggtggtactaggggttaggatttcaacattaatttagtggtggtgggtgagcatatttaacacagtgcaacagccttcttatttgaatttattgttctccaaatcagggtttatccatagaattcagtctgtgccatacctatggattggataataaacatctagaagaagctaaaggcaggagtcccttttctccttttctacccagtgatccatccatccatccatccgttatcacacacgtgcacacacacacacacactttatataggtgagactctaggggttccttactggaagcccctgtcatccagggacactacttgatgtcttacttgcatggatttgatgagctgcctcagaggaagagctataaggactctgaagtaaggcctgggttcagaatccagccctgcacttactggstctgtgacatcagtgacaccttcctctttgaggcttggttcttcatttgcaatatagcaaatactagagcagaccctataggtccctgaaaaatggtggcatttattgacgttattattgttgagtgagccaaggagagagggacagagtggaggcatggcctatcttccagcttccagaagctcaccaccaggcactcctgggggcgcaagtccaaagctgtcacagagactgcctcatctggactgtctccccagttccagagc

SEQ ID NO: 621395 - DNA, 524 bp, Homo sapiens
gatcacttgaggttgggagtttgagaccagcctagccaacacggtgaaaccctatctctactaaaaatataaaaattagccgggcatggtggtgcacacctgtaayaccagctgctcaggaggctgaggcatgagaatcacatgaactcagaaggcagaggttgcagtgaactgagattgcaccactgcactccagcctgggcaacagaacaagattccatctcaaaaataaataataaataaaataataaaataaaataataaaaaaagacaagagacacccattgcatccattttaatgatatcacttgctctgtctttgctgccgtaagagtgtccaaggatgaaattgctacttggaaaggcttagagattccagggtcctcagaccccacaaggagcaggaaatggcacacacagctgaaggcaggtcatggggtagagcaatgagccttgcacatggctttgatttccaacagtttgcaacagagatgatccttgtgaatgcagtggcctcaccaaag

SEQ ID NO: 621396 - DNA, 524 bp, Homo sapiens
gatcacttgaggttgggagtttgagaccagcctagccaacacggtgaaaccctatctctactaaaaatataaaaattagccgggcatggtggtgcacacctgtaataccagctgctcaggaggctgaggcatgagaatcacatgaactcagaaggcagaggttgcagtgaactgagattgcaccactgcactccagcctgggcaacagaacaagattccatctcaaaaataaataataaataaaataataaaataaaataataaaaaaagacaagagacacccattgcatccattttaatgatatcacttgctctgtctttgctgycgtaagagtgtccaaggatgaaattgctacttggaaaggcttagagattccagggtcctcagaccccacaaggagcaggaaatggcacacacagctgaaggcaggtcatggggtagagcaatgagccttgcacatggctttgatttccaacagtttgcaacagagatgatccttgtgaatgcagtggcctcaccaaag

SEQ ID NO: 621397 - DNA, 565 bp, Homo sapiens
aaatttataacaatatctaatttgtaggattttaaaaatacataaataaatactgaatataaaagcatgtatgtctggaaagtgtgcacaaagagttaatatcttacaaggttcttgtattatttgcgaagagggttcagatattgattaagttggggttggtctagtatgcctcacaaaatttctatgaaaaaataacatccaaatcagtaggaaaatgggaggaatggaataagaaaacaaacaattcaacaagagagagcaagaaaggagaaaaaaaataatagaaaaagcagggacaaatagaaagtatgaagtaaaacaataggtatgtccaaatatgtctgtaatcataagtataaaaagactaaaattatcacttaaaagacaaggattgtcagattgcaattttttaaaaaaaaacaaytatatgctgcttataaaagacacgcctaaaacataaggacacagaaaagttgaaagtaaaaaaggatgaaaaaaagattcatcagtcaagtactaaccaaaaggaggctgggaaggcaaacttaatattagacaaaat

SEQ ID NO: 621398 - DNA, 612 bp, Homo sapiens
gaaaactgaagttcgtcttgaaaaactctgtaagatacttcatcataatttctcatgaaataaaaattggaagcttcttaagggaattgtggaatgagatttccctttgcaacagaatgagtgccaagtggtattaaagatgatattaccttgtattcctgatgctagaggaataatactatctctggtgataagaagaatgtrgggactcaagaggatgttaattaaatttatttatgtaactctttgaaattcagaaaggccagaatggagccaggaaatcatctaagaaagttggttcaagttaaaaaaaatcaacttagaaagcacaaggttgattgtttcagtagtgcctgggttaggagactcttagaggggagacatgtagagaaggagatgagttagaagcaggactttgattagatggtaaatctggctccaggatggtgggatcctatctgattttttcactgccttatgtttttgccacacagtaaaaattcataactagttatttaatgagtgagggaggaatgcagttcttttgagtaaatacattaatacagctgaaaataaatccacctcatatggggaaatgtagtcttttccatc

SEQ ID NO: 621399 - DNA, 595 bp, Homo sapiens
ccatgacaagcaccaccaccaaactaataataatggttaactgagtttgtttggatgactaaatattatttgggctttgtatatcttttacaatttttccacgatgaacttgcactatttatgtgaagggcaaatgaataaatacctttagaaagaaaaaaagacatcttataaaattgcacatttgatagctctttgcaagtgaagcctctgaagatgtgtgttttgggtcaataattagaaatattttcttttcacaattctagatggacttttcttataccaaagcttgtgctttacaaaaagcaatgctgccgccataaaatgttcacctgcctatgtttgtatgttttctgaactgtgaattgccccatttgtactttattccatgtcatagatgattgttagatgggttgatgtcatgactgcaaagtcaatctttacagaaaaaatatttcataaagaggaggttagtatctcaatctaagtgctaaaactttctttgtagcattttttcttgctggtctcccaaaagtatttattctttttcatattttgctgtaagyttctaaaagtagagaatgttgtcctgcta

SEQ ID NO: 621400 - DNA, 646 bp, Homo sapiens
gatgcccataatcttcctatagacaaaaggcttcagaggacaaactacctttatgggagctcagaaagttatattagtcagagctctttcagttgcaagcgatataagtcaatgaaactacccgaagcaaaaaatatgtagtggcaggatatattgcctgatttaactaagaagtccagtcatggccgcacttcagttatgataggttcagtcagctcaagtgatatcaccaattctctctacccgtctctgggtaatcttgtaaggtaacactctcacaaatcagatggaactgcctccaggtggccaagatgttaactggcagtctcagcttagaaaatgaaatgaaaatggaaactttttttccccaaagatctatttatcaattctaggatgttatcagccctgcctgggtcccttatggtacccataggtcaaatcactattgcttaggatgctaattcacccacctaatttaccttcccatcgccgtggctataaggaggtaggaactatctatcagttttaayacccacctagaacattgctggcacattgtaaagctcaaaagtattaattgaataaatgaatgctcactatataaagggaaaagaagaaatgaactagcatttatgtgttgggcact

SEQ ID NO: 621401 - DNA, 574 bp, Homo sapiens
tggctgatgagcacttaagttgattccatatctttgcaattgtgaattgtgctgcaataagcatatgtgagcagatgtcatttttatataatgaatttcaaaaacattaaatttatcaaagatacgtgatttcaaaaaatggaacccagtcagtttatcartagaatagaaaataagtcagtaaatttcagacacctctggatgtgggactagattgatcttcctgctgaatttacagatgtgaaggggatgatcaaattggctgagttgactgattctcactgtcaagggcaaattcaagagggattgggggcacaacaaggaggagtctctcaaatgttgaagatcatcaggagtcctcagagagccctgttgtcccatggtaactgtattagtccattttcgcgctgccgataaagacatacctgaggctgggtgatttatactgaaaaagaggtttaatggactcacagttccacgtggctgggaaggcctcacaatcagggtggaagacaaaacgcacttcttacatggcagcaggcaagacagaatgagagccaagcaagagcagttt

SEQ ID NO: 621402 - DNA, 528 bp, Homo sapiens
tcattatgcaatgataaaaaatatcattttagtaagaagatataacaattataagcatatatgcacccaacatcagagtaatcagatatataaagcaaatattatatcttaagagacagactccactaccataatagttgaagacttcaacactctgctctcagcaacagacagatcatctagacagaatatcaacaaagacacattggatttctaggcaagtrtaggcacagaattaatatttttaaaaagagagacattggatttcaacttcactttagaccaaatggtcctagcagacattaatgtaacattttatccaatagttaaagaatacacatcgttctcatcagaacattgaacattctccaggatgcactacatattatgccacaaaacaagtctcaacaaatttacaagaattgaaatcatatcaagtatcttttctgaccccaatataataaaactacatatcaataactagaggaactttcaaaactgtgcagatacatgaaaattaagcaacat

SEQ ID NO: 621403 - DNA, 452 bp, Homo sapiens
cacactcttgacattctttagtcctgctttgcaaacaggtattatgattatctgctacaggtctcagtgaaatctcaagaggatttagctatgaaacagttttaaatttcaactgagaaattaataaaatacgtcagtttagcaaaattatactaatttttctttctgttttacaattgtggacttctcttataccaccagggrcaataaggtattggctgaagggccaaacataactactagggtaaaaataactaattagggagaccaaaggggtagatggtagggaaaagagagaccacataataatcacttttaaatctatggctttatgtaaaagattctactatataatagtatttaacttgaaaaacatggcttttcagattgttatttttatgcactaataaaagacttgcaaatgatgagattacatgcacaatcagcatgaa

SEQ ID NO: 621404 - DNA, 452 bp, Homo sapiens
cacactcttgacattctttagtcctgctttgcaaacaggtattatgattatctgctacaggtctcagtgaaatctcaagaggatttagctatgaaacagttttaaatttcaactgagaaattaataaaatacgtcagtttagcaaaattatactaatttttctttctgttttacaattgtggacttctcttataccaccagggacaataaggtattggctgaagggccaaacataactactagggtaaaaataactaattagggagaccaaaggggtagatggtagggaaaagagagaccacataataatcacttttaaatctatggctttatgtaaaagattctactatataatartatttaacttgaaaaacatggcttttcagattgttatttttatgcactaataaaagacttgcaaatgatgagattacatgcacaatcagcatgaa

SEQ ID NO: 621405 - DNA, 520 bp, Homo sapiens
tgcactgaagaccagatggtacctgcatacacagtagaaaggtggaggtagaagtttaggaactcggatcttaagtaggactgctgatgacctttctctctctctctctctctctctctctctctctctctctctctctctctctcaatctctatctcttgatctcatctttgctccagaatctaagcacatcctctctgtgcacagagtaggsggggctttactgttctagaatgtgtctgggagaaagatgctcgctatttctatcacagtggccaagaaataattctatcctctaatatggagagagatgctgtctttagcttctaaggctgttttttgctcagaggacctggaccatgtaagctgttcatggataattatctcccaacaatgacttttatggcaaataataacttattagatgttactaaaattaaagaattactgcctcttcctgtggcttccatcttctttccacagttggtgttagtcaactgtgacatgagcaaagtttcag

SEQ ID NO: 621406 - DNA, 333 bp, Homo sapiens
attcatagagttacaaaccattatacacttttaattatttttaaatatacaattcaattattttgactatagttacccttttgtgttatcaaatactgagtattattaattttttcaaaccatttttttgtacccattaagcacccccacctttcccacacctcatactgcccttcccagcctctggtaacccccctcctattctctaactccatgtgktcaattgttttgatttttaaattccacaaataagtgggaacatgtggtgtttgtttttctgtgcctggcttattttacttaacataatgacctccagttccattcaggttgcaa

SEQ ID NO: 621407 - DNA, 396 bp, Homo sapiens
actatctttctaaaggggaatttagtgccttctgtgtcagtcttttatattacattttgccttttaatgttgtcatactggttcatatcttaatacaatgtaaatagttctaatctatcctctagtatcttcccttaagatgtgtgaatataacaaaatatgcacccttttgtctttttttgttcaaggaaagaaacaatgccttcaatagttcctcacatgacttaattttagagccttcagaattctggttactctgtttgaaatgtatttttktttagtttatatctttcttaaaatgaatgtaattccagaaatagatgtcattctccaagtatcatctaaacagaggaaagtatgagaagaaccttccttataaattatgaaagattatgc

SEQ ID NO: 621408 - DNA, 595 bp, Homo sapiens
atcaaactaaagagttttgcatggcaaaagaaacagtgagcagagtaaataggtaacccacagagtgggagaaaatctttataatctatacatctgacaaaggactaatatccagaatctgcaatgaactcaaacaaatcagtaacaaaaaaccaatcccatcaaaaagcgggctaaggacacgaacagacaattctcaaaagaagatgtacaaatggccaacaaacacatgaaaaaatgctcaacatcactaatgatcagggaaatgcaaatcaaaaccacaatgtgataccacctaactcctgcaacattggccataataaaaaaatcaaaaaacagtctatgttggcacgaatgtggtgatcagggaacacttctgtactgctggtgggaatgtaaactagtacagccaccatggaaaacagtgtggagattccttaaaaactaacaatagaactaccatttcatccagcaatcccactactgggtatctacccagaggaaaagaagtcattatttgaaaaagatactcgcacacrcatgtttatagtagtgcaattcacaattgcaaaatcctggaaccaactcaaatgcc

SEQ ID NO: 621409 - DNA, 609 bp, Homo sapiens
aatcttaaaattaaacaaagccagagaacacactgaaaaaaacatatatgcaaaacaaattactgaaccttcgtaagacagtggggtctttgacattttgacacgtggctatttccatcactcctccttcccaagctcggtggcctgacagcctgatgaaaaacaagcaatctcagagctaacagacaagattgaccctgtttggtactccattaaaagcagcatttccacagcatagtcaatattttgtctcaacttcaagctactcacaaaatctctattcctggggtgttgtggctatttgacttaactcggagtccagctcagctgaaattctcaaaagccctactcccagggcattgccaaaacaataacaatttactgacaacattgcagctgccttgagctgtgaagtcagttggkgcaaacaaaagcctggccgtaatttaaaagcagctcctggaaaacaaggtgagcataaggaagttttaaaaacttcaggccgggcgcagtggctctcatgcctgtaatcccagcactttgggaagccgaggcgagcggatcacaaggtcaggagatcaagaccatcctggctaacacggtgaaacc

SEQ ID NO: 621410 - DNA, 532 bp, Homo sapiens
ggttggttgtaagccttaagtgagggttgatgtggggaatagatgaggcagagcatgaaactgtaagtgcacattgtagatataatagttcatgagagaggttaactgatatggtgtggctgtgtccccacccaaatctcatcttgaattgtagctcccataattcccatgtgttgtgggagggacctgatgggagataattgaatcatgggagggtagtttcccccatactgttctcatggtagtaaataagtctcacgagatctgatggttttataagggaaaacccctttygcttggctctcattctctcttgcctgccaccatgtaagatacgccttttgccttctgccataattgtgaggtctccctgccatgtggaactataagtctattaaacctctttttctttataaattacccagtcttggatatgtctttatcagcagtgtgaaaatatactaatacattaacagaggttaataaagtggaagataatataagtggagtcacaaaggtattaggtggcaga

SEQ ID NO: 621411 - DNA, 583 bp, Homo sapiens
ttctatttatactaaacttcataaaggtttttcctagaaattactgctaatatgttaaacattctgtaytatttttaaactcaatatattctaatataaaaatgtgccttaaccacaatagcaaactagtgcttctcacaccacaatgtttcaaaattcacaaaaatattatttacttttaccttatatttttggtaaattaaatatatttgtgtacattaatgctataaagtagtaatacaatttgtatcattttatagcatggattataaacttattcatatttcatgatacaatgcatatattcacactataaataacttatatatgtatgggtattcatacaatttgaacattagtcatatagacgtgtacagaacccacacttcactcatgtaaacactttttactcatttaagacaaacctcaaaaagaaattactatgcatatataaaatataaatatataaacatgaacaaaagatgaacttaattatataatatttgcttttgtccttaatttaagaactgtgaacatttgccacatttatttacaatttatatgaaaaattagaacactttat

SEQ ID NO: 621412 - DNA, 536 bp, Homo sapiens
catcttgagttaatttgtatatactgttagtgatagtccagtttcattgttatacgtagaytagccaatttttccatcaccattttttaaatggggagtcctttccctattgtttatttttgttgactttgtcaaagatcagtttgctgtaggtatgtggctttacttttaggttctctacacttttctactgatctatgtgtttatttttatatcagtacttgatcttttggttcatatacccttgtagtatgtgttatcgtcaggtaatgtgatgtctccggctttgttcttttagtttaggattgtttttgctatttaggctcttgtgtggtttcatatgaattttacaattgctttctctaatcctgtgaagaatgacattgctacttgataggaattgcattcaatctgtagactgctttgggcactatggtacttttaacaatatcaattcttccaatccatgaacatgagatgtcttttaatttgttgtgtcatctacaatttttttttttcatcagtgtcttttagtt

SEQ ID NO: 621413 - DNA, 446 bp, Homo sapiens
cttcagaattatctttgacacttaactttccttcactcaaaacattcacttaggaagttgtaataactctagttttgatctttctcacaattctttcctgtctttttaaatctcactgttatcgtcttgagccatttcattcacttcttgaaatcttgtcctttacttcatcatattcraaataaggtaacagagtattctctctaaaaccccaatataatctgtttatactcatccatgatttatactatcctcaatgtaaactctgtagaatgctccaacatgttttcgcaatctaggacgtttcctgtttcaacctcatctccagtcactctcctccatgcatccttggtgcctttcaaatgatgactaggtgtaatgcaaatatctatttattttcatttccttgttttgcttatgctcttgtttctgctattcagcttacc

SEQ ID NO: 621414 - DNA, 446 bp, Homo sapiens
cttcagaattatctttgacacttaactttccttcactcaaaacattcacttaggaagttgtaataactctagttttgatctttctcacaattctttcctgtctttttaaatctcactgttatcgtcttgagccatttcattcacttcttgaaatcttgtcctttacttcatcatattcgaaataagrtaacagagtattctctctaaaaccccaatataatctgtttatactcatccatgatttatactatcctcaatgtaaactctgtagaatgctccaacatgttttcgcaatctaggacgtttcctgtttcaacctcatctccagtcactctcctccatgcatccttggtgcctttcaaatgatgactaggtgtaatgcaaatatctatttattttcatttccttgttttgcttatgctcttgtttctgctattcagcttacc

SEQ ID NO: 621415 - DNA, 573 bp, Homo sapiens
tttacatttaagaaaaacagtaacagcatctatattcaataaattaaacataaataggtaaatatattctttgaatttatctttccctcttcaggaagcagaatggccaatatcataggctttgggaacctgcatatgctatttgtcagcattcttattggtgtatgtatgcccctttgtcaaaatttcacttgagaaagaaatttagatgatgtttgcatgggcatattttccatatcagctgactttcaagtaggatttccraggtactaatatacttaaaaggctaaggctagacaaagattttctgtaactcagtttaccttctatgaaatcatagactgatttatcctatgattattttaatcaaaagtacaaactttcataaaaataaattatcaacttaattgtgatattaaggaataattcaatgagtattgcagttctctataagagggagaccctgcttaaattcagtttaccatttgttcttcctctaaaatttatgccaaagttaaactaaacatttggagttctgggaaatttccatgatcatatattttcctaacatgg

SEQ ID NO: 621416 - DNA, 491 bp, Homo sapiens
gcccctttgtcaaaatttcacttgagaaagaaatttagatgatgtttgcatgggcatattttccatatcagctgactttcaagtaggatttccgaggtactaatatacttaaaaggctaaggctagacaaagattttctgtaactcagtttaccttctatgaaatcatagactgatttatcctatgattattttaatcaaaagtacaaactttcataaaaataaattatcaacttaattgtgatattaaggaataattcaatgagtattgcagttctctataagagggagaccctgcttaaattcagtttacyatttgttcttcctctaaaatttatgccaaagttaaactaaacatttggagttctgggaaatttccatgatcatatattttcctaacatggcactattggctactttctaaattaataaaattctgttaactcataatattcatggtatataatacttggtaaaattaaaagtaagtta

SEQ ID NO: 621417 - DNA, 592 bp, Homo sapiens
tatgccaaagttaaactaaacatttggagttctgggaaatttccatgatcatatattttcctaacatggcactattggctactttctaaattaataaaattctgttaactcataatattcatggtatataatacttggtaaaattaaaagtaagttaaaacaactgtttttaattaaataaaatacaacaaaaattatattgaataactttcttctcagtccttaaaaatactttcagtcatgtatagaattacagtgtcaagaaacattttaaaaaatagtttacyttcctctggtggaatttgccagctttatctttcctgtagaatgaacaatgcatataaaaatgaggtcaaatgatcctgtgagcagtgtttgcttggtagggtgggtggcagagttttgattgttttttcttggtgtgaactgttgtcatcaccagttccattttagcaccagaaacgacctcgcacaactaaagaaatatacttcagtgttgggttttaccacatatacacaaatatgcatctggcattttgggtcttacatttgaaattctttgtttctgtttaacttcataagtatgaatagc

SEQ ID NO: 621418 - DNA, 652 bp, Homo sapiens
tgggaattgaacaatgagatcgcatggacacaggaaggggaatatcacactctggggactgtggtggggaggggggaggcgggagggatagcattgggagatatacctaatgctagatgacgagttagtgggtgcagcacaccagcatggcacatgtatacatatgtaactaacctgcacaatgtgcacatgtaccctaaaacttaaagtatatttggaccaagagaattgtcattttaatggagttgtctttctgttcctggcttatttcatttaacattatgacctctagtttcattcatgttgttgccaatgataggaccgcattcttttttatgactgaatagtacttcagtgtgtatatgtgccaccttttctctatccactcatctgttgatggacatgcaggttgcttccaaatcttggttattgtcattagtgctgcaagcagcacgggaatgcagatatcactctgatatattgatttttttccttttaatatttatcyagcacaggattgctggatcatatggtagatttatttttactttcttgaggaacttgcagattgttatccacagtggctgtactaattcatattcctcctgagagtgcttgtgggttaccctttcctcacatcctcatcagcatt

SEQ ID NO: 621419 - DNA, 551 bp, Homo sapiens
tttctttcctgagctgaaaactcataggctaaattccctactgaaggactccagtgttatgtccctctgaccagtccaaacctaacccatcatctttcttttctagactcactctttctcctgcttactgtatcctgcctattggcaagttgaaaacctgggaatcatccttgactcttacctgcatcatgcagctctgaaccctgmatgcttttggtctttaaattgcatgtatcacatttcagaatatagagaagcaaggttactcagtaagagtagggtgagatcaagttaggtttgagaattaaagggaaggtaaaatagcattgccaaaaagaatttggtagatgatcaactgaatgattgtttttatgtcacacctttaatacatgtattaatttatttctatatatttttagtacctttatcctaactggcatatcatatctgtattttcaagtcctatatatactgctgtggaggaaaaaggtctttatcatttcctacttagtaggtgccatataggatcaaaattagctatttttttcccc

SEQ ID NO: 621420 - DNA, 568 bp, Homo sapiens
taaacacctcaaatatttggaaaattaaacaatacatttctaaaaatcaccatrggtcaagagggtgtcttaagggttatttaaaaaatagtttgaatgaaatgaaagtaaaaattccaacatatcaaaatgtgtgtgacgcagctaaagcagtacttaaatgaaaatatatagcagtaaatgcttacataagaaaagaagaaagatctcaagtcagtaacttaagcttccagcttaagaaacaagagaaaaaaggagcaaattaaacttaaagcaagtagaaggaaggaaataaatattaggacaaaactaagtaaaattgaaaaccaaaaaataatagaaaaaaaatcaatggaaccaaaagtttaaaaaaatcgatagtattaataaacctgtttccaggctaagagataaaaagagagaagatgcaaattacagtatcagaaatagaagaaagaatattactactgatcctgacacatcaaagagagaatggggaatgctacaaacaaccctgtacatataaattcaacaacttagatgaaatggacaaacctcttaaaagaaa

SEQ ID NO: 621421 - DNA, 401 bp, Homo sapiens
ttgttctgtctagtggatacatggtagtttcttgatggccaggggtggtgtcttcacctgaaactgtctggaagccttgtcgcatgatcatctgaagcttgatggtatctaggtgagaagaaatgaatttgtttaagagatttaacaaacatggtccaaaaaccaaggcaagtatgatattaatagtgggctggccagaggaaggagccatgaacccaaacttaccattttttaccaggagccccatgactcagatggtggttgtcatatcttagagtcccgatyagctagttttcaggtggcgtctcttattaatcctgattggttgacatcaaaacagcattcttgctctagaaaaagacataagccagatctagtccccttctattttgcaaagtagc

SEQ ID NO: 621422 - DNA, 411 bp, Homo sapiens
ttggtgatgaattatttcaggttttgttatctgaaaaatatctctatttttacttctttttgaaatagatgtattttttcttggcatagaattataagttaacacttcctttactttatgttttccggaatttaaaatatttttctcccacatcctacatcatttgmattattttcctcaaaaattatcctgtcgtccttatgtgtatttacatttacctaatatgtattattttctctatcgttttaaagttatctttaacactggtttcaaacagcttgattatcatatgccttgggggagttttcttcgcatttctagggcttgggttttgtaaactttctacacttctaggtttttagctttaatcaaaattggaaatttttggctcttatttaaatattggttttt

SEQ ID NO: 621423 - DNA, 411 bp, Homo sapiens
ttggtgatgaattatttcaggttttgttatctgaaaaatatctctatttttacttctttttgaaatagatgtattttttcttggcatagaattataagttaacacttcctttactttatgttttccggaatttaaaatatttttctcccacatcctacatcatttgcattattttcctcaaaaattatcctgtcgtccttatgtgtatttacatttacctaatatgtattattttctctatcgttttaaagttatctttaacactggtttcaaacagcttgattatcataygccttgggggagttttcttcgcatttctagggcttgggttttgtaaactttctacacttctaggtttttagctttaatcaaaattggaaatttttggctcttatttaaatattggttttt

SEQ ID NO: 621424 - DNA, 587 bp, Homo sapiens
caataacttggcaaataatgtattttttcagacaaaaatatgtcacttctagggtacagacattaataaaatgtaaagctagtagtaccttggacaatgtcccgttgcatcttcacactcatcactagcttatataacactttcaaaatttactgtatcatgcagagtataaagttccttgttttcatttagctctggtaaaaaattttaaattggcattgctttcagttctaaaaagactttatgttttgaaaatatataattctaactcaaagaaatagggaagccaaaagctgcttagaagatgcatgcagagatgaaatggcatctgaaatttggaataggaaatgaaygatgggaatattctttaaactcagcatatcatttgaatttgaagaatcttatcattgagaataacagtttacattttcttgcatttaattctctatttcataattgaattttgttcacttcaggagtgttttagaattctgatcacatatgtcctcaaaataaaaggtataacagaaaacatacaacactcccatttttgtgacattcagatttgagaatatcagacaaaaata

SEQ ID NO: 621425 - DNA, 533 bp, Homo sapiens
aataatacagcaaataaagcagtatgttattaagacttcaaaattttatttgactgctaaagtttaaaaattagctttaaaaaacatataagactttaataattctaaaaagaagaattaaactacttccgagcttaatgaatttagaatgttatttgtccctgaaaaatcctatcttatgcatggtgtaaaaactgcaaaggtacaggtgattttaaagatttccgaccaagggagagatttytcaagcttctctaaaacaaccgaaaaaaaaaaaaaaaaaacactgagattctgatataaagcccagggcatcctatggctcatttatgattctcttctcataacaagcaggacaaaaatcttccttcaaatatttgattagatccagtacttgctccatgtagaattgctcagttacataggcttgcttcttaattggttgaggggtatattgcagagaacagatgaccatgataatcattttaaaaataaagaagctcatttttcttaatttaccacacaattagagc

SEQ ID NO: 621426 - DNA, 508 bp, Homo sapiens
atattagacagagattgctgaagtataatgaggattcaaggactcagaaacacataaaattcttgatatgcaaaagtaatcttacttacagatacaagctgcctggttgcgatgtagataaacagtgttattaatatttgttcaaagaatatgtcatcayttatattcaatccccaaatatactcttacaggttttattatttggagcagatggagaaaatcaggtgcttagtgtaatagtgtgagatgacgatgtagcagagcatagatgccaatgattgaaatttgtaagtaataatcttataaataataaataagtaataaatacttcacttacaaacacttacattttacttacaaatatagtgaagtagttaacgacatgagatgtagtaacataattgcttgcaatcacaatcccatatgtgttacatactattggaattatcacgggaaagttaattattttttctgtgtctgttctctcaactgtaataacagtcatgtc

SEQ ID NO: 621427 - DNA, 540 bp, Homo sapiens
agtaaactacgtattcaggttgatatataatgtttcatatgaaagataacttaaactggagtggaagcaaggcagctaatgaatggtgattagattcttgaagtagagtcaatgggattcctgaggggttgaaaataaaactgtgagagaataagagaaaaataatgaatccaagaattggcaccacaggaaattgtagtgtgaatttggcactgaattagagaatatgtaagtagtgaargtttgaacaggaagttcagaaattttctttggcatatgttgagtttgaaagtcatttgaggatcttaagcaggagatgtgaagttagatataagtgtttggaattcaggggagagtttgtaattcaggtgggaggtacaaatatgaaagttgaggtttgagaactgttgtttaaagccataaggcattaaataataaagaatgaattcattaaattaataatgaaggtggtgaataaatgttcagggattgaatcttagggcactctgatattgtttggctctgtgtccccacccccca

SEQ ID NO: 621428 - DNA, 603 bp, Homo sapiens
tgggggtggtttcctccatgtggttttccttacagtgagtgagttctcacaagatctgatggttttatgaatggtagttttttcccgctctctcgctcactctcctgccaacttgtaaagaagatgtcagcttccccttccaccatgattgtaagtttcctggggcctccccagccatgcagaactttgagtcaattaaatcttttttctttaaaawttacctagtctcggggagttccttataccagtgtgaaaacagactaatatactgatgtttggagagtttgaagcaaaagggactaaaaagaggggaccaattacataaaagaaaaataaagagattatagaatctcagaccagatgataaaactatagccaactagtgctaaattactctcatttttaaatgggagtgataaactgcagcaaatgctactgaaaactaaagtaagataaggattaaattttttgactattgaatttaacatgagagccttggtgattgtgatgagtgatttcaataacgtaaagggagcaaaatgttagttagggtaattttaagagaaaaggggacaagggtagttagagacatgaaacatgaaa

SEQ ID NO: 621429 - DNA, 363 bp, Homo sapiens
atcttttggctgtcttttaacaggtacttcaggtattccacaggttcacaggagtagtgggtgatggatgggagcttcaggttccagttctagggcttcaggtattgcagttttgactatggaaagataaatccaactatctaatcctagtactctgacagcagaagacgtggccagtagcactgaaaattgtccatttctttttggttgtaattgttatgcaggtgatccctccttccatatttaaaaaagcaccttatctcctggcctgattttgggttgcaggttagttgctgctgtggrgagcctttgagttccaaacttttgtaaagcaaagataggccattatcactttggacactc

SEQ ID NO: 621430 - DNA, 481 bp, Homo sapiens
tccagctacttcggacactgaggtgggaagacctcttgagcccaagagttcaaggctgcygtgaactctgaacttaccattacactcctgcctgtgtagcagaatgagaccctgtctcagaaggaaaaaaagtctaggctgggcgtggtggcttacgcctgtaatctcagcactttgggaagccaaggcgggcggatcacttgagcccaggaactcgagaccagcctggggaacatggcaaaatcccatctctaccaaaaatatacactacagcctgggtaacagagcaagaccctgtaccctccctcaaaagcccccctccccaacgtctcaatatatatcagtgctaaaaaatctaaatatattcttcttatacaatgaatttaattagaaatcaaaaaagataaaagatctacaagtgtcaacctccagttagtaaggtgctcctatggttgtgatgaagaaatcactaatatttcaa

SEQ ID NO: 621431 - DNA, 543 bp, Homo sapiens
agcaccctacactcttcttaactccattattctgccaatttcaattgctcaaaatmtgttaaatttcagaaatctttgataaccaggtattatcttcaatctagtaatcatttaatagcgaatcattacataaattaaaggaataagaccctctctgcctgcttctggcaagccatatagaaatgtgctctagctccttaaaaaaatactttcaaatgagctctggataagcattataacagctgtatattaagatggcagaaaataaaactcagtaattctcaagtgttaacttgcttacataatgtaaacataatttttgaagaagtatttttattttattatacaaactgccaagcccagatagctgtatgaatcttagttataggaccaattttctctaaatgactttatgttttataatttcccaaactcaggaattatattttttattccttttcttttgcacaaattgaacatgtttataattctagtttaaaagattaactttaagtatagcaaggaataggcaggttttcgcta

SEQ ID NO: 621432 - DNA, 567 bp, Homo sapiens
gtctacctttcatggcagtaacatactttttaaattactacagttttgtaatataatgtgaaaccaggaagtgtgatgtctccatcttttttcttttttttcttaaaattattttgactatttgctatgattccatatgaattttagtttccttctatttgtgtggaaaaacatcattggaatttagataggaattgtattgaatcagcagatcactttgggtagtatagacattgtaaccatgttaattcttccagttcatgaacacgagctatctttccatttatttgtgtatcctttaatttacctcatcaatgccttatagttttcagtacaaatatcctttgcctccttggttaaatttatttctaagtattacatttttgatgccattgtgatgacattgttttcttaatttatttttttatagttcwttgttaatgtatgggaacacaacaaatttttgtatgtgaattttgtatgtaaattttgtattctgcaactttacaaaacttaattttgtggagtgttaggattttctttatatgagaccaactgggaaagaaa

SEQ ID NO: 621433 - DNA, 282 bp, Homo sapiens
atgagagactgaaataaagttacaaagttacatccctatgcgaataaagactaggtctatgaccagtctgattggttgcaggaggagaccaatcagaggtactttccatttttcatttgtgatgcagaaagagggaagatggcaaaggcagtagcctctgattattttgttacttgggcatggaaaggtgggggttttcctttgattcaattcyagaaggcagtaagaatcagccttaggttccctgcctccagaccctattgtcctgcctcatttcccccc

SEQ ID NO: 621434 - DNA, 282 bp, Homo sapiens
atgagagactgaaataaagttacaaagttacatccctatgcgaataaagactaggtctatgaccagtctgattggttgcaggaggagaccaatcagaggtactttccatttttcatttgtgatgcagaaagagggaagatggcaaaggcagtagcctctgattattttgttacttgggcatggaaaggtgggggttttcctttgattcaattctagaaggcagtaagaatcagccttaggttccctgcctccakaccctattgtcctgcctcatttcccccc

SEQ ID NO: 621435 - DNA, 621 bp, Homo sapiens
tataattattaataatataaaactattatatattgtatgtataattatatattattaatatatccattacatattttatgtgtaactatatacaattatttgtaatatatgattattatgtagtatgcatcattatatgtaaatatttataatatataaccaatatattatacattgtatgtgttttaattatgaaatattccatgtaatgccacacattttatattattatatattatctataaagagagatgttatattgtttttcataaaacaacagaaagagaaagtttaaggagttagctcacctgattgtggaaagctggcaagtttaaagtctgcacgctaaaccagtaggcaagacacccagagaatagttgaaatttaattccacaggcagtctgctggcckaattctctcttcttccagggagggcagtctttttttaataaggcctcccttgaactgattggatgagcccaccacattacgaagaataatgtgcttcactcaaacatactgatgtaaacattaaccttagttaaaattaccttcacagaaacatctagaataatatttgactaaatatctaggtaccttggcatagccaagttaacacat

SEQ ID NO: 621436 - DNA, 621 bp, Homo sapiens
tataattattaataatataaaactattatatattgtatgtataattatatattattaatatatccattacatattttatgtgtaactatatacaattatttgtaatatatgattattatgtagtatgcatcattatatgtaaatatttataatatataaccaatatattatacattgtatgtgttttaattatgaaatattccatgtaatgccacacattttatattattatatattatctataaagagagatgttatattgtttttcataaaacaacagaaagagaaagtttaaggagttagctcacctgattgtggaaagctggcaagtttaaagtctgcacgctaaaccagtaggcaagacacccagagaatagttgaaatttaattccacaggcagtctgctggccgaattctctcttcttccagggagggcagtctttttttaataaggcctcccttgaactgattggatgagcccaccacattaygaagaataatgtgcttcactcaaacatactgatgtaaacattaaccttagttaaaattaccttcacagaaacatctagaataatatttgactaaatatctaggtaccttggcatagccaagttaacacat

SEQ ID NO: 621437 - DNA, 621 bp, Homo sapiens
tataattattaataatataaaactattatatattgtatgtataattatatattattaatatatccattacatattttatgtgtaactatatacaattatttgtaatatatgattattatgtagtatgcatcattatatgtaaatatttataatatataaccaatatattatacattgtatgtgttttaattatgaaatattccatgtaatgccacacattttatattattatatattatctataaagagagatgttatattgtttttcataaaacaacagaaagagaaagtttaaggagttagctcacctgattgtggaaagctggcaagtttaaagtctgcacgctaaaccagtaggcaagacacccagagaatagttgaaatttaattccacaggcagtctgctggccgaattctctcttcttccagggagggcagtctttttttaataaggcctcccttgaactgattggatgagcccaccacattacgaagaataatgtgcttcactcaaacatactgatgtaaacattaaccttagttaaaattaccttcacagaaacatctagmataatatttgactaaatatctaggtaccttggcatagccaagttaacacat

SEQ ID NO: 621438 - DNA, 591 bp, Homo sapiens
ttgattcataattgatatttgataaattattattaaatttaaacctgacagttttcacatttcagatttctctatttcatattacttcaagacttcattacaggtattaggtaatgtaattcttcttgtaatagggatatgaagatttcgtttgtagagtttcaattaatcaaatgtcatataacaaagttcatttatttctttaaactaaaaatggacaatatagatttcattcccataaaaataacttaaatatattatatgagcaagtagcccagctcttccactttcatcctgctgccaacattttgttgatggcactcaattctgtatgatacatagatattataagatgtaagtgcagctggcctagagtgtgagaaatgaagctgcttctgttagttyctatccatcatgcacgttgacatgacacatgttactctcagtgtggacatgattggacattagcagtaacttatttagtattatgtggtggtatgtttagcagtggaggctgcctcagcatccaagaatttatgcaagatatgaaaaactaaaatagaacatttattctatactactgtatagagc

SEQ ID NO: 621439 - DNA, 538 bp, Homo sapiens
tttagagaatttcaactagaaagctatgatggaaagtgaatgataagagatgctaaaaattgccccatgggaagaaaactatgaaggattaaaatacttcaaaaagaatataagtggacatttagataataattttccatgyaaatccaataatacaacgttttaacattggtttttaaatagtttttcttaactagcctaaataatacaatctttagtatggttaatatccttgatttggtaaacctgccttaagtacacatgagaatctaattgattgcattggacagctcttgtaatccttttcaagtactttcattcacactacctgcttctgccagtcttgcagcttctaccagcttcagaacaacctaacagttctttgcatttggcccacagccacatagctcttgcttccttctcttgtgcttcctcgagatagagaaatgagatgctgggagaatccattcaagattaaaatatggacattttagaagttcacggctacctctgagaccccataaccaataatgaatgg

SEQ ID NO: 621440 - DNA, 599 bp, Homo sapiens
cactgttcactaggctgtctaggaacttctctcagtttttagacagaatgtagtattcagttgctttttctttcttaggaccaagctgaactatctacagacttcagatcataagccaytgcattaatgttgttttagcacttgacatccagaaatcaaactggaaagatggtggcataaaaaatagttaatgcctgtacagaaattcccagtgaggaacaaaacagatagaatcaagagtagaagcattaacagaaaatatgacaaatttaaagaatatttaaagaatacatggaagtatactgctaggtagagattattaaaaactttttggggggatcccttttgtcatccacagagatgaaaaccaattttttattctggttgtgatgagaaaacgaatggagggcaatcttgagaaccacacttaaaagaacaaaggcgggcaaatgtgacgatataagaaagattttggcacctgccatctagtcatgttagctaatacaatcaaatagcatactgatgcattagggatggagcaagaaatgataaaatatagttgtaatataagttttttctacctcttaactaaaatattg

SEQ ID NO: 621441 - DNA, 478 bp, Homo sapiens
ccctattgtcctgcctcatttcccccctgagagacatgattcccatacatctcatgggaggcagagaaactgatggtcttttttctgtgactgcttcatgcggacttggggtgcagtctctacctattggggatcaaataacttttgccttgttctgtctagtggatacatggtagtttcttgatggccaggggtggtgtcttcacctgaaactgtctggaagccttgtcgcatgatcatctgaagcttgatggtatctaggtgagaagaaatgaatttgtttaagagatttaacaaacatggtccaaaaaccaaggcaagtatgatattratagtgggctggccagaggaaggagccatgaacccaaacttaccattttttaccaggagccccatgactcagatggtggttgtcatatcttagagtcccgatcagctagttttcaggtggcgtctcttattaatcctgattggttga

SEQ ID NO: 621442 - DNA, 464 bp, Homo sapiens
taaaaggggactactatagttgacttgaacaataccatctgccaactttgcatacatgatatttataaaatattgtaactaacaatagcaggatagataatttgtttcaaagtayatgtaacatttatcaatttagactgtattcaggggcttaaaacaagacccagaaagtatttaagtaataccatatcaatttagaccatattctgggatttaaaacaagtcctagaaagtatttacatcatggttctctgaccataaattagcaacctatttgctgtataaataaacaaactctaattttagtggcttatctaacaacttttattatcttatagtttttgtatccagaatgttagaacctctcaaaaactgtgatcaagatgttacctaggattgcagtcattacaagagtagattgaggaaggatctgctttcagaatttttcatgaggttgttagcag

SEQ ID NO: 621443 - DNA, 536 bp, Homo sapiens
atgaattctcatgattttttttgtaaattgtacaactgaaaatctcagttgtacaattttctcagcaatgtttatttgctttagtgcaagcaggggaaaatgagcatgatgacaatggtaacaatactcattgaggccttaatttgtgcactctcctaaatgttttaaatataatgaattttaaagaatcctggatgtsaaagttgcaaatctaatattaatcacagaggagagttgaacaatgtataccatcaagtgactataattgcagatcagcagtgagaaggcagggcatgatatcagcaaataataacttcagagaagctagaagaaacagcttggagacagccatggaacactggaaaataagggaagcattgtcccacatcttgaccctgggatacacaataagggaatgcaatgtcctcaaggacacctagcttttcatctagctaataggtagcaagagcattcagaggagatgttgaggatgcagtggggtttgcccgacacaggtggagcactccagaaggtac

SEQ ID NO: 621444 - DNA, 536 bp, Homo sapiens
atgaattctcatgattttttttgtaaattgtacaactgaaaatctcagttgtacaattttctcagcaatgtttatttgctttagtgcaagcaggggaaaatgagcatgatgacaatggtaacaatactcattgaggccttaatttgtgcactctcctaaatgttttaaatataatgaattttaaagaatcctggatgtgaaagttgcaaatctaatattaatcacagaggagagttgaacaatgtataccatcaagtgaytataattgcagatcagcagtgagaaggcagggcatgatatcagcaaataataacttcagagaagctagaagaaacagcttggagacagccatggaacactggaaaataagggaagcattgtcccacatcttgaccctgggatacacaataagggaatgcaatgtcctcaaggacacctagcttttcatctagctaataggtagcaagagcattcagaggagatgttgaggatgcagtggggtttgcccgacacaggtggagcactccagaaggtac

SEQ ID NO: 621445 - DNA, 536 bp, Homo sapiens
atgaattctcatgattttttttgtaaattgtacaactgaaaatctcagttgtacaattttctcagcaatgtttatttgctttagtgcaagcaggggaaaatgagcatgatgacaatggtaacaatactcattgaggccttaatttgtgcactctcctaaatgttttaaatataatgaattttaaagaatcctggatgtgaaagttgcaaatctaatattaatcacagaggagagttgaacaatgtataccatcaagtgactataattgcagatcagcagtgagaaggcagggcatgatatcagcaaataataacttcagagaagctagaagaaacagcttggagacagccatggaacactggaaaataagggaagcattgtcccacatcttgaccctgggatacacrataagggaatgcaatgtcctcaaggacacctagcttttcatctagctaataggtagcaagagcattcagaggagatgttgaggatgcagtggggtttgcccgacacaggtggagcactccagaaggtac

SEQ ID NO: 621446 - DNA, 536 bp, Homo sapiens
atgaattctcatgattttttttgtaaattgtacaactgaaaatctcagttgtacaattttctcagcaatgtttatttgctttagtgcaagcaggggaaaatgagcatgatgacaatggtaacaatactcattgaggccttaatttgtgcactctcctaaatgttttaaatataatgaattttaaagaatcctggatgtgaaagttgcaaatctaatattaatcacagaggagagttgaacaatgtataccatcaagtgactataattgcagatcagcagtgagaaggcagggcatgatatcagcaaataataacttcagagaagctagaagaaacagcttggagacagccatggaacactggaaaataagggaagcattgtcccacatcttgaccctgggatacacaataagggaatgcaatgtcctcaaggacasctagcttttcatctagctaataggtagcaagagcattcagaggagatgttgaggatgcagtggggtttgcccgacacaggtggagcactccagaaggtac

SEQ ID NO: 621447 - DNA, 575 bp, Homo sapiens
aaaataaataaataaatagcttttgctaccaaattgattccattggtagatatgtggatgccaacaaatcaatgttaaaaatttttgaaaagcatatgcagtgaacagtgaatacaacagtatgttgcataatatacatttacacaaccataggaatgtgtatgtttactctgctttaataatttggtgtcccaggagataacataaacaggatgcaacatgctaaatgcctatagtcagcagacattataattatcaatatttagaaagaaaaaatcaaactgccctaatttctcattaatatgacatactgaaagtcatgaacattcttggtgatgtcataattatgagagatcaagaatgagtctgtactgaaataatcttcgttaacttttctatgatcaatcaaccctaaaaatttccagtattactgatgttttaaaaactctaaggaggacaacatcaccaacwcggcaaaataggaagctcctgactcttcctccacccacaaatccatcacataaacatttatccatggatcaattctctctgagagagtcagagagcagtcagga

SEQ ID NO: 621448 - DNA, 545 bp, Homo sapiens
gatttttgcaatccatgtgatttgtttagctcacattttttcttgattcttacattgagaaatgcaacgggtaaacattgaaacctgtacaaatggtaccagcttgacaactgcrtggttttatatgcaaaaacaatggattgctgggtatttatagattgcattccaggtatgcagttacatttattaatgcacagtatttgtgttcttaactaaatgttttaagtggttattaacttttatttcacttgtccagtgacttctgttggttttgaagtataaccaatgaatgtattcaggatggaggggccttactgagggttagaacagatgctgtaaagatctagttagcaacatggatcctacagtcaagcaacctaactctgtctccactattctcttatgagagtcatttgacttcagcaggcttagcttataaactgggattataaaagacctgactgtgataatcagatacgtaaagcaaataacactgtgtctggcatatagaaggtgcacaactaatgctaagttttacatagttt

SEQ ID NO: 621449 - DNA, 545 bp, Homo sapiens
gatttttgcaatccatgtgatttgtttagctcacattttttcttgattcttacattgagaaatgcaacgggtaaacattgaaacctgtacaaatggtaccagcttgacaactgcatggttttatatgcaaaaacaatggattgctgggtatttatagattgcattccaggtatgcagttacatttattaatgcacagtatttgtgttcttaactaaatgttttaagtggttattaacttttatttcacttgtccagtgacttctgttggttttgaagtataaccaatgaatgtattcaggatggaggggccttactgagggttagaacagatgctgtaaagatctagttagcaacatggatcctacagtcaagcaacctaactctgtctccactattctcttatgagagtcatttgacttcagcaggcttagcttataaactgggattataaaagacctgactgtgataatcagatacrtaaagcaaataacactgtgtctggcatatagaaggtgcacaactaatgctaagttttacatagttt

SEQ ID NO: 621450 - DNA, 540 bp, Homo sapiens
tgcaacaagggacatttaattagcaagcctcccttgttagaacctcgctaaattaattattgatcttgttttagtatagattcttccctgttgccatgccacaataattgcagcaaagttgtggttagctggctctcggacactttggaactgctctccagcttttaaagttgaataaatgacatrtaagagctttccactctccttaagttccactgtatttttactcagacacaacagtggccatttggggccagagagccacaaatgctcctgaaattatacggttctccaaaagcaaaataaaacaaaattttaaaattagcaaaccgtcttcttccacccaccccccaaacaattctgaaagccatgttaaaatgtaccctgtaagccttcctataagccttagttcttcagttgccttccttcaggcaagagaggtgtcccacatggggtctgagctttaacaccacagattccatgaaacctgttctttgattatctcctctttaaggaatgggaatatgatgttggattcag

SEQ ID NO: 621451 - DNA, 555 bp, Homo sapiens
atttactgatgcagagtgtgggctgcctggcttcaaaatctaccaccaccaaccctatagtttcttcatacaggtctaactcacctgttgttaaaatgatttcaaggcatttatctcacataatcatcattttatcatcataatatttattttatgatcactgtgatcatagagaagcaggttttgtcttgtgaaagttacttaccttttctctgcatcggtgtcctcttctgctgaatgcctatttatattgggcatttgtttctaccttcccctgtgatctgctctacacacatacacttgttgcaggagcaagaagtctaatactacatttcccagacttcctaataaccaggatttgtgatgcaatcttgattctgccagtgcaacatatgaccacaagatttggaagacaaaacacgaggkagatgtcattcttttgtggctggaacaattaactagcaatttccaacacatgagtttttgtagtggtcagagttcacattccagaatgtagtcacgatctcctggtcactagacattttagtatgggaa

SEQ ID NO: 621452 - DNA, 597 bp, Homo sapiens
ttaatacagctttgtgatacattctgaaatctaatagtgtgatgccttctgctttgttctttctgctcaggatttctttagctattggggtcttatgtggttccatacatattttaagattttttttctatttctgtgaagaatgtcactggtattttgacarggattgcattgaatctgtagatttatttggggagtattgttattttaacaatattaattcttctgatctatgaacatgtgatttattttcatttgtttgtatcttcttcaatttctttcaccagtgttttgcagttttccttgtagaagcctttcatctccttggttaaatttattcctcggttttgtgtgtgtgtgtgtgtgtgtatggctgtcataagtgggattgccttcttggtttcttgttttggttgttatttatttacaatactgattttgtataagtattgtatcagaaaaataatgctgattttggatactgattttgtattctgctgtaacttgactgcatttgtttatcttttctaagagcttattttggtagagtctttaggtttttctatatataaaatcctattatctgcaaacacagac

SEQ ID NO: 621453 - DNA, 571 bp, Homo sapiens
tacttgacttcaacttttcctatttataaatattaagctgcacctgccatgattttatcactaggtgccccatgatcattagccattgccacagatctctgtgkgtcaaaatgttgcagtctttctgctccttagctcagctaggtttgagatcttcaggaagaactaggtgctctgacactggaaagtgagtggactagaatttattaagtgaaaggaaagctctcaacaaagagaggatgtggggtgagtggttcccttacctgaaggctggaaagccccttctctgtaactgggtccagggccttttatggactcagaatgaggtatgcatgctgattggtttgtgagtatgaaaataaggttgaagtaaacacaccactcaaaggtgggcatgacagtgtagaaaaccaattaggaaaggtaggtatatgtaaaatagatgaagggtgggcatcaatcagaggacagcatgccaaacaggaagacaagttctcaatttggtccaaggatttcacttgtagcttggctttcaggctttaaactgtcttcagcttggaggtagggtttc

SEQ ID NO: 621454 - DNA, 571 bp, Homo sapiens
tacttgacttcaacttttcctatttataaatattaagctgcacctgccatgattttatcactaggtgccccatgatcattagccattgccacagatctctgtgggtcaaaatgttgcagtctttctgctccttagctcagytaggtttgagatcttcaggaagaactaggtgctctgacactggaaagtgagtggactagaatttattaagtgaaaggaaagctctcaacaaagagaggatgtggggtgagtggttcccttacctgaaggctggaaagccccttctctgtaactgggtccagggccttttatggactcagaatgaggtatgcatgctgattggtttgtgagtatgaaaataaggttgaagtaaacacaccactcaaaggtgggcatgacagtgtagaaaaccaattaggaaaggtaggtatatgtaaaatagatgaagggtgggcatcaatcagaggacagcatgccaaacaggaagacaagttctcaatttggtccaaggatttcacttgtagcttggctttcaggctttaaactgtcttcagcttggaggtagggtttc

SEQ ID NO: 621455 - DNA, 593 bp, Homo sapiens
acttacaacaagtgtgatgacctatatttgtaactaaaaagtgaaagggttgttctttgtggtagccctggccagagctgacactgatgttcagtcctctcccaggccttgtattacaagagacaatggataggcatatccatacagtggtcagcatttcagagttgcaatatacaggtatatacaggttgcataattatgaatattgtcaagatttacaataaagaatcattggccaggcatggtggctcaagcctgtaatcccagcactttgggaggccaaggcgggcagatcaactgaggtcaggagtttgagtccagcctggccaacgtggtgaaaccccatctctactgaaagtactaaaattagcagggcatggtggcatacacctgtcatcccggctactcaggaggctgaggcaggagaattgcttgaacatgggaggcacagtttgcagtgagccgagatctcgctgcactccatcctgggcatcagagtgagactytgcaccccccacaaaaaaaaaaaaaaaaacagaatcattatttaaaagagtgctgtcataattatacaacctgtcaacaaagtagca

SEQ ID NO: 621456 - DNA, 421 bp, Homo sapiens
tccagtataaaaaattgcctaactggtctaatagaggtgaaaaccacactacaagaatttcacaatgcagtcacaaatatgaacagcaaartagaccaagctgaggaaagaatcccgaaacttgaaaactggttctctgaaataagacagacataaataaagcaaaagaatgaaaaggaacaaacaaaattgctgaaatatatggaattatctaaagaggccatatctatgaatcattggcatccctgaaagggatggggagaaagcaaacaacttggaaaacatatttcagaatagcactcgtgaaaacttccccaactcactagagaggcaaacagccaacttcaggaaatacagagaaccctgcaagattctacacaagaagatcatccccaagacacataaccatcagattttccaa

SEQ ID NO: 621457 - DNA, 421 bp, Homo sapiens
tccagtataaaaaattgcctaactggtctaatagaggtgaaaaccacactacaagaatttcacaatgcagtcacaaatatgaacagcaaagtagaccaagctgaggaaagaatcccgaaacttgaaaactggttctctgaaataagacagacataaataaagcaaaagaatgaaaaggaacaaacaaaattgctgaaatatatggaattatctaaagaggccatatctatgaatcaytggcatccctgaaagggatggggagaaagcaaacaacttggaaaacatatttcagaatagcactcgtgaaaacttccccaactcactagagaggcaaacagccaacttcaggaaatacagagaaccctgcaagattctacacaagaagatcatccccaagacacataaccatcagattttccaa

SEQ ID NO: 621458 - DNA, 582 bp, Homo sapiens
acattaataattacccatccctggggcacagggaggaaagaaaacatttcagggctattagacaccaaacaccactttcaaacggggcttgtactggtgagaaaggggatggccattccactgtccacacttggagattctgcaaagaggcttccccttgcaatgattctttatgcagcccatatttttctgtgagaagtggcaagacagaaatgaaagctgtgaattgatctgcctgcttagtaagccaagcttataaaagaaaaaaatttgctcatgtttcctgaccttgtcaccttgtttaagagactgaaagaacctgacctttccttctaccattttgtctgcttctkcaacttggcatgaattgtgatttggaatagagttaaaatctcttttggtgttagacttattcaaggaaaaatatatccaaggatatataattctgaacttccaagaaaaaatcctaaatgcagcaagtaatgcattttaaaggaaacgtgaaagtataatttgtgttaaattgttaaagggttttaaaacattaaaattcatttattaaaataacttgcattttacatg

SEQ ID NO: 621459 - DNA, 526 bp, Homo sapiens
cttagggagtttgttaccaccagacctgctttacaagagatcctgaaaggagcgctaaatatggaaaagaaagacccttgccagccaatacaaaaacatacttaagtacaaagaccaatgacactataaagcaaaacacaaacaagctggcataataactagctaacaccacaatgacaggtcaaatctatacatatcaatatgaaccttgaatgtaaatgggctaaaagcccccatttaaagggcacggagtggcaaacttgattaaaatgcaacacccaattgtatatgatmttcaagatacccatctcacacacagggacactcataggctcaaaataaaataatggaggaaaatctaccaagcaaattgaaatcagaaaaaagcaggttttacaatcctaatttcagacaaaacagactttaaaccaataaagatcaaaaaagacaaagaaaggcattacgtgatggtaaagggtccaattcaacaagaagatctaactgtcctaaatatatatgcacccag

SEQ ID NO: 621460 - DNA, 554 bp, Homo sapiens
ttggtttagaccactgataagaaattttctgacaatttggcaacagaaatataagattctgttattgtaaaactaacaaataacaagatcttagaaataaactctagattccccgaacatatcagagtaactgagacaggataggaatatcttttacctgagtaatatcactacccctgagtagggttctcattagaacaaaaccactgtgaggacaaggaaattagtgcctagaggaaaaatataaaatatacatattctttaaaatgttttctagagcctgagtccataaattttatatttgctattaaaatacagcaaattgccggcaagaaaagaaaatccagcagaggctgccagctgtccagcaaaaatgaaaataagattcttccttcttccwctgtaaaaaagttgtagttgtgacatcactgcccagcaagaaactgagctccccagcccccatgctctaagtgtaggctatgattaacagcttcaccatgggactggagcatacattatgtgtttaacttgtttaagcataattccctggcccc

SEQ ID NO: 621461 - DNA, 464 bp, Homo sapiens
ttacattctttgtaaatttgtaaattgttatagataactttcaaggaagatgtttgcacccatggtattgtttctctaagattctctaccwccttgaaagcagaaagcaagtcttctacacttactcattttgcaccatgcctggcgcccagcaggaatttaaagagaatattagaactgtaagtaggtaaaacaccttaccctcatgaagcaatgaagcctaagggcccatgtccacaaagacgatggcagagctaagagaagacaagagtcttgcctcagtgcagtggttttataatatttgctggttgatacatatgacactcgaatcaaattacttaatattagctatcaatcttatggtgaattttaaaaagacaattgcttcccttctctgatgtttgtctaattacttgcattgactagttctagcttatggctgtgttcaaaaaattcaactagat

SEQ ID NO: 621462 - DNA, 599 bp, Homo sapiens
tctataaaagactaaaattgtttttatgaatatcctctagtcacctcagtcttactaccactgtagtgatgtattaactgatttctagggttttttcactggagattttggggaaaaggtagggaagtgagcactttttaaaacaaattttaaaatatttcaataattcatattattttgagaattagtacccttttggaaactcattaatgaaaaaatattatccagtgaatattttctaagatttataacagatgggagttgcaaaatattaaaataatttagtgttctagcaaaaatacctatgaaaatttatagctgtgatgttgtgtgacacttttttggaggacaggatataacacacatgcttctgattatagtacttatttttaaggtttgtttagcaaaattcctaaccataaattttcctagctgaataattcatttaattataaatacagatggcttttctaataaggttgcctttcttattctaaaggttacaattttcttattgttgttattttctgggatgccagtcaatcagggcttcctratgatattacttacctatttattccactcagcacagagcatag

SEQ ID NO: 621463 - DNA, 545 bp, Homo sapiens
atttacacaaactgctttaaacaaatatgatttttattctatgtagtttttatgatcttcaaaactgatggtattgacaaaacaatctttagatattttaataaagtgtatttttgctattcttattattttttaaacccaatttattgtatttaacccasttgaacttttttatcatctctgttctttcccctctcagctcctaccacttgaaatattttctatagggtttcttttttaaacttttattttaggttcatgggaacatgcgcaggtttcttatacagattaactcttgtcgtgaaggtttgttggacagattattctgtcacccagatactaagtctagtactcaatattttttctaatcctctccttcctcctaccttccaacctcacgtaggccccaatgtatgttgttcccctctatgggtcaatgtgttctcatcatttagctcccacttacaagtgagaacatgtggtatgtggttttctgtttctgcattagtttgttatggataatagaattcagttccatccatgtt

SEQ ID NO: 621464 - DNA, 573 bp, Homo sapiens
ttctgaaacctagtaaagatggcaatatccaagtacaagaaggttatagaacaccaagcaaatttaaccccyccccagaaaaaaacttcctcaaggcatttaataatcaaactcccaaaggtcaaggataaagaaaagatcctaaaagcagcaagagaaaagaaaaaaaataacatacaaggagctccaatatgtctggcaacagacttttcagtggaaaacttaaaggtcaagagagagtggcatgatatatttaaagtgccaaaggaaaataacttttaccctagaatagtatatctagcaaaaatatccttcaaacataagggagaaataaagactacctcagaaaaacaaaagctgagggatttcatcaataccagacctgtcctacaagaaatgcaaaagagagtatttcaatcagaaagcaaaggacattaatgagcaataaataatcacatgaaggtacaaaactcactggcagtagttagtgcacagaaaaacgtagaatattacaacactgtaactgggatgtgtacactactgttattctaaatagaaagattaaattatgag

SEQ ID NO: 621465 - DNA, 648 bp, Homo sapiens
tagttttcttcttgcttgtttcttgatgcaaacagtgttaagttgttatcaggttaaaataatggattataaggtagtatttgcaagcctcatggtaacttcaaacacaaaacataaaaagcaagaaactaaatcatatcaccagagaaaatcaccttcactagaggaagacaggaagaaaggaaagaaagaagaaagagaataccagaaaacaaataacaaaatggcaagagtcagtctgtacttatcaataataacactaaatgtaaatggactaaactctctgatcaaaagacataccatggcagaatgattttaaaaaatacaagacccattaatctgttgtctgcaagaaacacactgcacctataaagacaaatatagactggaaataaatggatggagaaagatattccatgtaaatggtaaacaaaaagagcaggagttgctatgcttatagcagactaaatagattgcyacacaaaaactagaaaagacaaagaaggtcactatgtaatgataaaggggtcaaatcagcaaaaggatataacagtttaaaatatatatgcacctgccacttgaacacccagatatgtaaatgaaatattattaaagcttaaaagagagataggccccaatacaataata

SEQ ID NO: 621466 - DNA, 569 bp, Homo sapiens
caacattaagaaggatttggaagaagttgattgaatgattttgaggagttcaaggctttattagaggaagtaactgtagatatgttagaaatatcaagagaaccagaaatagagcctgaagatgtgactgaattgctacaatctcatgaaaaaacttgartgtgtgaggagttgcttctatggatgagcaaagaaagtggtttcttgagatggaatctactcctggtgaagacactgtgaacattgttgaaatgacaacaacaacaaaatatttaaaatattacatagacttatttggtaaagcagtggcagagttggagaggattcattccaatagttgaaaagtgttctgtgtgtaaaacggtatcaaacatcattacatgctacagagaaactttttatgaatcaatcggcacagcaaaattcacattttgttttttaaagaaatcgccacagccactcaatcttcagcaaccaccaccctgatcagttaacagccattgagactgaggcaagaccctctaccagcaaaaagatgatgactcactgaaggctcaggtgatcgttag

SEQ ID NO: 621467 - DNA, 602 bp, Homo sapiens
ttttagttatttgagacatcttcatactgttttccatagaggttgaactactttttatattcccaccaacggtgtataagtgttcccttttctcctcatgcatgccaatatctggggtttttatatttttttaataatatccattctgactggtataagatgatatttcattgtggttttaattagcatttcctgatgacatcttttcaaaagaagaaatgcctgttcatgtcctttgctcagttcttactggggttgttttcttcttgttcagttatttgatttccttgtagattctggctattagtcctttgtcagaggcataatttgtaaatattttttcccattctgtgggttgtctatttactctgttgatgggttcttttctgtgcagaagactttgtttaatgaagtcttatttatctatttttttgttgcatttgctttgcttttggggtcttcatcataaattatttgctttggtcactgtccataagagttttccctgggtyttcttctaggatttttcacagtttcgggtcttacacttaaatctgcaatccatcttgggttaatttttgtatatactgagagacagcagt

SEQ ID NO: 621468 - DNA, 554 bp, Homo sapiens
ttctgtgcagaagactttgtttaatgaagtcttatttatctatttttttgttgcatttgctttgcttttggggtcttcatcataaattatttgctttggtcactgtccataagagttttccctgggtcttcttctaggatttttcacagtttcgggtcttacacttaaatctgcaatccatcttgggttaatttttgtatatactgagagacagcagtccagtttcattcttctgcatatgcctagccagtttgcccatcaccattcaatgaatcrgatgtcctttccccattgtttatttttatcgactttgtcaaagatcagttgattataagcacgtggccttatttcttggttctctattctgttccattaatctatgtgtctacttttgtactagtaccatgctattttagttggtgtagccatgtagtataatttgaagtcaggcaatatgatgcctccagatttgttctttttgcttaggaatatgttcactattcgggctcttttttggtttcttatgaactttaggattgttttttatagttctg

SEQ ID NO: 621469 - DNA, 621 bp, Homo sapiens
gcgtagttcagggatcagtcaaggacttagatagggtttatatgctgatgtgggggacttcacctcaactacctccctgctttccaagaatcatccccttcttttcatctacctgggcaatactgaactctatcttctgatttctcaagtcagtaagactacaagttctacttgagttccagtcactctgaatgaagaatgcccttaagaagaaaattcataaatgtgaaattcactcagcgaagtttcccttttcaggagtctacactcctccagtttctgcctgctgttggtcactatacagtgccttcaaatagtggttcttttttatctagaatgtattattcttttctgcgagatggttaatccagcactagctactctactactactagaagcaaaacttcccaattatgttttaagataaactaagacctaaattttacttgagtagaaaacagtaataagcaaggcccctactttctattgaaaaatatttaaaatctatgcacttattctacaaagtcaaagatttttaaaatgcaattattctattgcatgtttaarttaccatctttcctttaaaaatattcagaaattcaattgtaataacatttgctc

SEQ ID NO: 621470 - DNA, 660 bp, Homo sapiens
tctgagagtctgtttcctagggcctatttttgtaccaattattataatttttaggatcctgggagaaaatagtttctgcatgcattgagggtgaatatgcaatatgtgatcctgcattcaaccctggactagaatttttggatagaagacattattaagtcaattggaagaatttgagtaagatctatagttcagataatagcattgcattaatgttaattttyctttttttcaaataatgctatggatatgcaaggtaatatctttagttcttgtttttaggaaaatacacacattgaatttgctagactgggcatcagacatgaaactttccaataattcagaaaaagtaataattacccacatatgcagagtgattgtatatgatattaaacattggggaatctgagaaaaagatatagatcagttctgtatattaaattattttctaaatatttaaaaatatatcaaaataaaatacagaagaaagagtgttggaaaagaattcaagagagtgtctataacatgggcaaagttaaagataattaacaggaaggatgaagtatcccaagactggcaacaggagggagttgctaacaattctgtgtttgaaagaacaagttaactgagcagttactggaggtcagcaagacttgtacc

SEQ ID NO: 621471 - DNA, 467 bp, Homo sapiens
tatccgcgcaccgtgggatgttgtgcaagtcactctcctccctgagcctcagtttccttacctgtgctgtgtgcatgaaagtttccacttgcctgcttcacaggaggktgaccacatgggtacataatctgacacggggccatgcaaacagcaggtgttcacacctgagttgctgcttcctctttcctatctgggctactgatgtgcagagtgttacagagagaagaggtggcccaaggagctactctgacgttgggtgcagagggcaggcagggagacccactggtgggagtgacgcagatgtggggcagcaggaaggaggcccaagggcaggaggtgagaatgaaagaggtgagtaaggccacctagagccaagcagagccactctgcaggaggagtgagaacagcaccgacttgccgtgtcatacaaatgataaacaataataataacatgtgtttgtgtgtaa

SEQ ID NO: 621472 - DNA, 578 bp, Homo sapiens
gcctgcttctcagcaaagatgttttcatccaccctcattttcccttcttgtttctgtgcccctcaatccccaccttctttgcagccctgggacccacctctctctctcacctctcagtgcctttacacaaaggactgccctcctgggatgctccctttctctcatggacccagctccaatatcaccttcccatgaaacctttctttactgcccagggacccccccagtcccctgtctctctcatctgtgcctgcttttattttagcacctgctgcatgataccgcatgacctactctcacrtccgtctcctgctaggcaggagtttcttggctgtcaggagctggtctcagtggctggtgctctgcaggggctgtatcaatctggctttctaaggcttcaaggatgaatctgtccatgttgcctttggtgagcggaaggagagtcactgtgaggacagaaagggcagagagctagtatagctatacaaacatactaggttccagaatgtactaggttcatgaaaaacaggaacaaatgctcagcaatagtccagaaatacctaggatgacccaaccca

SEQ ID NO: 621473 - DNA, 605 bp, Homo sapiens
ggaagggcgtggtggggtgctggaacccttggggacatgcaaaatagttttgcaggtaggaagaagaagtgtgatattgaaatactaaccatcaccatcatataccgagcacttatggtgtgctkggcatcgtgcaaagtgctttatctctaactcactcattcattcactcctttacattcactcatttagccttgctggctctggagccaaacagcctaggtttgaatcctggcttcacctcgtgtggctgactgtgtaaccctagacacacaacttcaccctcctttgccccagtctcctctgtaaaacagggtgataagagaaataaagaagttcacacatgtaaagtgcctagaacagtgtctgccataagagctcaatcaatattgttatttttactattgttactattggtactatttttactattgtcaatatcataattcattcacacattctttcaggaaatatttactctgctctaattacgtgatgggtgccgtgggagtacagcggtgaacttcaaaagacagtttctgccttcaaggatcctccactggggacacagataataaggtaacaaaaaattaaccaacaagaca

SEQ ID NO: 621474 - DNA, 605 bp, Homo sapiens
ggaagggcgtggtggggtgctggaacccttggggacatgcaaaatagttttgcaggtaggaagaagaagtgtgatattgaaatactaaccatcaccatcatataccgagcacttatggtgtgctgggcatcgtgcraagtgctttatctctaactcactcattcattcactcctttacattcactcatttagccttgctggctctggagccaaacagcctaggtttgaatcctggcttcacctcgtgtggctgactgtgtaaccctagacacacaacttcaccctcctttgccccagtctcctctgtaaaacagggtgataagagaaataaagaagttcacacatgtaaagtgcctagaacagtgtctgccataagagctcaatcaatattgttatttttactattgttactattggtactatttttactattgtcaatatcataattcattcacacattctttcaggaaatatttactctgctctaattacgtgatgggtgccgtgggagtacagcggtgaacttcaaaagacagtttctgccttcaaggatcctccactggggacacagataataaggtaacaaaaaattaaccaacaagaca

SEQ ID NO: 621475 - DNA, 575 bp, Homo sapiens
agggaatccaggagaagctggggtaacaaccctgagacaagaacagttagctttgggggcactgaattgtcttaatggaatgtggccaaatgtgattggggtaggggaggattacatctcacctggaagggaacaagagtgtttgtggtcatacctggcagtccatgtactggctcaattaggcaccacttgattggggctgtaaattctagaagggtggaacgcatgtttatcttttacactgcgaaatctcccaggcctaggacctagtacctagtaggggtttcaawaaataggtactgaatgataacaataactcatgtttattaagtgcttactagataccagacactctgctaagaactttacaagggtggtacacacctcagctgcaaatgcagctacatcaggagatagaaaagatcctgacacctgagtcctgctccccaaatgttttgctttaattggtttagggtgaaaaccggaccctggcattttttttcatgctctccaggtaactctaatatacagccaaggtggcgagtatcactttatacgcctcgcctcgtctaatt

SEQ ID NO: 621476 - DNA, 549 bp, Homo sapiens
ccttaagcagactgatgggctgggcgtggtggyttacgcctgtaatcccagcattttgggaggccaaggcaggaggatcacgaggtcaagagatcaagaccatcctggttaacacggtgaaaccccatctctactaaaaatacaaaaaattagctgggcgtggcagcaggcgctggtagtcccagctactcgggaggctgaggcaggagaatgtcgtgcacccgggaggcggagcttgcagtgagccgagatcgtgccactgcactccagcctgggcaacagagcaaggctccgtctcaaaaaaaaaaaaaaaaaaaagactgatgaatggaggcttggatggatggatggatggatggatggatggatggatggatggatgcttggatgcttggatagatggatggatgattgtggatggatgcatgggtggatggatggatggatgcatacatgcatgaaataaatcccttatatgcagtctcatacaggcttcagcatgtagaaactgagtctgtaagatagttctctcctttgtgtcaccctctc

SEQ ID NO: 621477 - DNA, 365 bp, Homo sapiens
atttgctcaatcaactcgtaagtctaggacaggatggacttcaggcacagcctgatccagggrctcagactgtgtctttctaagctggatttctctctcctccctcttcagctggatttctcttctgttggcttccttcttggaaaggcaatctccttatctccctcacatgtgagcttggctcccacgagctctgggaaagtctcagacggcagaggcctccacacccagggcttcaccactcagagccttagttttgcaatctgctgcctcactgctctccctgcccagtccttctatcctgaagattcatgacatatatcatgatgtcattttctttaattttaatttttatttatttattt

SEQ ID NO: 621478 - DNA, 365 bp, Homo sapiens
atttgctcaatcaactcgtaagtctaggacaggatggacttcaggcacagcctgatccagggactcagactgtgtctttctaagctggatttctctctcctccctcttcagstggatttctcttctgttggcttccttcttggaaaggcaatctccttatctccctcacatgtgagcttggctcccacgagctctgggaaagtctcagacggcagaggcctccacacccagggcttcaccactcagagccttagttttgcaatctgctgcctcactgctctccctgcccagtccttctatcctgaagattcatgacatatatcatgatgtcattttctttaattttaatttttatttatttattt

SEQ ID NO: 621479 - DNA, 622 bp, Homo sapiens
gttgcagcagtgggccaggtaggtcagtgccttcttgggcctstaggcagtggatgtggcattggcaatggcaatagtagtggtaagacaaacctttcactcccaagcagttcatgtagttgttgttcgtggctgtgacaggctgggtgaggcagtccctaggtccacaggtggtatgtgtaggtgcatgtaagctgctgtggtagtggcaggttgggtggatccatcttgaagcccaaggaggaatgcttagatgcaaatggtggtggagtgggctggataatccctaggcttctggacagcatgctttggcactgggattgcagggggtagaaatacagaatatacattctcagcacatggaaatttctccaggatagaccatatattaggacatgaaacaagtctcaacaaatttataaattcaaagttatatcaagtatcttctcaaaccacaaatgagtaattctagaaattagtaaataggagaaattggaggaaatttgcaaactgtaaaaacacacggaaattaaacaaaatgctcctgaatgaacactggttcaaggaagaaattaaggaagtacccaaaaatttcttaaaacaaatgaaaatcaaagcaacg

SEQ ID NO: 621480 - DNA, 622 bp, Homo sapiens
gttgcagcagtgggccaggtaggtcagtgccttcttgggcctctaggcagtggatgtggcattggcaatggcaatagtagtggtaagacaaacctttcactcccaagcagttcatgtagttgttgttcgtggctgtgacaggctgggtgaggcagtccctaggtccacaggtggtatgtgtaggtgcatgtaagctgctgtggtagtggcaggttgggtggatccatcttgaagcccaaggaggaatgcttagatgcaaatggtggtggagtgggctggataatccctaggcttctggacagcatgcttkggcactgggattgcagggggtagaaatacagaatatacattctcagcacatggaaatttctccaggatagaccatatattaggacatgaaacaagtctcaacaaatttataaattcaaagttatatcaagtatcttctcaaaccacaaatgagtaattctagaaattagtaaataggagaaattggaggaaatttgcaaactgtaaaaacacacggaaattaaacaaaatgctcctgaatgaacactggttcaaggaagaaattaaggaagtacccaaaaatttcttaaaacaaatgaaaatcaaagcaacg

SEQ ID NO: 621481 - DNA, 622 bp, Homo sapiens
gttgcagcagtgggccaggtaggtcagtgccttcttgggcctctaggcagtggatgtggcattggcaatggcaatagtagtggtaagacaaacctttcactcccaagcagttcatgtagttgttgttcgtggctgtgacaggctgggtgaggcagtccctaggtccacaggtggtatgtgtaggtgcatgtaagctgctgtggtagtggcaggttgggtggatccatcttgaagcccaaggaggaatgcttagatgcaaatggtggtggagtgggctggataatccctaggcttctggacagcatgctttggcactgggattgcagggggtagaaatacagaatrtacattctcagcacatggaaatttctccaggatagaccatatattaggacatgaaacaagtctcaacaaatttataaattcaaagttatatcaagtatcttctcaaaccacaaatgagtaattctagaaattagtaaataggagaaattggaggaaatttgcaaactgtaaaaacacacggaaattaaacaaaatgctcctgaatgaacactggttcaaggaagaaattaaggaagtacccaaaaatttcttaaaacaaatgaaaatcaaagcaacg

SEQ ID NO: 621482 - DNA, 622 bp, Homo sapiens
gttgcagcagtgggccaggtaggtcagtgccttcttgggcctctaggcagtggatgtggcattggcaatggcaatagtagtggtaagacaaacctttcactcccaagcagttcatgtagttgttgttcgtggctgtgacaggctgggtgaggcagtccctaggtccacaggtggtatgtgtaggtgcatgtaagctgctgtggtagtggcaggttgggtggatccatcttgaagcccaaggaggaatgcttagatgcaaatggtggtggagtgggctggataatccctaggcttctggacagcatgctttggcactgggattgcagggggtagaaatacagaatatacattctcagcacatggaaatttctccaggatagaccatatattaggacatgaaacaagtctcaacaaatttataaattcaaagttatatcaagtatcttctcaaaccacaaatgagtaattctagaaattagtaaataggagaaattggaggaaatttgcaaactgtaaaaacacayggaaattaaacaaaatgctcctgaatgaacactggttcaaggaagaaattaaggaagtacccaaaaatttcttaaaacaaatgaaaatcaaagcaacg

SEQ ID NO: 621483 - DNA, 615 bp, Homo sapiens
atttatgatgaagggcccaaaagcaaatgcaacaaaaatagacaaatgatatttaattaaactaaaaagtttcttcacagcaaaagaaataascaacagagtaaacaaagaaactacagaatgggagaaaatatttacaaattatgcctctgacaaaggactgatatccagaatgtataaggaactcaataagacataaaaacaaaacaaaaaataaactaccctattaaaagctgggcaaaggacatgaacagacatttctcaaaagaagaaatacaagcagccaacaaatgctgtaatgagaaaaaaaatgctcaaaatcactaatcatcagagaaatgaaaattaaaactgcaatgagagatcatcttacaccagtcagaatggctattaaaaagtcaacaaataacagatgttggcatggatgtggagaaaagggaatatttattcattgttgatgggaatgtaaattagttcattctctatagagaacagtgtggagatttctcaaataacttaaaatagaacgataattcgacccagcaatcccactaatggatgtccactcaaaggaaaacaaattattatattaaaaagacacctgcacttggatgt

SEQ ID NO: 621484 - DNA, 615 bp, Homo sapiens
atttatgatgaagggcccaaaagcaaatgcaacaaaaatagacaaatgatatttaattaaactaaaaagtttcttcacagcaaaagaaataagcaacagagtaaacaaagaaactacagaatgggagaaaatatttacaaattatgcctctgacaaaggactgatatccagaatgtataaggaactcaataagacataaaaacaaaacaaaaaataaactaccctattaaaagctgggcaaaggacatgaacagacatttctcaaaagaagaaatacaagcagccaacaaatgctgtaatgagaaaaaaaatgctcaaaatcactaatcatcagagaaatgaaaattaaaactgcaatgagagrtcatcttacaccagtcagaatggctattaaaaagtcaacaaataacagatgttggcatggatgtggagaaaagggaatatttattcattgttgatgggaatgtaaattagttcattctctatagagaacagtgtggagatttctcaaataacttaaaatagaacgataattcgacccagcaatcccactaatggatgtccactcaaaggaaaacaaattattatattaaaaagacacctgcacttggatgt

SEQ ID NO: 621485 - DNA, 560 bp, Homo sapiens
tatagtcccagctactcagtaggctgaggtgggaggattgcttgagcctaggaagttgaggctacagtgagccataatcgtaccatccagcctgtactccatccagcctgggtgacagagtgaggctgtgccacacacacaraaaaaagtatcttaagtcatattgtctaaagaagccatcagagttagagagttagaatacatgttcaaatattttgttaagggaataccacaagattaaaccagtaagtgaatggtgaaaagtacattaatgaaaaggaagaaaccaaactaagactaatttcaactgaagctccatcctcagtctgatcacatgagaagctctagggtttaaatttttcagttcatcccacattgataaaagaaagctgggctcttgtattccctaaccaagtatttattggctgtgagcttctgtagaacagagggcatggtataacccccaggactttctggatgttcacgaaagtaaagtgtctctatacccaagggcatactctgaagaaagtcgtgggtggaaacccataagtgcaaagctc

SEQ ID NO: 621486 - DNA, 628 bp, Homo sapiens
caggaaataggacatacagaatacacttcatttttctgactccagggaaagctcttactgtgacatcaacctctaaatattttgattgagctgtcagtgtagagtgttgtagtaaagttaacatttcagaaacagataatctagagtctttatgccaattttaccatggatgagctacgtgatcttagacaagtcaccttagctctctaattattaggttcttttactggaaaacagggaaacataccatttactttaaaatgcctggttaggattaatgacaatatataaaaataagttagcccaatgcctgrctcataaaaatgcattgataaatgagaaatatacctaaaatgaattatgtgaatataattattttaattatttctatgcatattataattcttgaaactcaagtacaagcaaatattctctcttcattttttttttttagatagagtctcgctcatgtcacccaggctggagtgcagtggcgcaatcttggatgactgcaactcctctcttgggttcaagtgattctcctgcctcagcctcccaagtagctgggattacaagtgtgcaccaccatgcccggtaatttttttgtatttttagtagagatgaggtt

SEQ ID NO: 621487 - DNA, 500 bp, Homo sapiens
  misc_feature 115: n = A,T,C or G
atgtacctgcttccccttcaccttcctccatgattgtaagtttcctgagctgtctccaaccatgcttcctgtacagcctgtgaaactgtgagccaattaaacctattttcaatanaaattacccagtctcaggtttttctttatagcagtgtgagaatggactaataacgcattccttataagaatctaatgtctgatgatctaaggtggaacagtttcatcccaagaccattcccccaccatccrtggaaaaactgtctaccacaaaactgtccctagtgccaaaaaggttggggaccactgtactattggatgttttgcagcacccctggcctctacccactagatgtcaatatcaatccatctgccaaggctctaacaaccaaaaatgtctccaaatattgccaaatgttccctggggacaaaatcatccacaattgagaagcacttgtctagatcatactgcctggttgtctctgtgtgagagagagagttagaaa

SEQ ID NO: 621488 - DNA, 599 bp, Homo sapiens
tattgttaaaatgtcaataccacccaaagtaatgtacagattcaatgcaatccttatcaaaatacctataacattcttcacagaaatagaaaaaacaatcctaaaatttatttggaatcacaaaagaccccctaataaccaaagcaatactgagcaaaaagaacaaagctaggggcatcacactacctgatttaaaaatataaaataaaactatagtaaccgaaacagcatggtactggcataaaaacagacacatagattcatgggacaaaaatagagaacccagaaatatatccacaartgtacagtcaactcatttttgacaaaggtccaagaacatccattgggaaaagtggtgctgggaaagccgtaacagaagaatgaaactatactcctatctatcactttatacaaaaatcaaatcaatatggattaaagacttaaatgtgaaacctgaaactatgaaactactagaagagaacattggggatgctgcaatgttttcttctagcagaaaactagctacttactagtagttccaaaaatgcactagaacattggtctgtgcaaatattttttgagtaaaacttcaaaagcac

SEQ ID NO: 621489 - DNA, 598 bp, Homo sapiens
ttgccaagttctacctttaagtgaaaatgtaaaacttcttgaattggtaaggaaaggaaaaaaatatataccaaggatgctaagatctatgctaagaatgattcttctatccatgaaactgtgaattagaaaaaggaaatttgtgctagttttgctgttgtacctcaaattgcaaagttacagccacagtacatgataaggcttcggatggaaatcacattaaatttttgggcaagagacatgatcagaaacacattctyactgaaggcaattgagttcagttctacactgaaattcagttatccactagggggtcttggaatgtatccctcatgaatcaaggggaactattagattgtaaacacaatcacccagcttcttgcttcttatcaatggttgattaggaatattgaatacaggtccttttcatatctctattgccaaatcacaccatgggctatcagtcctctcctggaaattgagtcattcagattatagagccaattccaaaaatcctagaaccaatttagtaaactcatccttaaaattctatttatctgatattgaatgttaccaacacaaataaatgataaatgtt

SEQ ID NO: 621490 - DNA, 543 bp, Homo sapiens
tctaaaattcatgtaaaactacaaaagactccaaaatagccaaagtaatcttgagttaaaaacaaaaaaaaaaagctggcggcatcacattacttaatttaaaatgatattacaaagactacaaattgggttcagtgtatattgctcgagtgatgggtgcaccaaaatctcacaactcaccactgaagaacttactsatgtaaccaaataccacctgttccccaaaaacatatagaaatttaaaaaaagttttaattatattacaaagctatagtagtaatcaaaacagcatagtgccagcctaaaaactgatatactgaccaatggagcagaatagagagtccagaaataaactcacacaaacaaaattaactaatatctgaccagggtgccaagaatacacaatggtgaaagaatagtctcttcactaaatggtgttgggaaaactgaataaccacttgcaaaacaataaaattggatcccttataccattcaaaaaaataatttgaaatggtttaaggaccaagaatttaagacctaaag

SEQ ID NO: 621491 - DNA, 543 bp, Homo sapiens
tctaaaattcatgtaaaactacaaaagactccaaaatagccaaagtaatcttgagttaaaaacaaaaaaaaaaagctggcggcatcacattacttaatttaaaatgatattacaaagactacaaattgggttcagtgtatattgctcgagtgatgggtgcaccaaaatctcacaactcaccactgaagaacttactgatgtaaccaaataccacctgttccccaaaaacatatagaaatttaaaaaaagttttaattatattacaaagctatagtagtaatcaaaacagcatagtgccagcctaaaaactgatataytgaccaatggagcagaatagagagtccagaaataaactcacacaaacaaaattaactaatatctgaccagggtgccaagaatacacaatggtgaaagaatagtctcttcactaaatggtgttgggaaaactgaataaccacttgcaaaacaataaaattggatcccttataccattcaaaaaaataatttgaaatggtttaaggaccaagaatttaagacctaaag

SEQ ID NO: 621492 - DNA, 604 bp, Homo sapiens
gtgcatccccaaccaatcagctgcatcaaactatctttgaaaaactctaacctctgagccttcagggatgctgatttaataactttgtctactaaatggttagccgggtgttaattaaactcttttttttactgtggtaaaaataccatggtctcagtgaattggtttcatctgtgcagaaggcaggatgaacctgtcaggggattacaataatgaaatggtagatgtggctataagatttgagactctgtctctttaaaaaagctactcatgttgagtgtattgtaaccacattagttctaaagacagtgaagataatcctcactttattggtttcaccttggtttttattgataggaaaaaagaagaataaccatatacatggctaatcccttggaaatctaaaccagtagagtgttgaccattagttaayacttttgtttgctttttctaaaaggcagttcattataaggggtattttagtatctttcttaagtaagtggtaaactctttcatcaaaaattattgtgaaatatttcagaacgcttacttttcttatcattaaaacagtggaggtgattatattcagggttcctattgtgat

SEQ ID NO: 621493 - DNA, 547 bp, Homo sapiens
ctagctctgccaagccataatgcaatctagattttttagcctgaagtcctcctgaattttcagtagcagtgatttgggatcaggtcatcaagtttctccataggactgtctttatggtgctgagacaatctcactccagagtgggagacctatttgggttgcccttgctgagctaagctgctctgtctcatcaggtacattaacaggagtgttaatgccaatgctttttatytagtaattaaaaagagtaactaaaagaaaaaaaattttaaaaagaaatacaatatctaacttaaaaaagtaagaaaatgttcagttttatttttattagtattagcattagaagtatgattcagtatgagtactttaaaacttagaaacagccaccagatgctaaaggttcacctgtgaccacaaacctagaactcttagcaagaaaaaatgtatagaaaggatagaattgaaagctgagaacctctggagaacacatggttgaagggtcactggcattgaaaactgaggctctttactaatactatttcctatt

SEQ ID NO: 621494 - DNA, 547 bp, Homo sapiens
ctagctctgccaagccataatgcaatctagattttttagcctgaagtcctcctgaattttcagtagcagtgatttgggatcaggtcatcaagtttctccataggactgtctttatggtgctgagacaatctcactccagagtgggagacctatttgggttgcccttgctgagctaagctgctctgtctcatcaggtacattaacaggagtgttaatgccaatgctttttatctagtaattaaaaagagtaamtaaaagaaaaaaaattttaaaaagaaatacaatatctaacttaaaaaagtaagaaaatgttcagttttatttttattagtattagcattagaagtatgattcagtatgagtactttaaaacttagaaacagccaccagatgctaaaggttcacctgtgaccacaaacctagaactcttagcaagaaaaaatgtatagaaaggatagaattgaaagctgagaacctctggagaacacatggttgaagggtcactggcattgaaaactgaggctctttactaatactatttcctatt

SEQ ID NO: 621495 - DNA, 474 bp, Homo sapiens
gaattctcatgtggtgttacctatcagataatgttagtatttctataatcaagtaaaggtttttatcttgtaaacaaataacgatactcaggaaaacatgaaatgctcttccaaaactttccatttttcattaatcaaggagaaaggcctctagcaaacagaccccattgcctcttggttgtagcattaacatgattacataggaatgcacagaaacatgaaatctatgacgtgtaaacttgtcaacaaggcatgtttatcaaatgctataragcatccatgtggccaaatatattgccaggatgctgaatggctccattcttttctttaggtagaaagcattaggaggcatttctgtggatgacaagatttcctgtagtggatttttgcctggtgatcatctgttaccccttcccctttcattatggtagttaaatgttcatccaggagtctagttcttgcccatggggcacc

SEQ ID NO: 621496 - DNA, 602 bp, Homo sapiens
tattgtaggttctcaatctgttttaaaagaacaaatcaatgaataaataaatgaatgacagtgacaacaagaagaaagagagagagagtaacaaggctcaggaactgcatggcttcctagaatcacaaggtggatgcagggatgcagttttaatgtatcagaaggaaaaaaatggtaccctgtgactagccaactgaaaagggaayctgagcagtgggaaagaactcacggaaacccaacttggctccttggaaatttctcaggaacagctacagacctgaatcagctatggagtcccatctgtagatccagtcacagagctctgaggacagtggtggaactgatagtagtggctgactcaagaggagaaagtaatttggaaagagaaaagggagataaacataagaatatttttcttttgtcaagagttatttcactacctgtttctagtttgaatgcctttagaaaaggattttgaaaagcatcacaaaaagattgtattgctctatttaaacatttttcactaagaagatctacctttctctctgccctgggaagatgacccatttggaaaacatcaacatgcttccttacccaccagc

SEQ ID NO: 621497 - DNA, 513 bp, Homo sapiens
agccagcagatctcatgagacttattcactattgtgagaacagcacgagaaagacctgccccatgattcagtgacctcccaccaggtacctcccacaacatgtgggatctcaagatgaaatttgggtggggatacagacaaaccatatcacttttcaacctccaggactgtgaggtggtaagttgtgctttttatacattattcagccagtagtattctgctacaagagcacaaaacagattaagacagaagaaaaagagtatgattgagtataaaggtacctagatgtgtatgtttcaagtttacatccctgccacactacacagaagtagttgggtataaatagtttatgaatcgatgagtgaaatgaacctagatttcagcatgttttcagcygagtgcaattcaaactactttattttactggtgacaagtgtctacacatgaaaatattctttatctatgtctatttatgaatactcacatatgccagtttgttttttgacagagagc

SEQ ID NO: 621498 - DNA, 569 bp, Homo sapiens
cagaagtagttgggtataaatagtttatgaatcgatgagtgaaatgaacctagatttcagcatgttttcagctgagtgcaattcaaactactttattttactggtgacaagtgtctacacatgaaaatattctttatctatgtctatttatgaatactcacatatgccagtttgttttttgacagagagcttggtttaagtgtggcacaacagatagaacatgttctataaaatgggcatgatgcttttttaccttaatggttttgygaaacactgtttgaatgcccattaaaatggcaaaaatttaatttctctttaaatgatttgataagtatcattacgctgattcatagcaacaaatactgagattttcataattacacagcactgtattcttggtaagttaaaaagagcaaagggataaagggtaagtggtctggggaaaattcagctatagaaaagttttttcaatgttttagactattttaaatttcaattgtcctgcagtcattttgcatctgtatttctaataagagactaaatttcagttttagaaatttacccctaaa

SEQ ID NO: 621499 - DNA, 601 bp, Homo sapiens
ctaatatttattttgtgatcccatttgatttgatttacaaagtttgcataagctaaaacctgtattttcacacctcatgaaaattccttctttatgtatttctagaaatattatttacctgaaatacaaaaaccaattattctgcctttcaagtcatctggatgtttttctttttcttttctttttttctctttttaattttttgagcacacagtaagtgtatatatttattagttacatgagatattttgatacaggcaagcaaagcataataatcacatcagggcaaatggggtatccaatcacctcaagcatttatcctttgtgttataaaaaatccagttatactcttttagttatttttaaatgtacaattaaatgatctctgactatagtcaccctgttgtgctaacaaatacgaggtcttattcattctttctcactactttttatactcattaactatccccactccccccaacactacccttcacagcctctggtaaccatccttctactctctatctccacragttgaattgttttaatttttagttcccacaaataaatgaaatatgcaatgtttgtctttctgtaactg

SEQ ID NO: 621500 - DNA, 603 bp, Homo sapiens
ccactataatggtgcaggatctcagatgctcttatagaacctaattctggacaagaggtctggcaaactccagggatgcaacagaaaactcacagccrgagaagtgtctgcagagagtaagatagaacaagagaaataaaaatagaaggaaaaaaaagcaaacacttgaaaacactgcccacttgaaataactctagaaactactatttcaaaatgtctaaagctaatatatttttaaatcaccaagcagttcaggaatttacttcagatgaaattacttttatgaaacagtctttacagatgacttaaaattaatatgtattctatgttaaaagagaaaaatgaaaacacatcttcctttaaagttctgttgaatattttttaaagtggaaaggaaataagaacaagaaaacatgaaaaatcatgaaagcaatagataagataaagtctagatgagtgcattttaaactatttgtggtaaaaaatcattcttttccaatttgatatttttataaaataaaataattaaattacaaaaactacaacaatgtgcaaagtgcaagcacaatctttatattcaatagacataaaatacattttaat

SEQ ID NO: 621501 - DNA, 716 bp, Homo sapiens
actgggacctaattcatgctctacatgttagacgcttgtagaactataaagcaaaatatctgttagcacacaaatataacagcagttgctcttctaaattacacaacattgatattatgcaaaatacactggtgtattttgtgtgcaactcgttttgctttctttccaacacatatgcgtattttaaattaactttgctggttgttatataaacttctcagcaatggtatgccttatacctttttgcgccctgaggcttataactgaatgctgcctcttttgtttcagtttcttctctgcttttggcaagcaaactcattaattctatactggaaaacattatttcgtcttcattttggaaaaactcaattggtttaccagagaagtccctgtgattttttgtaaatgatgtaaaaggttttatgacttgataccagtatttgatatactttcaatagaaactgcagatataaatccatcactagttcaataaaattcartattctgattctcattattatgcagcctattttcattttatcctcctctgtttatgcaagtgattgcacttgcagagtcacttgtcctggagtttggttcactatttatgactttcctgattttagtaatttattgattattttgccacctttatgcttcaataaacaatattggagccattgatctattttttcctgaatttgcaatatgctata

SEQ ID NO: 621502 - DNA, 591 bp, Homo sapiens
ttttccagcttgcagacagcctatcatgagaattctcagcctccatcatcatgtgagccaattcctctcataaatccctactcatatctatcttttatctatctatctatctatctatctatctatctatctatctatctatcatctatctatctatctatctaattggtctatctcttggaaaaccctgactaaataggcttttgtacattgtgagtctctatacatgtcttaattctagaataataaaagcctgatttttccagttccaatattatgcaggacatgatgcttaaaatgacagaattttactaggaaaagttaagactttttcaytggggctgaagaaacacatgaatggtagctctccatattgaccacattgtttttttaaaatatgattcattgtcttttattaaaaaaaaagaaaaaaaactgtatttgcaaggtacctgcaagagcagtggaatgaacatttttagttgctgtggcaacaggagaataagtagagcaacaggaaagttaaatgcttaagcttcatcaggcatttcacaagagtggagggagaagagcatttcatttatattctga

SEQ ID NO: 621503 - DNA, 585 bp, Homo sapiens
ttaccatatgatagatattagacactataggtatgttaattccttaatcttgtctccaaacatttgcccctttatatgtaagagtttcattgatctgtgattcataatgcctcctcaggacatgtgataattgcttaggccaataggatgtgagcagaagtggtgatgtgcttgttctgaggagaatctgtgagggaaattgtgattccactagagctcttgctcattttttactccagacagggttggttctttccatctaggtcccagaatgaagcaaagacatagaccagatccatggcaacagatgataaytgctaacatgtaatatgagcaaaaaataaatgtttgtgttctgcttaatgtaatcacacaagaaaaggaactaaaaggtatatagatttggaaggaagaagtaaagctgccattattcacaggtggcattactgtcacagaaaatctcaaaataggcacacaaaaaaagaaaaagaaaaataatctgaaatgaataagtgattatagcaagggtgcaagatacaaggtgattatacaaaagtcaagtgtttttctatatactagcaatga

SEQ ID NO: 621504 - DNA, 559 bp, Homo sapiens
tgggcggtgaaggaatgtcagtgggtaaataacctcgtagagaggggcagggatttgcatgaagtaaattatagttgtatgggccaggagtgaattcttaagggacagaaagtgagattttaartactttccaggtgtgtaacattcgggggaaggaagatgcttttagtaatgattttaagaaagttttcctttcagatactttttctacaaggcttttgtggtcaacctgatgtttatttgaatttggggatatattcagatgaaaagaaagctgcttggctttgggacagtaacagtacagagactgagaatgtagagaggtctcaggggctagaagaacagtttagaactgatgcagggaatactaaaaggaaaaacaacacattggttggagttcatgttgaaaatctaaataaaaaattgtggattggggtagacatagaaaagaatgggaggttttcattaatgcatgagttaaaagtatgatgtgcgtttcaaaaagtggacaccttcaggcagtttgctgagaaggcagcaagtaaaacaaacaggtgtt

SEQ ID NO: 621505 - DNA, 650 bp, Homo sapiens
ggttttacacaatgcaccatgaagaaaacttcccagaaatcataaactttctacaaactttcatacaagcaacagcagctaaagatctctctggttttctcaggcttagttaactcatttccttttctccttcttactctccatacagcctgttctagtacaccactttctagtcgtaagtgtccgctgggattcgtactcttgacaccctgatctgcagggcttcctaagatggttgaggaccaggtgactccatgttcaatgacacacatatttttttgcttacgccgaacactttctcatataaaatcctcaaggtgcatttctgatgaatacaattccctacctcatttcaatatttcattatttatatctttgagatcttccacatcaagaggaaggatatatatttgggtagccttgggacttcttttatttagaatccatttccctcatcycctcctttactccttctagggtgagcataattcatcttggaaaccctggagatagtgtcaggatcagactatagccttcagatttccatgtgcaaatcttagagatgagggatagggaaaacctggagatttaaactcttttcttccaaggtttatatctctggttgtggtagaaaaagatgctttggatca

SEQ ID NO: 621506 - DNA, 279 bp, Homo sapiens
gattagttgttactttgaaaggctggataaatgctcartttctttcttttaattaccaatcatcaaagtaaaagtagtttgaagagttactgctgatagcaatatgaaattttcccaactttttcctttttgattattgttattaactcatgaattttcattgactcatagtatttatatccactacaatctttatttctgggtatttttctggtctcttaaccacctcattattctaaaagactctttcccacagctcttctctgttcaaatctctag

SEQ ID NO: 621507 - DNA, 638 bp, Homo sapiens
cagggtacaactatagaatccattactgcatccccctcagcaactttctttcaatggttgtagagttgttcattcagccacttaacactcattgtgcaactggggaccacaatgtggaggaaagagaaactctatgaggattcatataatctccacttggctatactcaaagaatatagawacatgttaatgagagaggtatcagtctgcctgtttgtctgtcttaaccaggaagatgggtcagagttggaatggaaacaccttttttaatgtgaggcaagaaactcaaaagcagaatctctcctgttgagtgaactgacatgttcagccagtacctgctatcaccgaaattgcccagttgagtggctgcatgtataaaacatttgagttctcaatcaaaataaactcatttttgaaaatccactctttccacgctacaactactgccgataatagcaaacattgacttcgtgctcacaatttttcaaacactgttgtgaacacttcatgtatttcatttcatttaatgtttaaaacaaccttgtgaagtaggtaatatttattatccttcttttatggatgaagaaatcaaagattagagaggtttagcaaatactcaaggatatgtagctagtaaa

SEQ ID NO: 621508 - DNA, 638 bp, Homo sapiens
cagggtacaactatagaatccattactgcatccccctcagcaactttctttcaatggttgtagagttgttcattcagccacttaacactcattgtgcaactggggaccacaatgtggaggaaagagaaactctatgaggattcatataatctccacttggctatactcaaagaatatagaaacatgttaatgrgagaggtatcagtctgcctgtttgtctgtcttaaccaggaagatgggtcagagttggaatggaaacaccttttttaatgtgaggcaagaaactcaaaagcagaatctctcctgttgagtgaactgacatgttcagccagtacctgctatcaccgaaattgcccagttgagtggctgcatgtataaaacatttgagttctcaatcaaaataaactcatttttgaaaatccactctttccacgctacaactactgccgataatagcaaacattgacttcgtgctcacaatttttcaaacactgttgtgaacacttcatgtatttcatttcatttaatgtttaaaacaaccttgtgaagtaggtaatatttattatccttcttttatggatgaagaaatcaaagattagagaggtttagcaaatactcaaggatatgtagctagtaaa

SEQ ID NO: 621509 - DNA, 442 bp, Homo sapiens
aggaggacactgcccagaagaaggaagaggaaaggaaagcaaaagacgatgccacattgtcaggaaaacgaatgcagtcgctctccctgaataagtaaccgcgacccatgggaagagatgctggggacctgggctgcactgccaggacctctgctgtgtctcgcccaccctgtgccctggtgctgctgcaacagcccctcacagccaggagcccccccatggcctggggcctcctcttcatcttggcacagaaattgtttgagggatgtgggggtggggtgggggaggggcagctgttatctttgacacagaaagatgcaggacagcatttcatatggaaccattttaatgtttttgctgtttttagaattcagagcccctgctcggggrtgcctgggagatcgggtaagaagagctttcatttgtctggtagatagcacgt

SEQ ID NO: 621510 - DNA, 573 bp, Homo sapiens
tatgcaggtatgtgaggaaaatattctaggtagagggaaaagccaacacaaaggctattaataaattgctggtgctttccagcaaaagcaattggtcattgtggaagaaacagagtgaacaagggagaaaggtatgggaaataacatgargggggaaaagagccagatcatgtagggcctccaggacatggtgagtgctttggcttttacaccgagtgaaatagggagctacaataggggtttgagcagatgagtgacataatctgatttacacttaaaaaaattctggtggctagattaaaaataactgtgggcaggagcagggagatgaattagtctattgcaggaggtgacagtagctttaaccaaagtggtgatagtggacgctccaggcaaatagggtgtcaaaagccgaggtgcagagatggaaagttcagttcaaggccggtatcagaactgtgagcaaaccagttgtctttctaacgggggaaggaaaatgacagctgccatttattgaacattcactatgtggcaagcattgtgctaaatttgatactccggcgacctctttta

SEQ ID NO: 621511 - DNA, 573 bp, Homo sapiens
accctagctctactaaaaatacaaaaatcagccgagtgtggtggcacgcccctgtaatcccagctactcaggaggctgaggcaggagaatcacttgaacccsggcagcagaaattccagtgagccaagatcacaccactgcaagccagcctgggcaacagagcaagaactccgtctcagaaaaaaaataaaataaaatgacatttttaaatgtagccattagaatgactacccattcaagcaaacgtttgtaggtacaatattgttggtattattgaatctttcattggtggtttttactgagtgatgtttctacctgtgggaggtaagagcaagtggagcactaaagaagtttttgatcctctgtctccaacatgttcaggactagtagccacataatggcttgctatataaagcaaaagaacaagtagtatctgaagctgatggacagaaaacacaccatgtgtcagcagtcaaatatcagactcaaaaatataaagcaaggaagaaaaataccccccaattgcctgtaggactgccctgtgcaatgtgatcaccgctagccacatgtggc

SEQ ID NO: 621512 - DNA, 573 bp, Homo sapiens
accctagctctactaaaaatacaaaaatcagccgagtgtggtggcacgcccctgtaatcccagctactcaggaggctgaggcaggagaatcacttgaaccccggcagcagaaattccagtgagccaagatcacaccactgcaagccagcctgggcaacagagcaagaactccgtctcrgaaaaaaaataaaataaaatgacatttttaaatgtagccattagaatgactacccattcaagcaaacgtttgtaggtacaatattgttggtattattgaatctttcattggtggtttttactgagtgatgtttctacctgtgggaggtaagagcaagtggagcactaaagaagtttttgatcctctgtctccaacatgttcaggactagtagccacataatggcttgctatataaagcaaaagaacaagtagtatctgaagctgatggacagaaaacacaccatgtgtcagcagtcaaatatcagactcaaaaatataaagcaaggaagaaaaataccccccaattgcctgtaggactgccctgtgcaatgtgatcaccgctagccacatgtggc

SEQ ID NO: 621513 - DNA, 573 bp, Homo sapiens
accctagctctactaaaaatacaaaaatcagccgagtgtggtggcacgcccctgtaatcccagctactcaggaggctgaggcaggagaatcacttgaaccccggcagcagaaattccagtgagccaagatcacaccactgcaagccagcctgggcaacagagcaagaactccgtctcagaaaaaaaataaaataaaatgacatttttaaatgtagccattagaatgactacccattcaagcaaacgtttgtaggtacaatattgttggtattattgaatctttcattggtggtttttactgagtgatgtttctacctgtgggaggtaagagcaagtggagcactaaagaagtttttgatcctctgtctccaacatgttcaggactagtagccacataatggcttgctatataaagcaaaagaacaagtagtatctgaasctgatggacagaaaacacaccatgtgtcagcagtcaaatatcagactcaaaaatataaagcaaggaagaaaaataccccccaattgcctgtaggactgccctgtgcaatgtgatcaccgctagccacatgtggc

SEQ ID NO: 621514 - DNA, 529 bp, Homo sapiens
acccggcccctactttttaaatgttatgtcttgatctttttaaccactctctgtatatttattttaaattcattgtcatctggttaaaacttaatttcatcttgcatgaatctgtgttccaactgttaattttgttaatagtctttcttaacatagtttttttcatgtgttctgggtggtagacgcatcctgagtaggtgtatgttttccactgcttctcttgagtgtacttttgtggttttctgcacccagcccccagccccccagagtccaccaataggtcttatcatggtatttggatgttccactgtgatgtcaggcctcacagagtcagtctgcaagacagtggacaggctgactcagtttctggtcggcaggcacctcagatgcacactttcctctgaagtacyggctccagcatccagttaatcgctatattttttcagcttctttttgggagtgaggacttttggcttgaaacagtgaccaggctccagtctcttatcttgcttggtgcatttatggttcc

SEQ ID NO: 621515 - DNA, 527 bp, Homo sapiens
acatttgttacaatcgatgaacctacattgacacatcactgtcatccaaagtctacagttaccttggggttcactcttggtgttggataaagatttggacaaatgtataacaacatgtatccaytgtaatatcctacagagtcatttcactgccctaaaagtcttctgagctatacctacttatccctcccctcctttgtcctttctaagcaacaactgatattttactgtctgtagttttgccttttccagaatataatacagttggaatcatacagcatgtatccttttaagattagcttctttcacttagcaatgtacatttaatgttcctccatgtcttttcatagcttgaccgtttattttttattttttatttttagcactatatagcattccattgtttggatcatctctctctctctcttttttaatttctttttttttccaccttcgggacttgtctgaatctcccttatttttaatgatgatgatgcttaacatttatatcatggccaggaaataac

SEQ ID NO: 621516 - DNA, 589 bp, Homo sapiens
tgtgaaccaggtaagcaaaagctaaagaactgcaagacaggcaattctgagatggtttagtcaaaggtgaaaaaattgaattactggataaaataagtacatgatagtttgaacttttcgatagaaaacagcctctytcggtctcttacatgcacacacacacacagtttcaggaccacattagaaggctgatagccagaattttgctggaatatatatagactgaatcagattatgaaggaaagtaacttagttgttccctggccatattctctgaaaatgcagtaagtcattcaagaaaggcttcccccatctctaagtggttcaggaatgggaagtctattgaaatgaagtgagtgcctgcctccaggcattagcagcctttcagggactgctaggtgctttgagatgctgaagttatatgctaacagtctgcccagcagtgacatggccccctaaacacagcaataactgtggcttcatgtacttcagcattcacttccacatttcaaaatggctttttgaaaaagtggtaaagggctcaactggaagggagagactccggtgctgttgagggcaaggttccatt

SEQ ID NO: 621517 - DNA, 411 bp, Homo sapiens
actagaatgtctccctactcaaaatgggctatacggtatctttttttctcagtcaacatgggctgatgcatamcaattcacccttaatggtcctgaaatatattaactgtagagaaatgaagatcaaaaacatcgtatatgtgaagataattaggtatgaaactccagataagcaagactgtttatttttgtttagcactctagggggaaaaaatgacattttccagcagtttaaaatactgtgatgttttaagatagaaagggcgtgataagagtgtgggctttcaagtcaagctgtccgggttatactcctggctgtgccacttactagcagcatgaggctaggcaagtgacattagctgtatgtgcctcagactccctatctgtgaaatgggaatagtaagattacct

SEQ ID NO: 621518 - DNA, 411 bp, Homo sapiens
actagaatgtctccctactcaaaatgggctatacggtatctttttttctcagtcaacatgggctgatgcataacaattcacccttaatggtcctgaaatatattmactgtagagaaatgaagatcaaaaacatcgtatatgtgaagataattaggtatgaaactccagataagcaagactgtttatttttgtttagcactctagggggaaaaaatgacattttccagcagtttaaaatactgtgatgttttaagatagaaagggcgtgataagagtgtgggctttcaagtcaagctgtccgggttatactcctggctgtgccacttactagcagcatgaggctaggcaagtgacattagctgtatgtgcctcagactccctatctgtgaaatgggaatagtaagattacct

SEQ ID NO: 621519 - DNA, 615 bp, Homo sapiens
caaaacattgtcaggctaatttatattatctcttgatattagcaaggttcagtataatatgcttatcagtaaagttaggagatactgtccagcacacataactttctagttagtgcactgctatgtggacaactgtgaccagaaagtgattatcaactgaggaagtagcagctggaggtatgtccagggtttggatctgagttgggtgttttagaattttatctgaggatctggatggcataatagaaaacatgcaggtgatatttatataagtgactttgtggtgtatagagtgccttgattttgaagcaagaatttgaaaagagtttggcaaaataaaatatataaaattaaagtgaaaggaaataatcaaagataagcaattaaattcatttaaggaaagcacagggtggtacattgaataaaaccaagcaaatgacataaatatactacatttgtatttgttttgttaaatttgtttctgtagtttccagtatttagaatagtatatgacatgaagcaaacatttaatacayatttgctgaataaatatatgaataaaatataagatggaggaagacaacatgtgattagagcaaaattaagattattcct

SEQ ID NO: 621520 - DNA, 527 bp, Homo sapiens
actttatataatttatggtcctgggcttctatatttctgtgttctgttctacttagcatgctttgttttaaaaggtaccgcaagaggagcttattaatccgtttaaacgatctttttrtgtgatcaaggcattcgctgccatatgatattgcacaaccagtaaggccaatgagttaacatctttgtggaagctttgtgaaatccttgaagttatgtttttattgcttctttcacactagaagtaatttttatagtactttcctctcagcttgtctactccaaggccagaactcagggagtatctaatttatctccatcagattttgcctctagtacttgtaactgtggtaaccctattttcttgaggacgcttttttcctcctcagattcttatcctgctagatagttatattccgtactgcctaaaaagttgagattcttttgaccatagagtagataccagactagtatccagggaggatgttctgtgcattgctacaatttatgtagtgtagcattagtacctt

SEQ ID NO: 621521 - DNA, 527 bp, Homo sapiens
actttatataatttatggtcctgggcttctatatttctgtgttctgttctacttagcatgctttgttttaaaaggtaccgcaagaggagcttattaatccgtttaaacgatctttttatgtgatcaaggcattcgctgccatatgatattgcacaaccagtaaggccaatgagttaacatctttgtggaagctttgtgaaatccttgaagttatgtttttattgcttctttcacactagaagtaatttttatagtactttcctctcagcttgtctactccaaggccagaactcagggagtatctaatttatctccatcagattttgcctctagtacttgtaactgtggtaaccctattttcttgaggacgcttttttcctcctcagattcttatcctgctagatagttatattccktactgcctaaaaagttgagattcttttgaccatagagtagataccagactagtatccagggaggatgttctgtgcattgctacaatttatgtagtgtagcattagtacctt

SEQ ID NO: 621522 - DNA, 554 bp, Homo sapiens
aatgttaacacaagtaacatatgttttgaaattatattttccaaaacaaaagaacaaaaagatgtcagtgtttaagtttttgcaaatgtctttaatgtctggcaatcagtctgttcactgtcatgtatcatgtagcctctagaaagcttcactgtgcagtcacaagacaatgaatttaaaaggccaataatgtttagtattcttgtgaaaatagttttgacctcactgattccccaaaaaggcacactgtgagaaacaatggtaaagagtagactaactgtaagagacaaggatggaacctattataataaaacaaatgagacatgctggtgccttgggttatagcagaaaaggtagggagaactggttagattctagatagattttaaagattgagcctgcaggttttgctaacagaatagacctgaatgtgagagaaaaaaattwaaaattgactccaaggttttgacccagaggacctgcaaagatggatttcctatgtactgaaatatggatggttgtggaaatagcagatttggagtgaaattaacaat

SEQ ID NO: 621523 - DNA, 556 bp, Homo sapiens
tttttagcttatatgtttgctagctatttaagtttctactgcagttaattacctcatatcttttcctcatttttggtgttttttagaaattaaattttgacttcttttatctattctatatgctaatcctttgttttatatgttgtaaagactgtcacacagtatatcactgtcatataacttcaatcatggagttgtcatcatcatgattatcatcattttaatactaataataacagttatgtttayaatgtgcagggcctgttttaagtatcttatatgtgttgccttatttaattctcacaacagctctaggaagcaagtacttatactccattttataccgactaaggtatagaaaggaaattgatcgagattgttcacctggtaaatggcagagacaagatttgaatctagaaactaatttcagagcactcatccttcatcactatactatctcatataacttcatcttaatacaatataaagagtattataattttcaaataaccttaccttggttttgtgtaaatggtattgcgttttatagttaaaa

SEQ ID NO: 621524 - DNA, 544 bp, Homo sapiens
tggtgacaccagaactttttagcagaaaaggaattctttgaaatgtgaagccaattctctccctgccaagatacttaaaaagcaacagcaatgagctaggacatctgtctatcattgggaatttgggaggcaaatattttcacagaacctaagtgttcaaacaaacacgagtagcaaatatggtctcaactccagctgagccattaaaacttggrcaaaagaagcaagggaaaatggaaatagagggtggataggaaatccagggctccaggattcttgtatgaattacatgaaaaatgaagtttgagtcattcaaaaatacatgaagtcctgcaccatgatcccataattgttggtttcaaggaaagaatatgaattcataagtctccctttggaacataggttcatggtgaggaattggcagagctggcctatacttacaggattgggcaacctgagccaggaagagtgctgcttttcccctgaagggcaggggtgggctcagaattgtcagggggcatgagctggacctgcaggttctaaa

SEQ ID NO: 621525 - DNA, 581 bp, Homo sapiens
ttctactggaaacaatctaagtaaaagaagaaaaacatctttaaaattctaaaatgaaaaaaaaaccaactgccaatctatcattctgtggtgaaaatataattcaaaaacaaaaatgaagaaggactttgaagacataaaaaaggtgaaaatattcatcaccactggatctatactacaaaacatacttaaagatgttgaagtgaaatgtatggtaaacatagcacaaaggctgggagaaataacatggacatataatatcataaatgatgaagtggtataagcattactagaatgtagactgtgataagttagagatgtatactgtatactgtaaatgctagagtaaccactaaaataacaaaacaaagagatctagctaaggagctagaaggagatgaagtggagtaataaaatcgttcaattaatacaaagggccacagaaaaagaaatctgtaacaaagaacagatagaaaacaaatagcaaaatagtagctttaarcctaaccatatcaattatcaattatcacatgaaatgtctaagtacctccattataaaccagaagtggtcaaattatata

SEQ ID NO: 621526 - DNA, 442 bp, Homo sapiens
aagaattcaaatcatggaaackgtgtgatgtgatcacaatggaattaacttagaaatcaacaagagaaagatatctgaaaaatgctcaactatctggggaaaaaataatacttttaagcaactcatgaaccagaaaaaaatcaaacaggaaattagaaagtgtattgaaatgaatgaaaatgaaaacaatatatcaaaatttgtagaatactagagtagtacttaaaaggaaatttatagtactgcatgtctctatatgtaaagatgaaaggtctttacttcctttaaagctagtatgataataattggcatagagatcgacaaataggtcaatgaaagagaatagaaaaaccagaaacggacccatgcatatttgggcatctgattttcaacacagagactagaattgtggttcctgctgcctcctgaaactagatgcagc

SEQ ID NO: 621527 - DNA, 447 bp, Homo sapiens
tttaaaagaattcaaatcatggaaacggtgtgatgtgatcacaatggaattaacttagaaatcaacaagagaaagatatctgaaaaatgctcaactatctggggaaaaaataatacttttaagcaactcatgaaccagaaaaaaatcaaacaggaaattagaaagtgtattgaaatgaatgaaaatgaaaacaatatatcaaaatttgtagaatactagagtagtacttaaaaggaaatttatagtactgcatgtctctatatgtaaagatgaaaggtctttacttmctttaaagctagtatgataataattggcatagagatcgacaaataggtcaatgaaagagaatagaaaaaccagaaacggacccatgcatatttgggcatctgattttcaacacagagactagaattgtggttcctgctgcctcctgaaactagatgcagc

SEQ ID NO: 621528 - DNA, 605 bp, Homo sapiens
gtcagtgggcgtgttgtttgttccgctagtgtaatgattatacctacttatgattaatatgcaaataaataccttttgtaatttaactttgaaagttgaaattggggctgggtgcctgagctcaggagtttgagaccagcttggttaacacagtgagaccccatctctattaaaaatacaaaaaattagctgggtgtggtggygggtgcctgtaatcccagctacttggaaggctgaggcaggaggattgcttgaacctgggaggcagagctgagatcacagagctcgtgggacactggctcaaaaaaaaaaaaaaaaaaaaaagcaaaaaaaagctgggcacagcggctcacacctgtaatcccagcactttgggaggccgaggtgggctgatcacttgaggtcaagagttcaagaccaggctgaccaaaatggtgaaacctggtctcaactaaaaatacaaaaattaaccagtcatggtggcacgtacctgtaatcccagctacttgggaggctgagtcaggagaattgcttaaacccaggaggcagaggctgcagtgagctgagatctcgccactgcactccagtctgggtgacagagtgag

SEQ ID NO: 621529 - DNA, 605 bp, Homo sapiens
gtcagtgggcgtgttgtttgttccgctagtgtaatgattatacctacttatgattaatatgcaaataaataccttttgtaatttaactttgaaagttgaaattggggctgggtgcctgagctcaggagtttgagaccagcttggttaacacagtgagaccccatctctattaaaaatacaaaaaattagctgggtgtggtggtgggtgcctgtaatcccagctacttggaaggctgaggcaggaggattgcttgaacctgggaggcagagctgagatcacagagctcgtgggacactggctcaaaaaaaaaaaaaaaaaaaaaagcaaraaaaagctgggcacagcggctcacacctgtaatcccagcactttgggaggccgaggtgggctgatcacttgaggtcaagagttcaagaccaggctgaccaaaatggtgaaacctggtctcaactaaaaatacaaaaattaaccagtcatggtggcacgtacctgtaatcccagctacttgggaggctgagtcaggagaattgcttaaacccaggaggcagaggctgcagtgagctgagatctcgccactgcactccagtctgggtgacagagtgag

SEQ ID NO: 621530 - DNA, 572 bp, Homo sapiens
cagacatgggacctgctcctttttttcagtgttgcaattttccccaatatttcctcctcctgagtcttctgccttgagcccaggtttccttaaatataaagyggaagtgcttctatataactgaacccagttttttgatttcctgtggtaagtctgttttaaaatgactgtcatacaatggattttgctgtttctatgtcttgtgtatttggttgaaaccctaactagttcttttaatttcttcctttcaaacacgtctgatgcaaatgaataaaagttaaaacccagtgatctcaagatgggagttgggtgggagagggtaaattatttgaaatcaacaggaaacctcattctcgatgtcctgaggttaatgttcacatctgttaagtagctgaatatgtcttgagcaagtcacttggtctctgtaggcattggtgttttcatctgagaaggtgggatgattacaactttgaaagttgctttacatttcaatgactgcatcaggacataatatgtcctatttaaaggctatggtagctttttaccagtgttttcacataaatgactgacgc

SEQ ID NO: 621531 - DNA, 494 bp, Homo sapiens
tttttatcatgcacagaaaatatcttatcacaaaaataaaatgaagagggtgggaggaaacttttggatattctggatatatgtttatggcattggatgtggtgatgttttcataggtgtcctcttgtctccaaaatcatcaaggcatatgcattaaatatgtataacttttttaatgtcaataataccccaatgaaatcatttaaaaaattcatcaaaaataaagtggacgaattccatttcagaatgctgacatagcttcttgttgaccaaccttttcacagattgcaacaataaactctagacaaaatataaacacaaattaactgaagtcaggctaaggttgcagatcttaaaccaacagaagcagccagcttcttagccctgaacttcagagcagatcttgttgtgctgtatgtggacatttatggatttcccacttaaaaacatgtacaagtaagtcyggaaaatattaaggcaagcaaagtttatca

SEQ ID NO: 621532 - DNA, 536 bp, Homo sapiens
gaaagccaaatatacagccttaaaatagaatgtggacctaaatactcagaagcaccgcccattgtgagatttgtaasaaaaattaatatgaatggagttaatagctttgatggcatggtggattcaagagccatgtcagggctagcaaaatggcagaattcatatagcatcaaagttgtcttgcaagagctttggtgcctaatgatgtctaaagaaaataaacagtattacagcaattaatcaaaaagaaaaaccacaggcccttcccctttccccccattcaatttaagtagtcttcattttccacagtagtaaattttctagatacgtcttgtagacctcaaagtactggaaaggaagctcccattcaaaggaaatttatcttaacatactgtaaatgttacttttttttgtccatttgaaatatataagttgtgctataataaatcatcctgtcaagtgtaaccactgtccatgtagttgaacttctgggatcaagaaagtgtatttaaattgattcccatcataactggtgg

SEQ ID NO: 621533 - DNA, 546 bp, Homo sapiens
agaaatgcccagataggaatacaaaaatcaaaggaatagttgtaaattatagttgatgataagacaatcctcagggtagtagatatagggaaggaggctctagttttaactagaatatgaggacagggcttttgatctatttcctgtgctgagtgaggatctgcaaccaatattttgcataaagttgagatcttcagagagcttccatctgtgaagtgtactagaaaaattaaggaacatggagaagcagcaatagctcaaactctaaaggaggatgttcgaacccattgcaaagaagctaaaaaccttgaaaaaagattggacgaatrgctaactagaataaacagcatagagaagacaagaccttaaatgacctgaaggagctgaaaaccatggcacgagaaccacgtgctggatgcacaagcttgaatagccgatttgatcaactggaagaaagggtatcagtgattgaagatcaaatgaatgaaatgaagcaagaagagaagtttagagaaaaaagagtaaaaagaaatgaacaaagcctcc

SEQ ID NO: 621534 - DNA, 326 bp, Homo sapiens
gaattcattttcaaaaatataactctctaataaattcagaaaaagaaaaatatattaataacttaaaagtcatttagggagactatgggcaagttcagagactgcaagttcttggcaactactgggtattccagggagccatctccttcctraaagataactcaatcatgaaattcactgggcattcatcagcttttaaagatatactgcttcttaaaggttagaatgcagggacgaaaactgactgtattacaccaattctaatctaaagataatgcctaaatgggtcttgaaaatagcttattaactcagcaaaggtgaaccct

SEQ ID NO: 621535 - DNA, 583 bp, Homo sapiens
tgacctcaggtgatccacccgcctcggcctcccaaagtgctgagattacagaygtgagccactgcacccagccaagaaggtgttattttaaaaatgcagaaagaaacttgtgtgttctttgcacgtgttcctccaaaaactaaacccgtgaagtctttaggaagcaatttcagctcctcaaatccttcaacaagtggttatagactgagtttataactaatggtcgtgtaataggctagcaatggtattatagagtgttctctttaagctgtccacagtgctgtgggtttcattattcatcaagatattaaaaatgcatgcactgggtcttggagtcttttcaattcaaatttagataggaatctagatacaaacagctgtttttcctccttgtatctaaacaagccttaaaactaagaggtttaactacatatgtcccaaataaagaatatggtatattctcttagcttttagtattttaaggtaattttattcaaaatcttatataactatatatacttacattaaaacaaggtaaaaaaacatttactgtaaaattatttctgattttaacacgtttaac

SEQ ID NO: 621536 - DNA, 583 bp, Homo sapiens
tgacctcaggtgatccacccgcctcggcctcccaaagtgctgagattacagatgtgagccactgcacccagccaagaaggtgttattttaaaaatgcagaaagaaacttgtgtgttctttgcacgtgttcctccaaaaactaaacccrtgaagtctttaggaagcaatttcagctcctcaaatccttcaacaagtggttatagactgagtttataactaatggtcgtgtaataggctagcaatggtattatagagtgttctctttaagctgtccacagtgctgtgggtttcattattcatcaagatattaaaaatgcatgcactgggtcttggagtcttttcaattcaaatttagataggaatctagatacaaacagctgtttttcctccttgtatctaaacaagccttaaaactaagaggtttaactacatatgtcccaaataaagaatatggtatattctcttagcttttagtattttaaggtaattttattcaaaatcttatataactatatatacttacattaaaacaaggtaaaaaaacatttactgtaaaattatttctgattttaacacgtttaac

SEQ ID NO: 621537 - DNA, 583 bp, Homo sapiens
tgacctcaggtgatccacccgcctcggcctcccaaagtgctgagattacagatgtgagccactgcacccagccaagaaggtgttattttaaaaatgcagaaagaaacttgtgtgttctttgcacgtgttcctccaaaaactaaacccgtgaagtctttaggaagcaatttcagctcctcaaatccttcaacaagtggttatagactgagtttataactaatggtcgtgtaataggctagcaatggtattatagagtgttctctttaagctgtccacagtgctgtgggtttcattrttcatcaagatattaaaaatgcatgcactgggtcttggagtcttttcaattcaaatttagataggaatctagatacaaacagctgtttttcctccttgtatctaaacaagccttaaaactaagaggtttaactacatatgtcccaaataaagaatatggtatattctcttagcttttagtattttaaggtaattttattcaaaatcttatataactatatatacttacattaaaacaaggtaaaaaaacatttactgtaaaattatttctgattttaacacgtttaac

SEQ ID NO: 621538 - DNA, 583 bp, Homo sapiens
tgacctcaggtgatccacccgcctcggcctcccaaagtgctgagattacagatgtgagccactgcacccagccaagaaggtgttattttaaaaatgcagaaagaaacttgtgtgttctttgcacgtgttcctccaaaaactaaacccgtgaagtctttaggaagcaatttcagctcctcaaatccttcaacaagtggttatagactgagtttataactaatggtcgtgtaataggctagcaatggtattatagagtgttctctttaagctgtccacagtgctgtgggtttcattattcatcaagatattaaaaatgcatgcactgggtcttggagtcttttcaattcaaatttagataggaatctagatacaaacagctgtttttcctccttgtatctaaacaagccttaaaactaagaggtttaactacatatgtcccaaataaagaatatggtatattctcttagcttttagtattttaaggtaattttattcaaaatcttatataactatatatacttacattaaaacaasgtaaaaaaacatttactgtaaaattatttctgattttaacacgtttaac

SEQ ID NO: 621539 - DNA, 592 bp, Homo sapiens
tatcatactaaatcagagagtgttcttcccctgtgtaccattcataatttgatacagaattaaataagtgaggtaaactcagataaagtaatcttgtaggtggctgctttctcctctttcccatcccagcggttatataggtgtgcagtctcagattgtgggaactctggggtgtctttcatttaagtctgcttgctgttttggcatgagatcccaatgcttacacttgaacgtcatgtatgctaatttctcttcttctatgatctatgggtcgatgaacactggctggttgctcagcctcaactgtgtgattccccacccrttcttgcccccaccctgttcataatgagaacaactattacatagactacaccctaaatggagaagaacctatttcttccatcttgcatttgttatatttcttaggttctctaccaccttattctattaaagaaccacttttaaattccaacagagacattttatttccaacaatcagactaggatttcctatgactttccaacaataccgtcaggctgctgtcagcattctcattttagtttgctgaaaatttatcttacataaaacatt

SEQ ID NO: 621540 - DNA, 414 bp, Homo sapiens
ccaccctgactcctgatcattcagttggggcgtcccctcaaacccaccarcaaggagctcagagttggtgagttcagagctgtatcaagtcttgacgggctccctccctcccatttcccacctctttgggcccccagatcctcacaccagcaccaactccctgtaaacccaactacctgctggaaaggagttataggcccggcctgggggcctgaggaggacggcggcggctggagacgtctgcacggggcggaactggaaggggaggaagaaacctgtgcctagcacttggcagacccactttgccaagcctcggaaccagatacggttactgggggcttctcagagcggcaggaaggtagagtaagaaccggacaccggggctctgacattacacagaaaaggtcagaattc

SEQ ID NO: 621541 - DNA, 414 bp, Homo sapiens
ccaccctgactcctgatcattcagttggggcgtcccctcaaacccaccagcaaggagctcagagttgrtgagttcagagctgtatcaagtcttgacgggctccctccctcccatttcccacctctttgggcccccagatcctcacaccagcaccaactccctgtaaacccaactacctgctggaaaggagttataggcccggcctgggggcctgaggaggacggcggcggctggagacgtctgcacggggcggaactggaaggggaggaagaaacctgtgcctagcacttggcagacccactttgccaagcctcggaaccagatacggttactgggggcttctcagagcggcaggaaggtagagtaagaaccggacaccggggctctgacattacacagaaaaggtcagaattc

SEQ ID NO: 621542 - DNA, 512 bp, Homo sapiens
aggcaggaatgggcaaaaagttaacctagaaagytggatgataagagagcccccctggaggctttttcggagaaaatggcttcaatagatggatctgtcctaggagggtggatgcccatgggcttccctagaccaccgtctcagagttatgatttctgctgtcgccaacaccagccatttgagtcctaaatttggaggtcccaaaccatactgcctgtgagagagaaagtgatctgttgtgtgtgtgtgtgtatgtgtgtgtgtgtgtgtacatgtgcattcaggcacgcagggccagaatgcacacctgagtgtgggagtggcagcaggagctggagagactccagagaggccctgggacctctcgggggtgtgggtggaagtgcacctaggcaggtgttagtgtaaggcacgaatgcatgcaagcatctgcatagaaatgcacagtctaaccaccctgtgagtgcccggggtgtgagtcaggcttctccaagtggatgctggttatggag

SEQ ID NO: 621543 - DNA, 554 bp, Homo sapiens
  misc_feature 1, 2, 3, 4, 5, 6, 7, 85: n = A,T,C or G
nnnnnnncagggaaaccagccacctctatgtcaacttttctacccttttgcctgggaatgctcctgctggtgttcagatgtccanagcgtctcctgataccccacaaacttcatcccgatactcctactgatattctgacattcgccggacttcccctaagtcccatatttctctcttggaggcctatcttctgtggaccaatgtgacagggctggtatggggtttgatgaactttaaactcagcatggaggtaactgcttattgatcagccgtgtatccatggaagtggaggaggtagaaacagatagagggattttcccctaaatttcctgaataatgggtcctaattcttcactattacagaattagacatttatactcttttcatgcattaaratgggtggaatatacatccccattccttgactttgagcttggccatgaaacttgcattggccatgggatatcagtgaatctcacaagaaaaggagcttgaaatgcagattgaactggaacccccacgacatccattgaactcatgagttgtaatcat

SEQ ID NO: 621544 - DNA, 558 bp, Homo sapiens
ttgtagtgatgctaggagatgctgcagccatcttaaagcaatgaggatcaagtcagagggtaagtaccaatacactgaggatggcagaaagatggaaaaatctggattcttgatgacattgaccwgttcagttatttgatcttggaaccactttacctcagggcttctgcttatgtgagataatatataataaattatttgagcccattttgttataacaaatttatatgcagttaaaagcagcttatctgataccacaaccagggttgttttctcaataccttccaaagacaccatttttccagagcaaagggacctatataaatgtaaaaaaaataaagtacaaattgaatcaaataatcagaacaatctcatatgcttacttttttgctaaatataactctacttgtccttgtaattttatgtgaagacataagaattctctcaagaatatacacagtaagcaactatttgcagcacacagtacaacatggagattaaggcctggactcaagcaaacagaatttagtccttgatctgcctcttcctagctatgta

SEQ ID NO: 621545 - DNA, 593 bp, Homo sapiens
gggagaggaagagagaaaaatcaaagatgtagcacagaaaacactcagctctggaacctggaaaacaggcggtcccgctaagaaaaacggaaatgtaaaagaacagccagttttgaaggaaggcgagaattcatttttgtgtatattaatttatctatcgtacctagggcccagcgacagtcatgccggaagcatctcaaatttttaaaaatgtaaatgtgaaaagcagacaagcagttcctgcattttgtcatcgcaaatatcatcgatttgatttcatgaaagtctcttttacacaactctatttgagtttctgcctccrtgagttcatttatcaggctcagccatcactttcaggagtcatgggggactgcagccccgcccttagtaaaccgggtaagtccgggctcggctcgcctatgcaggagtgccatctagtggtcagagaatgtcacttcaagctagactacaggaggaataaacagaaggggacctcaggaggaataaatagaaggggacctcagggacattctgcttttgtttccaatttccaggcgtgctgtgactgaaaaaaaggaaaaacattccattca

SEQ ID NO: 621546 - DNA, 535 bp, Homo sapiens
tgtctcctgagacctgagccacagaacagggaatctgatgagcaccagttgaaacacagrtatctgggagtcaaaggaaggggcaaagctgttttatgcttattcctaggggtcctagaagctgagaaaactctcattcctcttcctatatcatcttctaggcagacagggcaatgaggtcaccccttccctatcaccttcacgaggtgctgaagcagagaccctctggagacttccacagtactcctctcctctctcaaacaaccgaaaagtcaacccgccccatcctctctgctcagaggagctttgtccagctccacatctgtagttttgctgtttgtggattaactttgccaattgcaccatcagaaactactctgggccacagggacagggttcttgcccctcaaaggagtttcaactacagggaaacctattcttttttggtaattttgacctgtgatgagagtttatttattcaaagagccttccttaccaggcactttttctgatgtttcaagtaaacatattccat

SEQ ID NO: 621547 - DNA, 605 bp, Homo sapiens
tctttacgaataaactgactcttaacatttcagtacccaatcaggcatatatgttaactaacatcaaaattaaatgaaaatcatcggtcagacaaatccattatgtatgaagttaactattacagatgaaaacaaaatctaacctagtcaatgatttaaggaattattctcacttgattaaagcacacacacaaaccrgctaaattcttggaagagtttaactatgagtttagccattgaagcaacaattttcctcaccataaactggaaccttattctgagtaagactgtaagaggaactaagtcttaaaggaaggccatcggaaagttacttttatactggaaatagtccatccctattctcaaatagttttgcccttatgactctgctcccaaggcaggcttttctggcataagtaaatttagctttatttctggaacaagtagtctttcttcataagtgtcatacagagctgggctgatttagctttctgtctgctttatacaagccttagcaagtttcaaaatatatggccattcaaagcaagttgtattgcaggcttttctcatttgttttcacttatcaaaaagttagaactatgtga

SEQ ID NO: 621548 - DNA, 608 bp, Homo sapiens
  misc_feature 531: n = A,T,C or G
aaaaatcacagtaataccttgtttgacttttgaaaaatattacaagcaaagaaattcctcccaaaaartttctaaattgcactcaaactgaattcttaagacctacttcatgtttaacatgttttgacactctggttccgtgctgataaatagatagcctgctatttactacaccacaagtcagattaaagaataggacccgtattggctaactgattagggctactaggaattgtgtttatttttaattcattaaccatatactgctttgtgatgatgttttaacatcaacataaaaattgcaccatttaatttttatggtgcagtgtcttccttaacgtttttccaacaactagttactaagcaccttctatgagccatgtactgtgttaagtactagagaggcattggggtctgcaaagcagggattttaaaactctctgataaatgtaatcaaatgcttagggttaaaacggataatccaaactataaattcaaccctaaattagtatggcgtatgtcactcgactnccactccttcacattccctcaaggacagcctctgctttttctttctctaaaggggataatcacaaaggaaaatcacc

SEQ ID NO: 621549 - DNA, 608 bp, Homo sapiens
  misc_feature 531: n = A,T,C or G
aaaaatcacagtaataccttgtttgacttttgaaaaatattacaagcaaagaaattcctcccaaaaaatttctaaattgcactcaaactgaattcttaagacctacttcatgtttaacatgttttgacastctggttccgtgctgataaatagatagcctgctatttactacaccacaagtcagattaaagaataggacccgtattggctaactgattagggctactaggaattgtgtttatttttaattcattaaccatatactgctttgtgatgatgttttaacatcaacataaaaattgcaccatttaatttttatggtgcagtgtcttccttaacgtttttccaacaactagttactaagcaccttctatgagccatgtactgtgttaagtactagagaggcattggggtctgcaaagcagggattttaaaactctctgataaatgtaatcaaatgcttagggttaaaacggataatccaaactataaattcaaccctaaattagtatggcgtatgtcactcgactnccactccttcacattccctcaaggacagcctctgctttttctttctctaaaggggataatcacaaaggaaaatcacc

SEQ ID NO: 621550 - DNA, 591 bp, Homo sapiens
tgggcattcactgtccttaccttaggctgctttcatagctgcatactacacatgtacagagttgcaaaatataacagtttaacacgtatttcaagtaacgttttgtgtagactcagctaatttctttttatgttgaataggactgttggcaaaatgttatcactaaagactgttttaaaaacagggttaatayaaaaactcaagaaatataactgaggagtatatttattagtaatcttcaggaagtgtcactactaccatattcctgctgcatagtgggcatatttttcattttgctttaactctaattaagaaaacattcttccagtagtcgagaatacagaaaatgtagcacagagtcagagagcatggcattgtggattctgggcattcctgagtaaataagtgaaacatgcagcatcttatagttctttgctctttaaaaatgcagtggcagaggtctgcgcatttgaggtaacttgtaacatatatggagatgaaatcaatgtcagcttagaccaacaaggacaaacacagtgtgcgacacacagaggaggctcagctaagacaaagagaaaaaaaattaattaa

SEQ ID NO: 621551 - DNA, 484 bp, Homo sapiens
taataattatttctttatgctgcagagatttgggtgaatattcatcaggctttttaaaaattcataacttgtgagaaaaagttttaaggcagtttttgttcagttgtgaatataattatgccttcaactagtaattgaggtataagtaattcacttttgaacattttgtaattagttgagacgtaaatactggatcaaggatttcagtgatagagtttccattaggcttcatgctttgtattgctatttttcctctgatgcaattaaaacattcctaaatgtactcaaacatatgtgtgggtataaacacaaatgctyacataagtaggagtatcatgtactatgtccaacctcaaaaaggctaaaaatttaataaacagggcaaccctgtcatgaattctaactgtttcctgatgagataaacaatgactcttaattagaagctaaaatttttaattaagatgattctgcagtaattatccca

SEQ ID NO: 621552 - DNA, 587 bp, Homo sapiens
atgggcaacatagtgagaccccatctctaccaaaagtgaaaattagctgggtgtggtggtacatgcctgtagtcccagctacttgggaggctgaggcagaaggatcacttgagcccaggaggatgaggctgcagtgagctgtgactrcaccactgcattctagcctgggcaatagagcaagaccctgtctcaaaaaaaaaaaaaaaaaaaaaaagggtgacatcgacagaacaaacatttttagttttggtgaactctatcaagtttttcttctatagattgtgtttttgatgtcatatctaagaacccaaagtcacaagagtttatgtttcttgtataaattttatagttttacattttacttgtagatctagaatcaattttgagttttcatataagatgtgtaagaatttaatataatttttatgtatgaattgtgtataagatctgaggtttaggtcaagttcatttattacatatgaatgttcaaatgtttcaacactgattgttgaaaatacttcccttaatccattgaactgtctttgcacttttgacaaaaatcagttggttgggtctggattattcat

SEQ ID NO: 621553 - DNA, 437 bp, Homo sapiens
aggcaggagaatcacttgaacttgggaggcagaggttgcagtgagccgagattgtgccattgcactccagcctgggtgagaaaagcgaaactccatctcaaaaaaaaaaaaaaraagaagaaaagaagcatatgatacatgtaggtattcttaatcctacaccaaatatattcttattccactttaaatggaaagagcaatcccaatatggtcaactgtcaccagagaaggactagctcaccacttaggcaattgttgggtgactttgaagggtgatattgttaagccacaaaaacctgagggacccaatctccattatagataccagttgcactttatctgaagcacaaggttaaagatcccatcagcaaggtggacattgctgagttcccttctctgtgcctctgttcctaaccagtactcatttccactccact

SEQ ID NO: 621554 - DNA, 437 bp, Homo sapiens
aggcaggagaatcacttgaacttgggaggcagaggttgcagtgagccgagattgtgccattgcactccagcctgggtgagaaaagcgaaactccatctcaaaaaaaaaaaaaagaagaagaaaagaagcatatgatacatgtaggtattcttaatcctacaccaaatatattcttattccactttaaatggaaagagcaatcccaatatggtcaactgtcaccagagaaggactagctcaccacttaggcaattgttgggtgactttgaagggtgatattgttaagccacaaaaacctgagggacccaatctccrttatagataccagttgcactttatctgaagcacaaggttaaagatcccatcagcaaggtggacattgctgagttcccttctctgtgcctctgttcctaaccagtactcatttccactccact

SEQ ID NO: 621555 - DNA, 565 bp, Homo sapiens
agcacaggaaccggtgaagatgtttaaggaagaagaagcaacagaggagctgaaggcaggaagggagaagggagaaaggcacaggtgaggcaggctgggaggggcagccatggtagcaggaagcacaaggtcacctgtgactgattcctgagtggtctctccaaccctccctgttcacctgtgtttctccatgtggagtcccagtcatctgcactaaagatacctggaccctaccccaaagattctgattgagctggtgggaccatctgcattttaccaagctccacagatagttctgcaggcaggagtttctggagacccattgcttcattgacattgagcaagtgaatggatgaaaattgaatgacgtgagaagagatcctaatgcaacacctatgggaacaccaacatttatggaggataggagagtggaaacgaaactgaaggtgaatggtcagaatggtgagaggggaatgaggagggagaagaatcactacacgtgctatgctgttccctttacctggamcgctcatcttcctcaggcaaaccatcccttaaaaagtct

SEQ ID NO: 621556 - DNA, 547 bp, Homo sapiens
catttgggactcagaaaggtgtcacacttccattaatggtgacaaagaaatcgcctaaacagagataagctgctcaaagtaagagcgaacttacactcactcttctggagaacgaccaccacatttagccccaatgtatgaaaacggtcactaaatttggtgaaacagaggtggaatgaaagataccaaaataattagcagaaaacaaaatcacccatctacttggcttaaaaaaaaaagaggaactgtagattaaaagttaaggatcacacagcacttggggaggttgaggcgggaggatcacgaggtaaggagatcgagaccatcctggctaacacggtgaaaccccatctctactagaaatacaaaaaattagccgggcgtggtggcrggcgccagtagtcacagctacttgggaggctgaggcaggagaatggtgtgaacccaggaggcggagcttgcagtgagccgagatcgcgccactgcactccagcctgggcgacagagcgagactccgtctcaacaacaacaataaaaaagttaggga

SEQ ID NO: 621557 - DNA, 547 bp, Homo sapiens
catttgggactcagaaaggtgtcacacttccattaatggtgacaaagaaatcgcctaaacagagataagctgctcaaagtaagagcgaacttacactcactcttctggagaacgaccaccacatttagccccaatgtatgaaaacggtcactaaatttggtgaaacagaggtggaatgaaagataccaaaataattagcagaaaacaaaatcacccatctacttggcttaaaaaaaaaagaggaactgtagattaaaagttaaggatcacacagcacttggggaggttgaggcgggaggatcacgaggtaaggagatcgagaccatcctggctaacacggtgaaaccccatctctactagaaatacaaaaaattagccgggcgtggtggcgggcgccagtagtcacagctacttgggaggctgaggcaggagaatggygtgaacccaggaggcggagcttgcagtgagccgagatcgcgccactgcactccagcctgggcgacagagcgagactccgtctcaacaacaacaataaaaaagttaggga

SEQ ID NO: 621558 - DNA, 588 bp, Homo sapiens
aagcttgatctctatcttaagccrcacatgttggaactaagaaatctaagggaggaaccccagatagagatgcagttggccctttgctgaatctcggtccttcctggagcaggcgggcagccctgcccctttatcttctggcaatacaaaggataaaagaaaacagttatcaggtgctgaggggccagatctgagccccgataatgggaatcctgaaacatgagcagcctcttctgtttgcagagtctcatcatgcaaggcagagtgctggaggtagggctataaattgagggtgaaggaaaggcagccctcctaggccctgcgtatcgccagttgtggaattctcttttgcaagaggtcactgagtcaaatgctgtggatggataattttatggccactaataaaatttatagccaaagcaagctaagataataagagtaatcaaacgtccagccctgggacataagaatcccatcctggcctggggtgctggctgggggtgctggacggcacagagaggagtttatctgtctgactcaaggccagcctcagagtctcagaggtgatttgtgtccacatgaactgcg

SEQ ID NO: 621559 - DNA, 490 bp, Homo sapiens
ctcttttctgtattttgatcctttttgttctccatgtatctctctggatattttcaactgatttgcattccatttcactgaatctgtcttgtactaaatctaatctgctattagatccacttgttgtgttcttaatatccattatttcattttttaagttccagaatttcctctttcttttcttttctttatttcttttcttttcttttctcttttgtgagacaggatctctgtcactcaggctgaagtgaagttgactcactgcaaccttgacctcccaggctcaggtgatcctcccacctcagcctcccaagtagctgggactacaggtgtgcgccaccatgcctggctaatttttgtattttttatagagayagagtttcaccgtgttgcctaggctggtcttggactcctgggatcaagtcatctgcccaactcagcctcccaaaatgctgtgattacacaggtgtgagccaccacgcctggcccc

SEQ ID NO: 621560 - DNA, 590 bp, Homo sapiens
ctagaagtagaaataaatgaggtagcaaatagaaaaacggtagaataaaaaataagtcaaaatgtctcttcaaaaaaaaacaaaagtcaaagtttccrttgtaggaaatgtaatggccgtgggcacgaggaattcatttccataggaagacacaccccaaagcagttgaaatctagcaagaaattacttagcagcatatctatcttaaaaattcatcttaaaattcatcttaaaatatcttaaaaattcatcttaaaatatctatcttaaaaattcattcacatttcacattgttttccatactatatctctttattttttactgttcaaaaaatggttccccttccccccaccaccagatcttcaaagaaaagctaatgtcctacgaagatgtgccatagtgtcttttagtataaaaaacacttttgactctaaatcctaccacagaatacgcctaacccaagaggcgcaacatcaccagtctcattttcccaatgagaagatgaagtcacaatgaaatggaattatttaccaaaggcaccaacaatgaatggtagcagaaatggaacaacagcccagtacccatcatt

SEQ ID NO: 621561 - DNA, 624 bp, Homo sapiens
tctgtaaaatggcatgctggggaatgggttatgcagggtgttcagaaagggggcagagggagaggaaaggaaccgacatttggagacggttagtaactcttcccattctgtggatcctggtamagagaatgaaaacagcctgtcttacagagacacacaattcggaattgaagctgccagttccccctccccaaccaggtgcctgagctcagtgccagggacagagaaaagcctggggtgggctctggtacttagagtataacagtgccccatgtcatggagataaacgccagagtgagaaagccctcactagagggacataattgtagctccttccttagggggctcctgtgaaactgaagtgagagaagccaatgacgaaccgctcagccagggccgagcactcccagctacaaggaagtcctgtctaaagtcccactggcttttggtcaacacccacgtgttctctcccggggccttgtggcacaactgtccccatcaccttcacttaactgctcaaactctctctgctgcctggcaatgaagagtgaactgaaaatgccatcacccggaatatccttgatgaagcagtacaatttattaattttattaaatcctgaccct

SEQ ID NO: 621562 - DNA, 624 bp, Homo sapiens
tctgtaaaatggcatgctggggaatgggttatgcagggtgttcagaaagggggcagagggagaggaaaggaaccgacatttggagacggttagtaactcttcccattctgtggatcctggtacagagaatgaaaacagcctgtcttacagagacacacaattcggaattgaagctgccagttccccctccccaaccaggtgcctgagctcagtgccagggacagagaaaagcctggggtgggctctggtacttagagtataacagtgccccatgtcatggagataaaygccagagtgagaaagccctcactagagggacataattgtagctccttccttagggggctcctgtgaaactgaagtgagagaagccaatgacgaaccgctcagccagggccgagcactcccagctacaaggaagtcctgtctaaagtcccactggcttttggtcaacacccacgtgttctctcccggggccttgtggcacaactgtccccatcaccttcacttaactgctcaaactctctctgctgcctggcaatgaagagtgaactgaaaatgccatcacccggaatatccttgatgaagcagtacaatttattaattttattaaatcctgaccct

SEQ ID NO: 621563 - DNA, 518 bp, Homo sapiens
ctcttgtcccatacagaggcaggcacaaactcccagccccaggtcaccatgamtcagccctgtagccagttccctgagagactggctgagcacaacatgctatatgcctcagtttccccatttttgaaagagcagattggcctggccagtcctaggggctctgtggtaggctggataatggtcctcaaagatatccagatcctaatccctggaacctgtgagtgttaccttatatgactaaagagactgaagatgagatgagagatcttgagatgaagagatgaccctggattatccagtgggccctgtgactacagaagagccttcctgagaagagatcacccagcctctgcttaaacaccacctgtgaaagggacctcactgctcgcagtggtggaagcaggtggctactgtgtgaccatcgctttcaaaggcgccggcatgcacattggagggtaagcctctgttttctcatcacacaagtctgaagctgctgtgccaaggcaacttgcctgtaa

SEQ ID NO: 621564 - DNA, 538 bp, Homo sapiens
ccccaggtcaccatgactcagccctgtagccagttccctgagagactggctgagcacaacatgctatatgcctcagtttccccatttttgaaagagcagattggcctggccagtcctaggggctctgtggtaggctggataatggtcctcaaagatatccagatcctaatccctggaacctgtgagtgttaccttatatgactaaagagactgaagatgagatgagagatcttgagatgaagagatgaccctggattatccagtgggccctgtgactacagaagagccttcctgagaagagatcacccagcctctgcttaaacaccacctgtgaaagggacctcactgctcgcagtggtggaagcaggtggctactgtgtgaccatcgctttcaaaggcgccggcatgcacattggagggtaagcctctgttttctcatcacacaagtctgaagctgctgtgccaaggcaacttgcctgtaagcactctgctaacaaggggyggcatctgtctgacccctgagccgtgctcacactgg

SEQ ID NO: 621565 - DNA, 619 bp, Homo sapiens
aacctgcttttgtccatttgcctctcactcagatggaaatatatcaggagacatgcatttccttcgtgcaagtgaaggatgctggcttgagggattacctgcagagggagggacctggttccttgacctcccctaggaatgcagggaacctctgatcaccttaggtgttcttggggaccatcgaagaacatcctagcaagggggtgggtctctccattcctgtctacacccaacacacacaggcaagttggaccttccacttacatctcacattctggtctacatgcccctccccttgcagcccttattccctctggttacctccacggcacccccatatataccccttgtatctccttgtctcaggtagatattctgctttgattttcagataggtgattataataaacatttgttcgacaaacatcaaatgggcaactgctgtgtttggggcactgagccaaatactggggctttaaaaatgaatgagatgtgttcgattcccctctagactgtaagctgcatggkataatatcttaatcatctttaacttctccccagtacctggcagagtggctggtatacagtaggtgctcaatacatacatctgaataaatca

SEQ ID NO: 621566 - DNA, 637 bp, Homo sapiens
tgtatttatgactttcaaatggaaagggaagcatcagagttccctgcatggtaagctatgggggcacttttttggtaaaacagaatacaatgtaaaagacaactatgggacrggtgcagtggctcacacctgtaatcccagcactttgggaggcccaggcgggcggatcacgaggtcaggagatcgagatcatcctggctaacatggtgaaaccccgtctctactaaatatacaaaaaattagctgggtgtggtggcgggcacctgtagccccagctactcgggaggctaaggcaggagaatggcatgaacccggaaggcagagcttgcagtgagccaagatcataccaccgcactgcagcctgggcaacagagtgagactccatctcaaaaaaaaaacaaataaaaaataaaaataaaaaaataaaaagacaactatgtaaagacaggtactgaagagtgagtaaaagcaggcagattctgcaggggaatagacacttggaagaagaaaatggcatagggtgaattttctgcctatctggtgtttagcctgaaagcagaccacaaatgacccacacgaagccaataaaataccagtagaaaacctacagcctttctgaagagacctagagaaagag

SEQ ID NO: 621567 - DNA, 556 bp, Homo sapiens
gacttaaacacctggtctcaagtgatcctcctgcctcagcctctcaaatctacttccttttggataaawttttttacctaaaagtttggaacaggtggggtgcctaaatgcctacaataccccttacactttactccctaagagaaaaaagaaatgcaagtatattttaaactggataagaacaaagcaaaaattggtttcaagtaagattttagtattgcaggcaccagtctgagtccgtctttaggctaggtaactttatgacgattacacaggcgtaattacccgtcagaagtctgataaaagacagcaagaccatgaatattgatgcactttcagaatgctggttggaagaccacggaattaacactgatggctctggttgtatttgccttgttgcttattttctatttccataggcaatacggcatttcctgcctcctacaggaaatgattatgtgtccctctgatggaagtgatgactgagaagagtggaggctgggtttttgctctgaccctgtcctgggctgatgagtggctcaggaatgatctgttt

SEQ ID NO: 621568 - DNA, 585 bp, Homo sapiens
tttcaacactaaatgttccctggaggctaaacctgagtctgggacctgcctcaaggctgttgccctgtgaccttgggtgaggcacggaccctctctgctcctctgtttcccgggagacagccctgggctaatgacccccacttccaatgggaccagaggagcaggtaacacacacatgctgtgggaccacaaggccattatcagcaacggcggcttcatgtagcagggtgaggtcaactgggcagagagagaagcttactcttgtgtgaaaagcttcagtactgcacatggaacaagcccagggccagtcatcccaagcagtagaccctatgacctcagccatgtcaccgtctccaggccttcatcttctcatgtttccatgagggtattcgatgggacagtcccattctaagaatctgttttggaggtggctagactgtgtcctgccaatccctggggttgtcctgtaaggacaggcatccttgagtttgtagattgattctgtaggtctcaagcgggcctctctctcaaatagstagatcttgggcttcattcattcatgggctttctgcttaacatgtatgt

SEQ ID NO: 621569 - DNA, 585 bp, Homo sapiens
tttcaacactaaatgttccctggaggctaaacctgagtctgggacctgcctcaaggctgttgccctgtgaccttgggtgaggcacggaccctctctgctcctctgtttcccgggagacagccctgggctaatgacccccacttccaatgggaccagaggagcaggtaacacacacatgctgtgrgaccacaaggccattatcagcaacggcggcttcatgtagcagggtgaggtcaactgggcagagagagaagcttactcttgtgtgaaaagcttcagtactgcacatggaacaagcccagggccagtcatcccaagcagtagaccctatgacctcagccatgtcaccgtctccaggccttcatcttctcatgtttccatgagggtattcgatgggacagtcccattctaagaatctgttttggaggtggctagactgtgtcctgccaatccctggggttgtcctgtaaggacaggcatccttgagtttgtagattgattctgtaggtctcaagcgggcctctctctcaaatagctagatcttgggcttcattcattcatgggctttctgcttaacatgtatgt

SEQ ID NO: 621570 - DNA, 525 bp, Homo sapiens
tctttatagcaacacaagaacagcctaawacactcttcaggcctcgatttctttaataaaataaggacagtaagagtgcccgctgcagggcttgaatgggattgttaccacctttccctctgctcctcagagttcagatgtagactcagaagttagatggatcaacccaaatcactagtttcattactgagaaaactcagttgaagaatgcaggtggatttgggggtagaatcgggctttccacttcttcctcctcacaactaacactgtcttgttccatctctctcacccgccaatcccacaaccaattctgctccagtaggcttactcctgggaggaacaaatgattcgtgcatctgggcaggcctcaaggaaatagagatggcagaggggcgagagtcctgcaggagtcctctgcgaagcagtgagcaaggggaggttgagagagaggcctgggagccagtggacatctctttctttctaggtgggaatgtaaggagtgagggaggaaaatgcttcttgaca

SEQ ID NO: 621571 - DNA, 525 bp, Homo sapiens
tctttatagcaacacaagaacagcctaaaacactcttcaggcctcgatttctttaataaaataaggacagtaagagtgcccgctgcagggcttgaatgggattgttaccacctttccctctgctcctcasagttcagatgtagactcagaagttagatggatcaacccaaatcactagtttcattactgagaaaactcagttgaagaatgcaggtggatttgggggtagaatcgggctttccacttcttcctcctcacaactaacactgtcttgttccatctctctcacccgccaatcccacaaccaattctgctccagtaggcttactcctgggaggaacaaatgattcgtgcatctgggcaggcctcaaggaaatagagatggcagaggggcgagagtcctgcaggagtcctctgcgaagcagtgagcaaggggaggttgagagagaggcctgggagccagtggacatctctttctttctaggtgggaatgtaaggagtgagggaggaaaatgcttcttgaca

SEQ ID NO: 621572 - DNA, 525 bp, Homo sapiens
tctttatagcaacacaagaacagcctaaaacactcttcaggcctcgatttctttaataaaataaggacagtaagagtgcccgctgcagggcttgaatgggattgttaccacctttccctctgctcctcagagttcagatgtagactcagaagttagatggatcaacccaaatcactagtttcattactgagaaaactcagttgaagaatgcaggtggatttgggggtagaatcgggctttccacttcttcctcctcacaactaacactgtcttgttccatctctctcacccgccaatcccacaaccaattctgytccagtaggcttactcctgggaggaacaaatgattcgtgcatctgggcaggcctcaaggaaatagagatggcagaggggcgagagtcctgcaggagtcctctgcgaagcagtgagcaaggggaggttgagagagaggcctgggagccagtggacatctctttctttctaggtgggaatgtaaggagtgagggaggaaaatgcttcttgaca

SEQ ID NO: 621573 - DNA, 451 bp, Homo sapiens
ccaccagttttgaggtattatgtctctcagactcctgaaactttctaaggctctatagatctgatggctttatttcttgttgccacccctctcacacactccactgaaatctttgccttctctaatccatccccccaccccccgcccgtcttctgaagttaatgtctaaatgcctgtttctttattgctattttagtcaggtttcaggagagagtgaacaaagataaatgtttgtattatattaacatatttatccagaagaattcaaacacrttgtatctatatcctgaagataactttatcagatacgtttcatttaagaattagacatgcatataattttgtaatctctccagtggctcactgagctaaatgaatataaagatgatctgtgacatctatcatctcattcatatttagggttgattaattaacctagtgagctatgttg

SEQ ID NO: 621574 - DNA, 608 bp, Homo sapiens
cctatctgcattaatggagactctctacagatgtaaaatttctctcacaaagatggcttttcagtgccatttcgaaatatgtcaaagaaatgtattttggggtaaactattttgattttcttcagggtcagctatgtatcatgtgatgctataccagagtcaggttggaatttggtttcttactgccaaggagtctgttttgtcaggattacgatgtctactttaatgttaatgctggttagttgtcccttaactccaaaagggagaggttttaatgagacgtgtccaatctcccttctccacatggccaggaattcagttttcctggctttccttggctcagagcttgttagtttagttggttccaagggggtwggggggcacttaggattttttgtttgtttgtttacagagtgactaaaaatagctcctaatttataaagcagttatgagaaagatatgagttcatatatggaaaacacttcgaagagtggctagcacaaagtagcactgtgtacgtcctaggaatggtgatgatgataatgataactagtaaggtgatggtcccagggataatatatatatatatcagggctacagattcctca

SEQ ID NO: 621575 - DNA, 526 bp, Homo sapiens
ttatcacaactaggaaggagtccaactgacatctattgggaaaaggccagagttgttgctaaatattctataatgatcaagacagccccaccacagcaaataattattcagccaaaaatgtcaatagtgctgaagttgataaacagagttgataaactctgttttagtctacttctatatcagccttataagaaccctcatatcttgaggcctaaaaatatacctttattcttttccaaatggtagcaacagttcagcatttccatggccatgtrtggaacagtcttcaaaaaaatttccagactttgttgtctaatacagtagatactagttgtatgtggctaataaacacttgaaatatggttgatccaaattgatataaactataaatgtaaaaaatactcaccagatttcaaaatcttagcataaaaaaagagtgtaaaatatatacttatatacttaatatgtttaaaatacttattgcatgttgaaattatactatatggacatatttggttaaacaaaa

SEQ ID NO: 621576 - DNA, 542 bp, Homo sapiens
atttgttatattacatgagataaggtgaaagagagawcaggaaagaaatcttatttttaaaaacaatagcttaaaaattgtcaaatcaaggcaaagatctaaatatccaactacagggaggtcaaaggtttccagtcagattaaatccaaactagactatagaaagacatattataatgaaatcttcaacaataaaagataaaacatcctgaaagcagcaatagaatgaaacaagtcacgtataaaggaatttcaataagacaaatagaccaattaaagagaataaatagatcccagaaataaatccacacatgtatgctaaattttattttttgaaaaagatgccaagaatgcactgtggggaagtgattgtgtcttcagtaaatgatattgggaacactggatatccaaatgtaaaataaaattagacctgcatctcacaccacatacaaaaataaactcaaagggtattagagacttgtattagtctgtttttgcattgctatagagaaatacctgagacttggtaatttacatagtaa

SEQ ID NO: 621577 - DNA, 630 bp, Homo sapiens
ttctacccctttgccttgagtttatgtgagtccctatgtgttagatgagtctcttgatggcagcagatacttgatttgtgaattattatccattctgcaatttgtatcttttaagtggagcatttagactatttacattcaatgtcagtattgagatgtgaggtactatgccattcatcatgctatgtgttgtctgaataccttgtttttttaaatttatttattatattttggttttataggtcctgtgggattcatgctttaaagaggttctgttttgatttgttaccgggatttgtttcaagatttaaagctccttttagcagtgcttgtagtgctggcttggtagtggcaaattctgtcagcatttgtttttctgaaaacaacaacaacaacaacaacaacaacaacaaaactatcttttctttatttaygaagcttagttttgctggataccaaattcttggctgaaaattgttttctttaaggaggctaaagataggatccaaatcccttctagcttgtaggatttctgctgagaaatctgctgttaatctgataggttttcctttatagatttcctggtgcttttgccccacagctctaaaggttcattccttaatgttgatt

SEQ ID NO: 621578 - DNA, 581 bp, Homo sapiens
tacagcagtttggggaattttttcttgacttgaatgatttgccaatgtctacaatgcagacataaacaatttcctcttattggtaggctctaaataatgataaaatttaataatgctaatatttggaagcatcctggcgattgtttgagttttctttttatattcaataawtttacattgattatagttcatacattttaacaactaaattcttaggtaatgtaacagctgtgaactaaaccaattttttagaactagataacccaaaatttcaaatatacagaaattaacgcattaaaatccttcctcacatctaaaatgcttctcaagtggtaaaatcaatcactgaactatgaaaggataggtattcttaatcattaatcaatggatctaaataagttaccaacaaaaatgttaagaatagcagcttttagattctgattttacatacatatttcctcaaaagattataaaaccaaagatagtaagatttctcctccttttttaagtaaaataattggtgagaaatgttttctcttaaaaatattaacttgctttccaaggatatgttagtttttatt

SEQ ID NO: 621579 - DNA, 508 bp, Homo sapiens
taatttacactcctactaacagtgtacaagtgttcccttttttctgtgtcttcatcaacacatgttatcttttatcattttgataaaagccattctaacaggtgtgaggtgatacctcattgtggttttaatttgcatttacttagtgattactgatcctgagcattttttaatgaacctgttagccatttgtatgccttcttttgagaagtgtctgttctagtcatttgcccattttttaatcattacttgttttcttgctaatgagttgtttggattcctcatatattttggattttaactccttatcagatgtatagtttgaaaatattttttcccattctgtgggtctgttcactttgttgtttttgtttttttgtktgtttttgtttttgttttgctatgcataaactttttagttttatgcaatcccatttgtttatttttgcttttgttacctgaggtgtcagagtcaaatccaaaaaattcttgtccaaaccaatgtaat

SEQ ID NO: 621580 - DNA, 620 bp, Homo sapiens
ctgtcccacatccccccgccaccttaggacccatctattcccagtcaggccctgcctcccaggctcctctgctctagactgtgccttgcccccttgggccatctgtactggaagggcctagcragcttcacatctgagctcttcactcagtgaacctcagggcttcttctcattgtcctgcccgcctcttgcaggtgtgaagactccagaggagggctgcctcctgaacactgcccatgttactggccctgaggcccgctgtgctgcccttcgggaggaattcctggccttccgccgccgccgagatgctactagggctcggctaccagcctatcgacagccagtcccccaccccgaacaggccactctgctgtgaacatccctgatgtgaggctgtgaaaaggcatatggacctgcaaaggaggcccccaaccagacagacctagtttcaaacgagggcactgcccctgcctgcccctttggtgcccaggcacagaccctgatagtgggtttgggtcaccttggtatggaatgtatgtgctgaccccctaggtgagtctggggattggaacagggatcttaggtctgcctctctctctctctctctctctctctctctc

SEQ ID NO: 621581 - DNA, 620 bp, Homo sapiens
ctgtcccacatccccccgccaccttaggacccatctattcccagtcaggccctgcctcccaggctcctctgctctagactgtgccttgcccccttgggccatctgtactggaagggcctagcgagcttcacatctgagctcttcactcagtgaacctcagggcttcttctcattgtcctgcccgcctcttgcaggtgtgaagactccagaggagggctgcctcctgaacactgcccatgttactggccctgaggcccgctgtgctgcccttcgggaggaattcctggccttccgccgccgccgagatgctactagggctcggctaccagcctatcgacagccagtcccccaccccgaacaggccactctgctgtgaacatccctratgtgaggctgtgaaaaggcatatggacctgcaaaggaggcccccaaccagacagacctagtttcaaacgagggcactgcccctgcctgcccctttggtgcccaggcacagaccctgatagtgggtttgggtcaccttggtatggaatgtatgtgctgaccccctaggtgagtctggggattggaacagggatcttaggtctgcctctctctctctctctctctctctctctctc

SEQ ID NO: 621582 - DNA, 580 bp, Homo sapiens
tgtgcagaactccaccccgggggactctattcaactgaagcctgaaaggatggggggctctttctycacccctgaactgtgctgtcctccaccctcagagacaaaagaaccccagccagcctcctcgcgctgaggtctccccctctgatccctccaggatttaggaagagataccaggtcatagaaaaggagatgaaaggcagggagaagacaggtctgagccctgggtcccaacaccgaaaacacccctagggccctgggcagagtgacctcactgttagtccctgcccaggcttgaagtaagaggtgagcaagatcacgtgggggtgctgtcccggcctgcaagtcccagtcctgtcacacactagtcagttggggtcgggggaaggccttcctgtgcctccttttaccttgccagcctctaaactaggaggcttcttcctacataaacacgcccacagtgtttagctaactttctaggcagaaagtttcctactggggcacaagtctacgggctctcggtggaggctgaggtactcacgggtggagaccactgcagccgcctttgtagattcagact

SEQ ID NO: 621583 - DNA, 467 bp, Homo sapiens
aatcaatggaagatactgcacaaagaattcacagatgccatgaagttctcattggggtgctcctcctctttgaacagggcggtgggggagggaacatttagcataatattcccttaaggaggagagccatagaatataactgcacatccttggcagctctgcccaactggatgaaaaaggctgaagcctgaggaatcaggattgatgggtgactgagaagaagaaagtccaagaacagaaaataatgtggaggacatgtcagtgataggagaagtgtgcagacttttgaatggtctaagcactgacctcatcaatgttagggtccagctagagcatcagcacagtgtgtgccaacctggatactaatccaagggctcatgaatctagctcaccaccaacygtgcctgtctctgaagaaaaagtgcaaataactcagagccagaagctgattttatatgcaatacctt

SEQ ID NO: 621584 - DNA, 657 bp, Homo sapiens
  misc_feature 540: n = A,T,C or G
tctctcccaacagactttgagctccttgaaggcagagaccatatattactcatctttgtgtcccctgacctgactccataaggactaaaagatgaagccataaatcagcataggaatgatagagtaacatctcccctgctgccccmccagagtcagccagtaaagggacccacccaccagccagagagcaagatcagcatggtgtcctcagggcacaaggcaccccaggagttaaataaccaaagccatcacctaatcctaagagactaacatgatggatgcagcctgttcgccaagaggcaggtaggaagtggtgttggccccagaaaagccagaccgtatctgtacacatgcatccccattattcccttcgttgagaggcacacctgccacctacatcccccctccacagccaaggtctctgcaggctcactgttggccccagctgtcaggagtgactgttagacttctgcccctgctccactgctgcccctctctctggggctggatgggtgcatggcaccaaagctcttgaggganaaagccctcccaacccccatcttcccatcccaccccatgagtctcacaggtgtttcactggatggcaggggatgctggtcgactgcccagtgccaccagatggccgtgttctagcct

SEQ ID NO: 621585 - DNA, 462 bp, Homo sapiens
cataaatacttgtattatgaaattgtaaaacataatcagagaaccaaataacttggcctcttaagtcccatttttaaaatggaaacttggactagttagtactttccaagcatttttagttataaaaatgccttcgtaaagtgaaatggtcatagttaataatgacagttaatctttgtgttttcacatatygtctcatttcatccttacaacaccatatgatcagtgtcattatgttacagctgagggaagtggggctagacgaggttaaataacatactcaagatcagacagctaatgaatgaaccagaactcagacccagttgtgttgaacttcaaatctcatgcccttcaatccctcagactcctctctatgaagtggaaggggaggttttgccaattgaatagaagttaggggctcctcacagccccactaactccacttctcatccagggaactca

SEQ ID NO: 621586 - DNA, 460 bp, Homo sapiens
acaatcaataaatgtgagctcaaaatgaaccctttctctcctacgaggcactcacttcccttgcctttcctgggttatcttctatttcattgtccctggtagctatgttctaatcaccaaggcaggggttttactttttggaggtcwgagaaccctttgaatgctacagacacattttacagaaaaaatgcacacaaatacacacacattttgcacacaaccaaggtttatgggcttctgattaaaaccactttaccaaggaaaagacttctgtgaccatccgccacccccatacacacacaccactaattcctacccttcactagcagtgactcatccatgcctttgctgccagacaccagtaaaataaacctggttcctctctcctaatatttgttatgttgagagatagaaaaacaaaaacacaaagcatccccaacaattataggcagttacactt

SEQ ID NO: 621587 - DNA, 460 bp, Homo sapiens
acaatcaataaatgtgagctcaaaatgaaccctttctctcctacgaggcactcacttcccttgcctttcctgggttatcttctatttcattgtccctggtagctatgttctaatcaccaaggcaggggttttactttttggaggtcagagaaccctttgaatgctacagacacattttacagaaaaaatgcacacaaatacacacacattttgcacacaaccaaggtttatgggcttctgattaaaaccactttaccaaggaaaagacttctgtgaccatccgccacccccatacacacacaccactaattcctacccttcactagcagtgactcatccrtgcctttgctgccagacaccagtaaaataaacctggttcctctctcctaatatttgttatgttgagagatagaaaaacaaaaacacaaagcatccccaacaattataggcagttacactt

SEQ ID NO: 621588 - DNA, 545 bp, Homo sapiens
tgttccctccccatacctacttcacttatttaacaaacatttattgagcacttatgctgtatactaaggatataaacacaaaacagtaaatctragagaaagagacaaatgcacaaataaccataacatatcaagtccattaacagagtttaccaaatgttacaactctggccctatctttctttttttcccccttaatggctaaccttctctctccaaaagctcatctggcattcctcttgaaagaggaagggtcctatgagttgggtcctgaaaaacgagtgacaggtcatctgaaggccaggagagaaatatgcacactaggcagaaaaaacagcataggcaggctgggcgcagtggctcatgcctgtaatcccagcattttgggatgccaaggcaggcagatcacttgaggtcaggagttcaagaccagcctggccaacatcgcgaaacccccatctctactaaaaatacaaaaaaattagctgggcatggtgccgcgtgcctgtaatctcagctacttaggaggctgaggcatgagaatc

SEQ ID NO: 621589 - DNA, 545 bp, Homo sapiens
tgttccctccccatacctacttcacttatttaacaaacatttattgagcacttatgctgtatactaaggatataaacacaaaacagtaaatctgagagaaagagacaaatgcacaaataaccataacatatcaagtccattaacagagtttaccaaatgttacaactctggccctatctttctttttttcccccttaatggctaaccttctctctccaaaagctcatctggcattcctcttgaaagaggaagkgtcctatgagttgggtcctgaaaaacgagtgacaggtcatctgaaggccaggagagaaatatgcacactaggcagaaaaaacagcataggcaggctgggcgcagtggctcatgcctgtaatcccagcattttgggatgccaaggcaggcagatcacttgaggtcaggagttcaagaccagcctggccaacatcgcgaaacccccatctctactaaaaatacaaaaaaattagctgggcatggtgccgcgtgcctgtaatctcagctacttaggaggctgaggcatgagaatc

SEQ ID NO: 621590 - DNA, 548 bp, Homo sapiens
ttgaacaatgatcatttgccttttggaaattatggccacatactttgtgtagcttgatttacaaatagcttggctaaaaagcagttcagcaartcaacttcttaaaataggctatgaaggaaaagtgcatgatgaagccagcagtaaacaaagaaattacacaatttggtgagagagggtttggaggtggaggggagttgttaaaggcctggaatcattgaaaagtttggggatgacagtgacttggtacaactgagagaactgcccctcaaaagattagaaggacaattgattggcaagagacacttgacagagccagtattgagttccatttattttggagcagtatgcatctgctgggtttgggtactctggaaaaatccaaaacataatataatggaaaaagcatgggtaaaaatcacttattagcaagttgtttaatctttgagcctcttcgttcatctataaatttagaatatgaatatcaactttgaagtgttgctgtgaaaattaaataaaaccatatatggcggaataggtgcccaaaa

SEQ ID NO: 621591 - DNA, 609 bp, Homo sapiens
gatgtaaaataattagctgttgttgttggggcagggcttggagttgggggttggatattaagattccaaacctgtataatcttttatctggaaaacctaccagataaaacaaagagattaccacccccatgtttttagggagagagacagaaagtatgacacacaaaagaattaatttgttcaactttgatggaaggtaaacccctttagttctcactttgtttttaagactaggaaaagattcaaacttcttaattatggattatccaccatgttctttccttcctcggaatctttgagatccaagaaygtctgttctttaagatgtaacaaaaaacacctgaagaaatttgaaaatgacagaatgttaaatcataatagatagcagaattatggttttgtaagaaaatacctgatttttaggagatgcatgctgatatatttagtggtgaagttcaatgatgtttgcaacttcacatggttcaaaaaattttataaatatataattatacatatacataaagcaaatatggcaaattgttgttgaatttagatgatggcaatatgagtagtgtttaaaatagttaggtcaggcggggtgcagtggct

SEQ ID NO: 621592 - DNA, 553 bp, Homo sapiens
agcactgggtgggagtattagcctttccaatgggcctatcaagagaatttatccaggaatatttaggaaccacattctaaagacgttacaaaggcaattacagaagaaaatgtcatgtagttccctctgttcagaacacacacaatcttgagaatcatmcctctttatctaataattaatgcttacctgcaaatgaacatatcaatcttaagaggtggtataagaaaaaaagaattatataggaaataagccaaagtcttataaaatttgaaggtgttattaaaggattaaaaaggaaacaaaaggattgtgataagaagcaaaaaaaaaacattttttttacataaccagaaaacaaattaaaaaattaaaatcccccaagaaaccaaattaactcatttttttagttaacttactaaatgttttggaacatacaaagtgcaaaatatcttttgcatccctttaagaaacacctgcctttctttggtaaagaatttcttgcaggaaagattccaaagtttgaagttccctccaacgatcccagcagaaatgt

SEQ ID NO: 621593 - DNA, 385 bp, Homo sapiens
aaggcacagactgtattttagtcacctttgtaagctgttacctttaaatttaacctaattggttagtaaagagggaggaattagaatctctgggtgattctgggctaggaatgtcaactatacagcatgtgagccatcactcatcaccccaccaccccttagcagataacactaattcatcacagtgctttttatctgactgagcctcagaatcatcctcaatatggtgatacagagagtcattttcaatcaaatggagttagcccaacaaatgaaacctatttcttatcctggcatgtctgagtcacaaaggtccctrtgtattctcctttcccgctatttgccatcctgtctgtgtcacttactagctaggggaacttcagtc

SEQ ID NO: 621594 - DNA, 609 bp, Homo sapiens
aggtgattctgaccatgttaacattttaaaactctttttaatttttgtgggtacatagtgggtggatatattcatggggtatatgatatattggggtacagccatgcaatgcacaatattatcatagaaaattgggcatccatcccctcaagcacatatcctttgtgttacaacaatccaattatcctttcagttatcttaaaatgtacaaataaattattattgactgtagtccccttgttctgctatcaaatactaggttttattctttatgtctattttttgtaccaattaaccatccccaccttccctgcctcygccaccacccttcccagcccctggtagtcattcttctattctctatctccatgaattcatttgtcttgatttttagaccccacaagtaagccggaacatgtaacgtttgtctttctgaacctggctgatttcacttaacataatgacccccagttctgtccatgttgttgcaaatgaaagaatctcttttttatggctgaagagtactccattgtgcattagtgccacattttctttatccattcatctgttgatggacacttaggtttcagaccacattaacctttgaaa

SEQ ID NO: 621595 - DNA, 512 bp, Homo sapiens
ttctaataaaatggtttttcgatgagtcctagagaagtcagccatttccttcaaaaataataatagaatgtgtagaagcacataaactctttcaatgtgcatcgaataatagagaaattgttaaacatttaactgacctaagaagctatacaagtcacccaaacagcatgtgaccttaataaagaggtggatatgggtattaccaggtggcaaagagcaatgaaaaaaaagaaaataagtgcagtataaaatgtgcagagttcaggaaaatgacagtagcctccraaaaagcatcagaaaaaagaagtgacaacaaaatattctagcaacgagtagattataaaatacacagatcatataaatacaagaaatccagaaagtaaaaatctagtaataatgctaaatctcaaaagtctatgagatttaaaattattgcattttaaaacattctttttttttaatttttttatttatttatttttgagacggaggttcactcttgttgcccaggc

SEQ ID NO: 621596 - DNA, 369 bp, Homo sapiens
aaattatgttttctataatttcacctgatatattttggatgtcttcttcaaatctcatgttgagaagtaacccccagtgttggtgctagggcctgttgggcagtgattggattcactggggtagatttctcatgaatcgtttaacaccatccccttagtgctgtcctagcaatagtgagtgagttctcatgagacatggttgtttaaaaaagtatgkcaccttgcccttttctctcttatcaccttctgccatgagtaagtttcctgaggccctcaccagaagcagatgccagcaccatgcttcctgtaaagcctacaaaactgtaagccaattaaacatcttatcttataaattactcagccttaggt

SEQ ID NO: 621597 - DNA, 555 bp, Homo sapiens
taaaatttacagttgagtcattataagaaacaatggccagaatgcagtgagatggcagtcaaacttcataaaaaatattctcaaccaaggatcttatatctagaaaaactatctttccaaaytcaggccaaaccaaagacattcctagataaataaaactgggataattaatgtctaacaaatccactttaaaaattactattttttgaaaactgaaagcaaataaacccatatgcaaattcatatctactcaaaagccagaccatcagtatagataattatgtaattgcaaaagataatataaatacatatttcctttttcatctctcagctgatataaaaaaattgtatataacagtatatatatactttgttttcagcttataacatgtagaaatataatatatttaataaaagcaacaccaagtgggtgggtgggagcaaagttgtattggagtagaaaaatgataccatatggtaacttgaatccataggaaaaaataagaagaacagaaatgatatagaaaacatacagcatggaatactatgcagcca

SEQ ID NO: 621598 - DNA, 577 bp, Homo sapiens
gtttgtttatttatttatttttgtttttgttgttgttttggaagcctttgctttggaaatgctccctctgacatcaactaggtgactgccttgagttgttcttcaactcttgaattatttaagtcttcatacctcagttaaacaatgcaacaagcaagcaggtaaaccttagtatgagctagtagtttcatatatatctatatttaatcttcacaaaatcaccatgagatatgtgtarttatttttgtcgttattataagggaataaacattctctcatagattaaattaatttcccaatgtcacacaactgattaaatgttacagaatatatgtaattcccagaattctgaatctaattatagtgtgctctttttgtattatatgtaccattttttcccaatagattttgagttactaaaaaatgggcttgtatctagtatatttttgattccccgcaattttgtgagaaccttgcacacaatagaaacgcaatatatatttactggttgataaattaaacatacaaatcttcttccttgaatatccacatttctgaccaactcttaactaaattc

SEQ ID NO: 621599 - DNA, 577 bp, Homo sapiens
gtttgtttatttatttatttttgtttttgttgttgttttggaagcctttgctttggaaatgctccctctgacatcaactaggtgactgccttgagttgttcttcaactcttgaattatttaagtcttcatacctcagttaaacaatgcaacaagcaagcaggtaaaccttagtatgagctagtagtttcatatatatctatatttaatcttcacaaaatcaccatgagatatgtgtaattatttttgtcgttattataagggaataaacattctctcatagattaaattaatttcccaatgtcacacaactgattaaatgttacagaatatatgtaattcccagaattctgaatctaattatagtgtgctctttttgtattatatgtaccattttttcccaatagattttgagttactaaaaaatgggcttgtatctagtatatttttgattccccgcaattttrtgagaaccttgcacacaatagaaacgcaatatatatttactggttgataaattaaacatacaaatcttcttccttgaatatccacatttctgaccaactcttaactaaattc

SEQ ID NO: 621600 - DNA, 645 bp, Homo sapiens
tgatggaatgaagggtcctggtgtcaggcgtttggggtgcttagtcataaaagatgggaaatggaaattttctcgaggtgtagtatagctttatgtatgagcttataccattttatataaactttctaactttttcacatgagcctccaatcccaaaaaggactatggttcttgctcagtgaatttagttcaaatttcatgtacatacattttgaagaaatgcctaacaatcaaggcacctaatatccctttaaatttctcagggttgatttgttcttcctgtagagagtctcaagtctcaattcaaatgggggctttaaggacctaggattctaagagaatcttttaagagttgtattgctggggttagccaggtgaaacagtaatgtcaaaagacatcagcttggatttattgaaatggatagttagcctttgacatataattatgacagttcaaatctcaaccttattcatctctcttgttagtaatgtgcctctttgcagcatcttataaattctccccaaaaaggtaaaatgaaagaataagataagattttttctgtttgaaaaatgaaaatarttgaattggataaaaatactggaaagactatgctttttaaaaaacaccttacttgttaaaatgtc

SEQ ID NO: 621601 - DNA, 544 bp, Homo sapiens
ttgcatgtcattcttcctcttggctgttagttgcggggtttgagccttttcctttctgtgattcaggtgcctcactctttcctttccaggttcttccagttcttttaacatgtcaaactctggagatttgttcatgagcgtgcagtcactcaatggggattcttaccaaggggcccaggttggagccaacgtgcaatcacaggtagggacccagccaatatgtcrccaggtgaatgccttagagtccaagagccctcagttgtattggacttcctgcttctgtccagagagagagagaaaaacagatcagaaccaaaaccttaccaacgaccgaaccaaaatcaagacaaccattgtcatggggaatctcgtccacactttgtgaatgcatttggctctggcttttcagttgtacttggaaggcaggagaagaacagtaagcacagggcaaggtgaccgagacacatcaggcaggtggaaccagcatattctttattcaccaaagggaaaaggaggaggtgttcaggatgttacctcaatttcc

SEQ ID NO: 621602 - DNA, 454 bp, Homo sapiens
ccagctaatttttgtatttttggtagagacgagttttctccatgttggcctggctggtctcgaactcctgacctcaagtgatctgcctgccttggcctccsaaattgctgggattacaggcgtgagccactgtgcccagctttactgtgtaatttttacacatcaatccacactcacaatcatcttactattgcatgttttaacagaggtggaattgttacagatcattgtaggtaggaaaatgacggactcatttgaggaaaaagcaagaagctttttcctcaaaaccttcctccactgcaaaacccccttacagggagactaaagacgtacaatcatatggagtctcattctgtatagattcatagaatggaagaaatacaacgacttttgaaataatcaaagccacctcccctcagtgtgctggtgaaaaatctgcagtccagagacactt

SEQ ID NO: 621603 - DNA, 454 bp, Homo sapiens
ccagctaatttttgtatttttggtagagacgagttttctccatgttggcctggctggtctcgaactcctgacctcaagtgatctgcctgccttggcctcccaaattgctgggattacaggcgtgagccactgtgcccagctttactgtgtaatttttacacatcaatccacactcacaatcatcttactattgcatgttttaacagaggtggaattgttacagatcattgtaggtaggaaaatgacggactcatttgaggaaaaagcaagaagctttttcctcaaaaccttcctccactgcaaaacccccttacagggagactaaagacgtamaatcatatggagtctcattctgtatagattcatagaatggaagaaatacaacgacttttgaaataatcaaagccacctcccctcagtgtgctggtgaaaaatctgcagtccagagacactt

SEQ ID NO: 621604 - DNA, 606 bp, Homo sapiens
ggtatagaaataaaagtatagaagttttgtatgtgatcaaatttaaattataagcttaaagtagactgttacagctataagattgttttatgtaaacttaatggttaccaaaatgcaaaaacctatgtacatacacagaagatgaaaagaaagtaatcaaagcaatcttctattcaaagaatataaaatttcagttagatagaaataagttcaagagatctattgaagaacagggtgactatagttaatgatagtgtattattgtttaaaaatcactaagagaacatattttaaacattaccaccacgaaaataaatgtgtgaggtagtacatatgttaattagctcaactgagccattccacaatgcatacattttytaaaacatcatatacacaattaatgtatacaatgtttagttgtcaattaagaaataaagtgagaattttttaaaggtaatcaaagcctaccaatacacaatattatcaaatcacaaaaggagatagcaagagaggtataaaagaacaaaataactataaaactttcaaaaaacaattaacacagtggtaatagtaattccttaacctctcaataatcattttaaatat

SEQ ID NO: 621605 - DNA, 643 bp, Homo sapiens
ttcttgtcttcttgataattgttatccaattcactatatttatatagaatatttcatcttataaagtagtatcaagatacttgaactcgtgtggtcctcagaatatccctgtgaagatatagggaacatattattaacatcaattttatcttgtcatatgaaaactgaaacatacccataattaggcaaaaaagagatttataattcaaagtctatgtttatgaatcactacaaatgcaagctatccatattaaacaaaatacatatttctattacatataacacatataattctacattaatataaatagttgattaagcatgtattggaactatttctaaataatgccttttaagtaatagtgatatttaaatacttaagctattaaaaatcctccaaatttataaatatttaaaatatggtagctcaggcaagcacatgtttatatattttggagtcatcgtcaatgcaggsgctaactctatgctatgttgccctctagaacattcagaattacactttgttcttcagagtagcagaattcagaaagtctccctcagattttgttactctagtcaagtcacatccaagagataagccaaataatcaattaaagtaagatctttattactaatttcttat

SEQ ID NO: 621606 - DNA, 605 bp, Homo sapiens
gagctgcactgaaggaattcaagacatgaaagaccatttaaaagatcaacaaatccagttgtttttatttgaaaattaataaggtatataggccactagctagactaatacaaaagagagaagatctgaagaaacgaaattagaaatgataaaggggatgttaccactgactacacagaaataaaaataaccattagaaggtacacaaccacctctatgcacaccaactacaaaacccagaagaaattgataaattcctgaacacacacacaccctccaaagaytaaatcaggaaaaaaatgattccctgaaaagatcaacaatgatctctgaaattgaatcaataataaatagcctcccaaaaaaaaaaaaaaaaaaaaaaaaaagctcaggaacagataaattcaaagccaaattctacaagatgtacaaggaatagctagtatcatatctacagaaactattccgaacaattgaggagtagcccctccccgactcattctatgagaccagcatcatcctgatggcaaaatctggcagagacacaacaacaacaaggaaaactttaggctaatattcacgataaacaactgtgcaaaacttct

SEQ ID NO: 621607 - DNA, 462 bp, Homo sapiens
aatggagaaaaaaacacaagagattaataaaataagaagtttggtttttttatttttattttttaagttaaacaaaattcacaaacgtttagccagactaagaaaaaaacagagcataactgaataaattaaaccaaaaataamaaaggagacattctgtgatcgtttatattaggtgcccacttgattagattgaagaatgcctagatgactgataaagtattatttctgtctgtgtctgtgaaggcgttgccagaggaggcagatatttggtcagtggactgagagaggaagatctacactcaatgtgggtgagcaccatccagttggctgccattgcagctacaacaaagcaggtggaaaaatgtgagataaccttgcttgccaaatcttctggcttccttcttttctcagtgctgcatgcctcctcctattcctcctgcctttggacataggacttca

SEQ ID NO: 621608 - DNA, 625 bp, Homo sapiens
gaattttaaaaaatgttcttatagtttattcgcttggatagctgaaacatgggtcaaaatatggcccactgcgagtaagctggaaatgcctgatctcccttggtttaatgtagaaaaaggaatccaaaagcttagggagattggaatgttagagtggatttgtaaatttagccctactaattccaactgagagaacacagaagacattttcttcatcaakaccttgtgaaatagatttgtcagaagagcaatggcatccttgaagagctgtgtgatctctcttctctttatgccagatcttatggtgagaaccacagtcactcaattggaaaacttaaatgcgatgggaataattggaccctgaggtggcaggggccaagtggcagcactcaaccgtcaaaggcaaggtaggcatagttgcagtaatagacaacagagacaaagcagcaatcagaatactcttactcttgtagagctctagcattggctaattaatcatggtgttcctggaagtgaaattgataggaagcctactatattcttacttgattggtatgagcagaaaacttccaggccaagtgaacaaaagattgatttgaatgataaaaaacaaagaatcacagcc

SEQ ID NO: 621609 - DNA, 440 bp, Homo sapiens
tccacacagcattgtctctgatcaagaaactcacttcacagctaaagaggtgtgacagttgtgggcttgtgctcatggcattcagtagtcttaatatgtttcccattattctaaagaagctggcttgatagaatggtaaagtggacttttgaagtaactatttcaatgccaatcaggtgaaaatacttttcaggsctgggagaaagttctccagaaggttgtgtatatccttgattagcattcaatatatggcactgttccttccatagcaaggatgtgtggttccagaaatcaaggagtaaaactggaggtggtaccactcactgtcacccctagtaacccactagaaaaatttttgctgcctgtttccatgacattatgttctgctggcctagaagtgttatttctagagagagaaatgctgccacgaggagacacaa

SEQ ID NO: 621610 - DNA, 545 bp, Homo sapiens
atcctgtcaatggcaacaagattgatgaaactggaggtcattttgttgagtraaataagccacagaaaaaaaaaaatcacacgttctcacttatctgtgagagctaaaaattaaaaagagtgtattcatagagatagagagtagaggatggttaccagatgccgggaagggcagtcgggggctgggggaaagcaatgagatggttaataggtaccaaaaaaaaaaaaaaaaaaaaaacagagtgaataaaacctagtatttgctagcacaacaggattactgtagtaacattaatatagttgtttatttttaaataactgaaagaatattaaattgtttgaaagaaaatataaatgctttagatgatgaatgccctatttacccagaggtaatcattacacattgcatgcctgtatcaaaatatttcatgtaacccataaatatataaacctactctgtactcacataaagtaaaaataaaaaataaattaaaaaacaaacctattaaagcacattctggtaaaattagacattttttaaatgaa

SEQ ID NO: 621611 - DNA, 545 bp, Homo sapiens
atcctgtcaatggcaacaagattgatgaaactggaggtcattttgttgagtgaaataagccacagaaaaaaaaaaatcacacgttctcacttatctgtgagagctaaaaattaaaaagagtgtattcatagagatagagagtagaggatggttaccagaygccgggaagggcagtcgggggctgggggaaagcaatgagatggttaataggtaccaaaaaaaaaaaaaaaaaaaaaacagagtgaataaaacctagtatttgctagcacaacaggattactgtagtaacattaatatagttgtttatttttaaataactgaaagaatattaaattgtttgaaagaaaatataaatgctttagatgatgaatgccctatttacccagaggtaatcattacacattgcatgcctgtatcaaaatatttcatgtaacccataaatatataaacctactctgtactcacataaagtaaaaataaaaaataaattaaaaaacaaacctattaaagcacattctggtaaaattagacattttttaaatgaa

SEQ ID NO: 621612 - DNA, 551 bp, Homo sapiens
ttccttcttaccatcaccttagttgtgtcccagatattgtggtatgttgtttctttgttttcattagtttcaaagaactccttgatttttgcctttattccattatttactccgaaatctttcaggatcaggtcatttaatttccatgaaatattatggttttgagctatttcctttgtcttaatttctaattttactgcactgtgttctaacagagaggttggtataacttcagttttttttgcatttgctgagaattgttttaagccttattgtgtggtcagtagtaaagtatgygccatgtgacaatgagaagaatgtagattatgttgtttttgagtggagagttatgtagatgtctatcagttccatttgatttagtgttgagatcaggtcctgaatttctttttaattttctgcctcaataatctgtctaatatggtcagtgaggtgttaaagcctcttacaattattgtaggggagtctaagtgtctttgaaggtctctaaaaatttctttataactctttgtgctattatgttgggtgcatat

SEQ ID NO: 621613 - DNA, 560 bp, Homo sapiens
gtgaaaatagccacactgcccaaagcaatctacagattcaatgcaattaccatcaaaataccaatatcatgttttatagaattaggagaaacaaccctaaagttcatatggaaaaaatgagcccaaattgccaaattaatcctaagcaaaaaaaaaaaaaaaaaagaaaaaaatctggaggcattacattacctgacttcaaataatattacaagacaatacttatcaaaactgcatagtactgatataaaagtgggcacatagaccaatgggatagaataaagaayggagaaataaagccgaatatgtacaatcaacttgacaaagcatacagaaacataaattggaaaatgtacaccctattttaataaatgatgatggagaaactagcaagtcacatgtagaagaatgaaactggattcctatctcttcccatatataaaatcatccaacatggatcaaagacttaaatataagacctgaaactatggaaattctggaagacaacattgaaaagtctctactagatattagcccaggctaagaatatacgactaaga

SEQ ID NO: 621614 - DNA, 560 bp, Homo sapiens
gtgaaaatagccacactgcccaaagcaatctacagattcaatgcaattaccatcaaaataccaatatcatgttttatagaattaggagaaacaaccctaaagttcatatggaaaaaatgagcccaaattgccaaattaatcctaagcaaaaaaaaaaaaaaaaaagaaaaaaatctggaggcattacattacctgacttcaaataatattacaagacaatacttatcaaaactgcatagtactgatataaaagtgggcacatagaccaatgggatagaataaagaacggagaaataaagccgaatatgtacaatcaacttgacaaagcatacagaaacataaattggaaaatgtacaccctattttaataaatgatgatggagaaactagcaagtcacatgtagaagaatgaaactggattcctatctcttcccatatataaaatcatccaacatggatcaaagacttaaatataagacctgaaactatgraaattctggaagacaacattgaaaagtctctactagatattagcccaggctaagaatatacgactaaga

SEQ ID NO: 621615 - DNA, 377 bp, Homo sapiens
aagttagttaccccttagatatactggggacacaggtattgggtaaatacarccattctgaatgggagaaattggccaaaatgaaggcattaaaggccccatgcaagtttgaaatccagtggggcagtcaagtcataaagctccaaaatgatctccttcaactccatgtctcacatccaggtcatgctgattcaagaggtgggttcctgtggttttgggaaactctgtctctgtgtctttgcagggtacagcctcagtctcgggtgttttcacaggctggcatttctgcagcttttgcaggtgcatggtaaaagctgttggtggatctaccattctggggcctggaagatggtggccctcttttcacagctccacta

SEQ ID NO: 621616 - DNA, 377 bp, Homo sapiens
aagttagttaccccttagatatactggggacacaggtattgggtaaatacaaccattctgaatgggagaaattggccaaaatgaaggcattaaaggccccatgcaagtttgaaatccagtggggcagtcaagtcataaagctccaaaatgatctccttcaactccatgtctcacatccaggtcatgctgattcaagaggtgggttcctrtggttttgggaaactctgtctctgtgtctttgcagggtacagcctcagtctcgggtgttttcacaggctggcatttctgcagcttttgcaggtgcatggtaaaagctgttggtggatctaccattctggggcctggaagatggtggccctcttttcacagctccacta

SEQ ID NO: 621617 - DNA, 566 bp, Homo sapiens
atttactttctgactgtgcttctgaatatatacaagggcctagaataattttcagtgtcaaataggcagagaaggacataaatttcatattcagtaaatgccaattatcccctatggatcttgttcagctctttgcatgcatgtctcagcagatcctcacctcaatcctatgtagtaaaatgattatctccatctgacygatgaaaagactcagatagtgaggtaagttaattgccttagcttatatgggaaataaatcccagagccaggattcaaaatgaagtgtacttttacttcagatttattctacttccattgttggatgctacatctgtatactaccatttcctcatttaccacaactatcctgtaattatattactctgatttatttacacagcaatatgtcctccttaactttcagaagaggcaataatccccatactttaagtatatggatagatcaaaagtcagattcaaaagtcagattctaattgggaaattgtgacacactgacttctcatattcaatttttctattatttttagggaaacctgctgctagaa

SEQ ID NO: 621618 - DNA, 566 bp, Homo sapiens
atttactttctgactgtgcttctgaatatatacaagggcctagaataattttcagtgtcaaataggcagagaaggacataaatttcatattcagtaaatgccaattatcccctatggatcttgttcagctctttgcatgcatgtctcagcagatcctcacctcaatcctatgtagtaaaatgattatctccatctgaccgatgaaaagactcagatagtgaggtaagttaattgccttagcttatatgggaaataaatcccagagccaggattcaaaatgaagtgtacttttacttcagatttattctacttccattgttggatgctacatctgtatactaccatttcctcatttaccacaactatcctgtaattatattactctgatttatttacacagcaatatgtcctccttaactttcagaagaggcaataatcccmatactttaagtatatggatagatcaaaagtcagattcaaaagtcagattctaattgggaaattgtgacacactgacttctcatattcaatttttctattatttttagggaaacctgctgctagaa

SEQ ID NO: 621619 - DNA, 432 bp, Homo sapiens
atgtttatgatcttcattcctgtccatattctgaattctatttatgtcacttcagccatgtccacctggttaggagccattgctgggataccagtgaagtcattttgaaatagaagacactctagcttattgagttaccacagtttttgcgctargtctttctcatctttgtgggctgatgtttcttcaatcttcgaagctgctgacctttggatttttttaattattattttatttgatgtccttgtgggtttcattgtggtataagataggataagttgactgtattcatttctggaatattttcttgagccaaggttcagttcaggactcttggactgcatgttccaactctgtaggactgtcattggccccccagctttgtgctgtgtcccttggaggttaggaactttccatgccacactggagtgg

SEQ ID NO: 621620 - DNA, 608 bp, Homo sapiens
aggcaggagaatcacttcaacctgggaggcggagcttgcagtgacccgagatcgtgcattacactccagcctgggcaacagtgagactgtgtctaaaaaagttaagaatttaaactggaaagtcaagttgaagtatgtttagtatcctattgaaagagtgagtaaatctgtttttcaaacattcaactcaactcagtaaattagattaattaaatgcggttaacatacccttgttctttctttattcttttttatattatctaccttttrgcattttattttttgatatttgttataactttacatattggctagaaaaggatccaactttatactttgggatctttggtgatttttcatctgtgctattttatgaatcctattatttcttcagctcttagaattataagattggctatagtcaatcgcaaagaaatctaacctgctcaggtacattagaaccaaatccctgcaaggttatttggtgaaacatgaaataatttactgactctaagacaattttcacagacattcttaacaaatttcatcctgtctttctactacaaattactatatagaagacagaggatgagcatgcataaagagtc

SEQ ID NO: 621621 - DNA, 404 bp, Homo sapiens
attaattaaatgcggttaacatacccttgttctttctttattcttttttatattatctaccttttagcattttattttttgatatttgttataactttacatattggctagaaaaggatccaactttatactttgggatctttggtgatttttcatctgtgctattttatgaatcctattatttcttcagctcttagaattataagatyggctatagtcaatcgcaaagaaatctaacctgctcaggtacattagaaccaaatccctgcaaggttatttggtgaaacatgaaataatttactgactctaagacaattttcacagacattcttaacaaatttcatcctgtctttctactacaaattactatatagaagacagaggatgagcatgcataaagagtc

SEQ ID NO: 621622 - DNA, 509 bp, Homo sapiens
cctttgggatatggttcatatgctctgcaaaactacctaaactctcagtaatattaaattggccccagaaactccaacactcagaggttgggagaagatggcaatagagatggatataacacagatgtataaattcaaaagaagaagtacctcaaataaatattaagtgcaacatctttcaaaacagtattttttttagataagagtaaagttttttttttttttttaractgggtcttgctctgtcacaggttggagtacagtggtgtgatcacagctcactgtagctttgacctccctgggctcaggagatactcctacctcagcctccctagtagctgggactgcaggcgcacgccttcatgcagggctattttttcttttttaattttttgaagagacgaggtctcatcgtattgctcaggctggtcttgaactcctgagctcaaatgatccacccacctcagcctcccaaagtgctggaattataggtgtgagccaccacgccc

SEQ ID NO: 621623 - DNA, 585 bp, Homo sapiens
aagttatagtgcaagtgagtgacagtgctagaattgaaacctaggatatcttgctgaacacaccatgctgctggagacataatgctcccagccactttgctttactgattcttgtttcctccttatttcctgataatggactcccagtgctgacctctgtggggacccgttctatactgactggtttgagtgttctcagcttgtgttgtgcccatgaccactttggtcagaaaggaatgtttgtttaccttcaaaaaaawggtgattagggctgggtagggtggctcacacctgtaatcccaacactgagaagtgaggcaggaggatagcttgagaccaggagtttgagaccccatgtccacacacacacacacacacacacacacacacacaaaattagctgagacatggtggtgtggtgcgtacctgtagtctcagcttctcaggaggctgaggcaggagggtgacttaagtcctggaggttgagacggcagggaggagtgattgcaacactgtactccaggtagccagggcaacagagtgaaaccctgtatctctctgaaaaaaaaaaaaattaatgtgatt

SEQ ID NO: 621624 - DNA, 569 bp, Homo sapiens
attgacgttacttgtaataatggaccaagttttatttaaaaaactaatagaaataaatatgaacttaaataaataaaaacttaagaaagaagtaaaaggtgttggatgtcaaaaagaycagacatataatacagtggagaaagtctgatagtatgcatgtaaaggatattagtgttgcagtgagtagatgctaggtggtatcaactcatgtcatggaatggatgatttttataattacttctatttatagtccaaattcaaaataagaggaagcagaaaaactgaaaaaaaaattgacctccctgtgtcattgctcttttaattttttcatttaaaagggagtttactttcagtaatggtttagtttagattcaaactgggccatgctttcttagtaacagctgaagtggcatggttgttttttctaatgtcagtccaaatgttgccataaaaggtcacatatattattatatcatatgaagagtcaatgttaactactaccttagatacattgtcatggctattaattcagtcctttgaattgtcaaggatgttgatagtgtgttcag

SEQ ID NO: 621625 - DNA, 502 bp, Homo sapiens
gcaccaccactcctggctcatttttgtatttttactagagacggggtttcaccatattggccaggctggtttcgaactcctgactttgtgatccacccacatctgcctccctaagtgctgggattacacgtgtgagctaccacactcagcctctaatgttacttcttatactaaaagtctaatagccacacttggacccacyaaccactcctgtggccccacccagaagtgacttagcttgcaagaggaccttttcccacacccctgtgattgtaccgtctaccagtcagcagcaagcaccccttgcctagccacccctcctctcatctcctaaactttgtttgaaaaaccctagcctccaagttcttggggaggctaatttgaataataataaaactccaatctcccatttagctggccctatttgtgtaaaactctttcacaattgtaattcccctgccttgataaatgagctctctttggggagtgggcaagaataacc

SEQ ID NO: 621626 - DNA, 624 bp, Homo sapiens
ctgtgtttttgcatacttatagaggcactgccttggtggtcttgaataagatctagaagaattctctggattacaggcagagactctttttctcttcccatactttctccaaaaawaatacagtctgtctgtctgtctctctctctctctctctctctctctctctctgtctctgctgacctgccttaaactggggatgtagtgatgcaagtatccttgttgccaccaccactaggactgtactgagtcatacctgaagctggcacagcattgggtcttgcccagtgcccactgtaaccattacctggctaccacccatgttcactcaaggccctagggctctgtaattagaaggtgttgaagccagccaggatgatgttcttgccttcagggcaatgagttccctgaggcactgggcaggtccagagatgctgtgtaggagccagatattagatttataaaccttagaaatttacctgatgttctattctgtgatggctaaggcggcactcaaactacaatacaaagtcctttctgctcttccctcccctttccataggcagaagagcctctttcttctttggtcaccaccatcaccagcccacaggggtttatgagaggaca

SEQ ID NO: 621627 - DNA, 624 bp, Homo sapiens
ctgtgtttttgcatacttatagaggcactgccttggtggtcttgaataagatctagaagaattctctggattacaggcagagactctttttctcttcccatactttctccaaaaaaaatacagtctgtctgtctgtctctctctctctctctctctctctctctctctgtctctgctgacctgccttaaactggggatgtagtgatgcaagtatccttgttgccaccaccactaggactgtactgagtcatacctgaagctggcacagcattgggtcttgcccagtgcccactgtaaccattacctggctaccacccatgttcactcaaggccctagggctctgtaattagaaggtgttgaagccagccaggatgatgttcttgccttcagggcaatgagttccctgaggcactgggcaggtccagagatgctgtgtaggagccagatattagatttataaaccttagaaatttacctgatgttctattctgtgatggctaaggcggcactcaaactacaatacaaagtcctttctgctcttccctcccctttccataggcagaagagcctctttcttctttggtcacyaccatcaccagcccacaggggtttatgagaggaca

SEQ ID NO: 621628 - DNA, 571 bp, Homo sapiens
ttaaattgcaaatcttttaaccaaagaataattataatttaatgtacttcatcaatgtacttcatcacatcattcttataaacatttatgtctaaaaatgtactaattagatgttatatgtcattatttatgactcttatgaactaatatgaaaaatatattcaattattcattagctttggatggcaactctactctgtttttaataaaacttatggggttcatctcaaatttcagtgacatgaactaataagattaaaggtggcattttgacggacagctagaaatcaaacttgagaacctcactgtgacaaatacagtagcctactctgatatttctaggtgtcataaggatgaaattagattttgttgtaacatcggcgataatagaggaaaacatattttctttgaamctagggggtttgagggttcttttcaaatttgttaatcgatttttatgtaataaatacttttttattctgtatgcaggaatttttttaattattattatactttaagttttagggtacatgtgcacaatgtgcaggttagttacatatgtatacatgtg

SEQ ID NO: 621629 - DNA, 571 bp, Homo sapiens
ttaaattgcaaatcttttaaccaaagaataattataatttaatgtacttcatcaatgtacttcatcacatcattcttataaacatttatgtctaaaaatgtactaattagatgttatatgtcattatttatgactcttatgaactaatatgaaaaatatattcaattattcattagctttggatggcaactctactctgtttttaataaaacttatggggttcatctcaaatttcagtgacatgaactaataagattaaaggtggcattttgacggacagctagaaatcaaacttgagaacctcactgtgacaaatacagtagcctactctgatatttctaggtgtcataaggatgaaattagattttgttgtaacatcggcgataatagaggaaaacatattttctttgaaactagggggtttgagggttcttttcaaatttgttaatcgatttttatgtaataaatacttttttattctgtatgcaggawtttttttaattattattatactttaagttttagggtacatgtgcacaatgtgcaggttagttacatatgtatacatgtg

SEQ ID NO: 621630 - DNA, 447 bp, Homo sapiens
tacatgtcatacttgatttgaggttctggagttaccgtgatgatgaatatggcagggttcttgccccraagaaagtcgtcgtcttttgtggggaaacaagcaattggatcactacatgctgttgtgacaactattaggttagcagtaagcactggtgttaaggatgtatacaagttaaatgcttaattcatgtgtggggtatatctgtgcactttgcaatctgattttacagctcttctcactaaagtggtagtgtatatggcctcacctcttgaatgtgtgtttggccttgtgatttgcattttgtaacagaatgagataagaatgcccattatggcagttttaagggctcaaccttaggaaccctagcaagtttctgcttgcttccatgtactttggccgtttgatgaacaaatgcatgtcctggttagcctgttggttccaaga

SEQ ID NO: 621631 - DNA, 562 bp, Homo sapiens
gtcccagctactcaggaggctgaggcaggagaatggcatgaacccgggaggcagagctggcagtgagctgagatcacgccacttcactccagcctgggtgactgagcaagactccgtctcaaaaaaaaaaaaaaaaaaaaaaaatagagtggaacctggatacaaaaaccattcttaactgggtatgttatggaaataagaatgaacacaataaaagatgaagaaggataagatttgaatgcagaacatgggctatgtaggtatcactcacctgacacaaagaataactttttccttcataaacagaaagtaacgtgatggcagaaactccccaaaacatgaaaatgttctcttaagagattcatttattctccacaactatctgtagaagctgatattatcctcactgaatagatgaggaacataagttmagtgagattagtaaaagttgcccaaggccatgaaactaatgagaagacagaatggggatgcctaaaactaaagcctgtgatctcaacaatgcaaactgcctctcaacctaccacttacattgcccagtaac

SEQ ID NO: 621632 - DNA, 573 bp, Homo sapiens
ccttcctaaagtaaagcattatgctaggttaaaaaaggtgaaaacaacagttggcaatataacgtccttgactttaaaatgtttattgtagtaggaggtttgggcaagagatgaagtaattcctaaacaaagcaaaaaccttacatttgttttaaagtgggccggcaaatatcatgaaggattaaaggagggaagagtccatatttatggcatatcatgaattaaaacataatttagatasagaaaaaagagaagatcaaagatcacggagtagatcaaatatactgaaatttggagaaacagggagatgttcaacttagagagaagagaagttgaagaagtgagaaagttgcttggcccttttaaagaagctgaatgaagtccgaaagtcatgtaccaagttgattagatattcaataataaagattttttaattggtcagttttagtttgtgttgtttaaggcaaagagaagaatcagaaagaccacctggtaaactattgcactattctcagcaaatcataataaaaatatgttagaacagccaaaagaaactcaagaatagaggtaaga

SEQ ID NO: 621633 - DNA, 561 bp, Homo sapiens
actagtgtaagccacaagttaatattttcaaaattacattttttgttawattttaatgctcaggatggtctattatctcgctatcctctttgtatttaaaaaataataaaggtaaacatataaatgattagatgttatatatgctcggagaagtatataataaaaagttaaagcctctgcaatccctacctatgagtcgcttaccacaaagggaaccactattaacagttgtttgtgtctaagcccaggaacagcttccatgcctacagctgcattcatatatccattttaaagcatataaataataattctataatcactcttatatatcatacttttcatttaatcatgcatctgaaatgtttaattcaagccaacatatacatatctgtatggttttagcagtgtctgtatcatgtagatgtatgtaatgcacttagtaagtgcctagattatagcaacttaccacaattatatttgatcttacaaagacagctataatcacaacagtgtacttatatcttggtgcattttataatatatttcaactttggtaagtga

SEQ ID NO: 621634 - DNA, 561 bp, Homo sapiens
actagtgtaagccacaagttaatattttcaaaattacattttttgttatattttaatgctcaggatggtctattatctcgctatcctctttgtatttaaaaaataataaaggtaaacatataaatgattagatgttatatatgctcrgagaagtatataataaaaagttaaagcctctgcaatccctacctatgagtcgcttaccacaaagggaaccactattaacagttgtttgtgtctaagcccaggaacagcttccatgcctacagctgcattcatatatccattttaaagcatataaataataattctataatcactcttatatatcatacttttcatttaatcatgcatctgaaatgtttaattcaagccaacatatacatatctgtatggttttagcagtgtctgtatcatgtagatgtatgtaatgcacttagtaagtgcctagattatagcaacttaccacaattatatttgatcttacaaagacagctataatcacaacagtgtacttatatcttggtgcattttataatatatttcaactttggtaagtga

SEQ ID NO: 621635 - DNA, 461 bp, Homo sapiens
aactgtgtatatacacaactgtgtgtgtatacacacacccacacacgtcccattggttctttttttctttttctctggagacccctgactaatttgctaccctcctcgtgtgtttacattctctgtgagaagtcttaaagtaaagaaagaatacagaaagtttagataccccacttagggtgtgggtaccctctttactggatggagacagtgcagaaaccaacttttacttctcgaaaaaaagttgacatgttccaatgcagtctacaggagcaaacaaaaccccaaatctccaggttctggagtccactgggtaggaatgagtgacaattctattttgtcattaccatttgtattagtccgttttcacactgctataaagaatactacctgagactgggtcattataaaggaargaggtttaattgactcacagttccacaggattaccaggaagcatg

SEQ ID NO: 621636 - DNA, 608 bp, Homo sapiens
actttcatgtcctttgcagggacacggatgaagctggaaaccattattctcagcaaattaacacaggaacagaaaaccaaacactgcatgttctcactcaatagtaggagctgaayaatgagaacacatggacacagggaggggaacatcacacaacagggcctgtcagtgggtggggggttaggggagggatagcattaggagaaatacctaatgtattaggagaaatacctaatgtagatggtgggttgatgggtgcactaaaccaccatggcatgtgtatgcctatgtaacaaacctgcccattctgcaaatgtatcataaattaaagtataacaaaataaaatttaaaaaaggaacaagatcatgtaattagcaggaacatggatggagctggaagccattatcctcagcaaactaatgcaggaacacaaaaacaataccacaagttctcacttataagtgggagctgaatgataagaacatatgggggcaacaacacccactggggcttgctgggtcagtggggagggagagcatcaggaagaatatataatggacactgggcttaatacctaggtgatggattgatatgtgcagccaaccac

SEQ ID NO: 621637 - DNA, 562 bp, Homo sapiens
cgtaaaattaacaatttaaatagattatttggcaaagcaatttttctgagaagttaacctaaaagtgaaagtaatttaactatgtgcatgtatctgtttctagatagctacattaccacatatacatagctacacacacatattttcttttaaatagattcttgggaatgacgaagayctttgatggaaataatttgatgtaaccaccaccacacaagaaataatagatttatgtaaatattatttttgtaaagctttctaactcagtgaaccttatgcagtcttattaaactgcagaaggagatcaatcagaaaatatagataaaactaattgaaactgtataggcactaaaatatgagatggtggttctatgaagaagctatgactgttttattttgaggcctttctttctttctgtgacaattgtcctgtttttcttgtgaaacaatgcaagtactatatagttaaagtcaagagaaaggatcaagaaaagctacactcatgtaggtcagattcaagataacatctgtaactaactttgaagccttataaaactaattc

SEQ ID NO: 621638 - DNA, 605 bp, Homo sapiens
tcacatactatggttataccactgtgaataactataatagcatagcacatccatgctgaactttaccctggacaacgagtctttgtaatcaaaattttttctagttctcatccagaaagatactgacagactcagaagaagaraaagaccaggtagtgaattgggatgaatgcctgagtatgtgggcctatccatacatctaaaattctttacgctaagaacagacgtttaaaattaataaatacttagtgcggaagaacagaatactatctgtgtgacggaatgttggaaattcctaaaagatcagaagatatgtatcagatgtatagaagtgactatatccaaaatcatacatagaagagtagttctgcagaggtgggaactttccgtgatatagtaacctcggaagtaatgaacaaatggtataataaaagtcctgggaaatgttcagggtgataatttgagaaatagcacttggagcagcctagaaatttggcctctgaaggagttggtagcataagtatttgcttataagtatgagtaactgtaccttggaagcagagcagtgccgcaaaagatagtttatttcttacagaggttttgtg

SEQ ID NO: 621639 - DNA, 605 bp, Homo sapiens
tcacatactatggttataccactgtgaataactataatagcatagcacatccatgctgaactttaccctggacaacgagtctttgtaatcaaaattttttctagttctcatccagaaagatactgacagactcagaagaagaaaaagaccaggtagtgaattgggatgaatgcctgagtatgtgggcctatccatacatctaaaattctttacgctaagaacagacgtttaaaattaataaatacttagtgcggaagaacagaatactatctgtgtgacggaatgttggaaattcctaaaagatcagaagatatgtatcagatgtatagaagtgactatatccaaaatcatacatagaagagtagttytgcagaggtgggaactttccgtgatatagtaacctcggaagtaatgaacaaatggtataataaaagtcctgggaaatgttcagggtgataatttgagaaatagcacttggagcagcctagaaatttggcctctgaaggagttggtagcataagtatttgcttataagtatgagtaactgtaccttggaagcagagcagtgccgcaaaagatagtttatttcttacagaggttttgtg

SEQ ID NO: 621640 - DNA, 461 bp, Homo sapiens
agaccaagaaaaagcaaaaatgattttagcccccacagaatttagtgattgatctttccaattttgtatatcatcaagatagttaaatctcaagataccaaaaatgacaataatattcatactaaaagagttctacccaaatggtcataaaggggattgttccagaaatgtggttcattattttctaaagcttttaatttatgatgacatcctgacatcagaccttgaattaggtactaaaaagccaatccttactggagtcacgcactggaatgtgagttgagagcatgatcttaccctctctgagcctcagttttctcatcttcaaaatgctgtggtttgmcttagttaggtataaggtttcttgttcttctaatctttttcagggctatatccccttactccttcccatctgttcaaaattgtaatccccataaaacatagagaaatatattctctat

SEQ ID NO: 621641 - DNA, 594 bp, Homo sapiens
ttgttcactcataatgctcactccaatttaatttttattatattattttatctttcttgggtttcttagtgggttttcattacccatagggctgcagcatgtccaagcacgaacctcacaatttcattaagttaattcagtggccaagaaatgtagttcttcataaaaaatgagacatctccgagaaacacaatttggtagagatattaaaatagttttttttaaattcagcaagtcatcatcattatatcctagaatatagcaaggcacgcagaagatggcatacaagcctccctaactgcatgcaattgctgaatttggaattagagaatcttytgcctcatcttggaactgtctcttcatgcagctgtccattcagttagtctatttacaaataatttttgaatatttttatatctgtaggtgctgtatgcaaatatgaaaagccaaagtcctcttatttgctgtctgaacctagccacgtcacttaaacaccctgagctccagttcttgcatttactaaatggggatactactacttcatagccttactgtgaggattaaataaaattatctatgtaaaagtgcctcata

SEQ ID NO: 621642 - DNA, 458 bp, Homo sapiens
ttatagataattctattctcatatattgattctatttcttttctataaatgagtaatatacttaaaaacagattaattcagtgatgtctggttttattattctgaattttatattttagcatgtttaccataagatatgactgggagaatttagttttactccctgggtttaatatctggtttcagtaatattatagtagaaaaaawtctgttgtgtactactattaagtgttgttgagcactaggagatctctattttactgtgtctttgatattaacatccgtatttcttgatggtactgagcttagtagttaacatttctccaaccttaataattgtgtatggcatattgacagggaaccaaaaagcttgcatgaatttgaactgtcatctttttttcttactaatttccaagttgggacataattttttatttcattatcactctgtgtgtttc

SEQ ID NO: 621643 - DNA, 623 bp, Homo sapiens
atctatttgataagtggagtccctaaagaagaaaaactaaacaactgggatgtttgatataaaaaccacaacttaagaaaactttactgaataaactggaacctcatattaaatgctgccatcaattatgtgggaaaaatcaatccattaccatcaaatattagacatatcttagtaaactattataattttaaaaaaccctttgagccacagtcaaatatgaagtaattaacaagcaaaaaaaaaaaatgtttacatctaacttttcaacagcaacataccagtgcaggaaacagcagaagaatattatgaaatgcaaagaaagaaagagggaaagaattaatatacagctgaactgtgtatcaagtgtataaaagcacagttttaatatgaaaatttcaagaaackttttactcaggagcttttcctgtaagatatactagagagaaagcttcattcaaccaagacagagaaacggcagcaaaactgctggtggtgaatgcaatgattatttaataataaatataattttaacataaaggtgagaataaatgtataagaatactatgtaaatgataatatggacattttttaatggaagaagaaaaaaaagaaaatgaaaa

SEQ ID NO: 621644 - DNA, 541 bp, Homo sapiens
aaaccacaatatttatgaataccaaaatatatataaaataaaaatgtaaaaagmaaaagaaaagaggtcacatagtgaaacgtagtgaatataatatatttagtaattttaacttaaaataacatgagctgatgccaggtaaggttgtgtgcacctgtagtcccagctactcagaaggcttaggcgagaggattgcttgagcccaagagttcaagaccagcttaggcaacatagtgagaccctgtgccaaaacaataataataatatgtactgagcccaaatatatcagtcacattaacaaatataaataggcttagatgacctattaaaatattttcaaattggcttatcagtaaaatccccaaaacctctatgttgcatataagcaacaaaactaaggaaaaaggtacaaaaagcaaaattaaaaagaagagcaaaggaatatggggaaaaattcaagaaaattatgcagaagttgcaatgttgctacctgacaatgttaacaatcaggcaagatgctttacgcaagacaaaagaacaa

SEQ ID NO: 621645 - DNA, 541 bp, Homo sapiens
aaaccacaatatttatgaataccaaaatatatataaaataaaaatgtaaaaagaaaaagaaaagaggtcacatagtgaaacgtagtgaatataatatatttagtaattttaacttaaaataacatgagctgatgccaggtaaggttgtgtgcacctgtagtcccagctactcagaaggcttaggcgagagrattgcttgagcccaagagttcaagaccagcttaggcaacatagtgagaccctgtgccaaaacaataataataatatgtactgagcccaaatatatcagtcacattaacaaatataaataggcttagatgacctattaaaatattttcaaattggcttatcagtaaaatccccaaaacctctatgttgcatataagcaacaaaactaaggaaaaaggtacaaaaagcaaaattaaaaagaagagcaaaggaatatggggaaaaattcaagaaaattatgcagaagttgcaatgttgctacctgacaatgttaacaatcaggcaagatgctttacgcaagacaaaagaacaa

SEQ ID NO: 621646 - DNA, 565 bp, Homo sapiens
caaacagtttaatcaatgaagtgtaatatacaagtacatatcaaattttgcaatctagaacatattctaaaaataaaaagcatacaaagaarttgtaagcttctcttgatgtccacaagctaagcaaaaacaactccagtgaaacaagcctagatttgttttttggtatagcacaggagtctgcatcccagaataaactataggatgtctcaagaagatgtaaggaatggcttgtcataaggtttagctctatgctagataatctgaggaagagttcaaagaacaagagtttcctcaggattgaacactatcataaagcaggggcaattcagtgattggatagtttaatttttatttaggagtcaggagaaactaaatggagcttaattataattggtaaaaataagcagtcactcatgtgagataagagagggagacagtggatcatttttataatttgcactgttctgttttgttcgtttgtgttttgttttttagtgttccaacatgagtgtgtcttcatcctattttatcctgtttcattatggtcgcagaattactataa

SEQ ID NO: 621647 - DNA, 565 bp, Homo sapiens
caaacagtttaatcaatgaagtgtaatatacaagtacatatcaaattttgcaatctagaacatattctaaaaataaaaagcatacaaagaagttgtaagcttctcttgatgtccacaagctaagcaaaaacaactccagtgaaacaagcctagatttgttttttggtatagcacaggagtctgcatcccagaataaactataggatgtctcaagaagatgtaaggaatggcttgtcataaggtttagctctatgctagataatctgaggaagagttcaaagaacaagagtttcctcaggattgaacactatcataaagcaggggcaattcagtgattggatagtttaatttttatttaggagtcaggagaaactaaatggagcttaattataattggtaaaaataagcagtcactcatgtgagataagagagggagacagtggwtcatttttataatttgcactgttctgttttgttcgtttgtgttttgttttttagtgttccaacatgagtgtgtcttcatcctattttatcctgtttcattatggtcgcagaattactataa

SEQ ID NO: 621648 - DNA, 573 bp, Homo sapiens
ggatctctccattacacctgtgagcagtgatgggacagagcttctttgctacctgctgctttgtggctaagcccgccttggcctcaggcagcctagctgctgatctcagctctacctcctaccacctgctgtgtgtccttaggaaagcatcttagcttctctgaacctcaattttttcatcagtaaaaagggtgcaaagaatatctgrcatattggatcatcaagaagactaaacgagctactgtaaatacagccccaagtgcagtgcttgacagaattactgcacaaaatgctggcaattatcatgacattgttatccaagtacatcataaaactaattgaaggaagtgactaggggatgctctgcagcctctgcgacacaactgttgctccatgaagatacagattttcagtaatttattctaatgtttattattttattatttatcttgttttattttattttgagacagagtctcactctgtcgcccaggctggagtgcagtggcgtcatcttggctcactgcaacctctgtcttccaggttcaagtgattctcctgcctcagcctccc

SEQ ID NO: 621649 - DNA, 588 bp, Homo sapiens
tctctactaaaaatacaaaaattagtcaggcgtggtggtacgcacctgttgtttcagttgcttgggaggctgaggcaggagaatcactggaacctgggaggtggaggttgcagtgaatcaagattatgccactgcactctagcctgggtaacagaatgagactctgtctctaaaaaaaaaaaamaaaaaagacaaaagataaatattggagaagatgtggagaaaggaaacccctacacactgttggtgggactgcaaattagtatagccattatggaaaacagtacagaggttcctaaaaaaattaaaaatagaattatcatttgatctagaaatcccactactgagtatatagtcaaaggaaatgaaatcagtatgttgaagagatatcttcagttccatgcttattgcagaactatttacaatagccaagatttggaagcaacctaagcttccaacaatggataaatgggtaaagaaaatgtggtataaatacttaacgaaatatgattcagccttaacaagaagaaaatcctgtcatttgtgacaacatggatgagcctggaggatattacattaagtgaaata

SEQ ID NO: 621650 - DNA, 657 bp, Homo sapiens
gaaggttacagtaagctgagattgcaccactacactccagcctgggtgacagagtgagaccccatctgaataaaaaataaaaaaaaaaaataagagtttggcctagtgttctttttaattaatagctttgattttttttttwaaatctacctgttttaaagaagggctaaggtgtttcagtgatttgaagtggcaaagctggagccacagcttctaagtgtacaacacacatttctgagacatagcccttcaagtaaagtagcgccacagcatcacagctctggatcccatcgctgggtgcctcttggaggaaaagggtaaattgcacaagcaatttctggggaaaaaatggcccccaccaacaaattttttttttttttttaaagcaaacttgcctgtggaggaatttaatactgggccctttgaccttagtctactgatacaaatggatctgcaatggtaatggggattttatggctatgaggcatggaaaagaaaccaacctccagtgtgaattgaaggaagaagttccatatttatatgctctttgaagaaatgaaaagtctgtcaactagctgatcttgcccacctatgattattaatacctttcaagatttctgagcttgccagtatattgttcccaacatttcatattat

SEQ ID NO: 621651 - DNA, 582 bp, Homo sapiens
gggcaacataatgaaatcctgtctctacaaaaaaggtacaaaaattaaccaggtgtggtagcacacacctgtgatcccagctactcaagaagctgaggtaggaggattgcttgagcccaaaaggggaaggttacagtaagctgagattgcaccactacactccagcctgggtgacagagtgagaccccatctgaataaaaaataaaaaaaaaaaataagagtttggcctagtgttctttttaattaatagctttgatttttttttttaaatctacctgttttaaagaagggctaaggtgtttcagtgatttgaagtggcaaagctggagccacagcttctaagtgtacaacacacatttctgagacatagcccttcaagtaaagtagcgccacagcatcacagctctggatcccatcgcygggtgcctcttggaggaaaagggtaaattgcacaagcaatttctggggaaaaaatggcccccaccaacaaattttttttttttttttaaagcaaacttgcctgtggaggaatttaatactgggccctttgaccttagtctactgatacaaatggatctgcaa

SEQ ID NO: 621652 - DNA, 624 bp, Homo sapiens
tttacttttttaaaaaagtgcctactcatttgtggtatcattcctttgctgcataaaaagtggttagatctatcattttatttaaaaattccaatattatgatcactggtgtgtttattgccacttactattcgtatatatttcttgcatgaaagcagggatattgcattctttgcacctgttggggaatgacaatgctgtgggtgacagtgaagggtggggtaggagcaaaaagaaaaataaatcatttgcatcaaaaggctaaagaartttttccagaagctcttggtaataaggaaaatgctctgaataagagaacagtagccagagacagaggaagaaacttgcaaatttaaatcaggggtctaaaatattttcaggcaaatacttatcatagcacctgttattacatgattttaactatgccatcttcttttatataaagaagtaaaatgtaatgaaaattctaagaaagagattgcttaggaaaaatcacttgcttttttagactttgcttcttttattacattcattatttgtgcaacaaaaatagagatttgccatttcccccatagatatagttataattctgtgctgcattctttcaaggtcagtttcctcttc

SEQ ID NO: 621653 - DNA, 623 bp, Homo sapiens
accaaacataaactatgtatattaagcaacaacataaagtgcggtcacttattttaactcctgtaaactctgtgatcaattatgcgcctccatagatcttcattgtgtccctttatctttcttgtctctaccagatcagggccaccctatggtccctcctcttcatgattcatctcccaccattatatccagcctaagacagcctccaaaagcctatagaggatagyggtgttgtcttctccagggcctttctttattattattattgttattattattctttaagtatactttaagttctggggtacatgtgcagaacatgcaggtttgttacataggtacacacgtgccacggtggtttcctgcactcatcaacccttcaactacattaggtatttctcctaatgctatccccccaccacccccacaacccccggcaggctctggtgtgtgatgctcccctccctgtgtccatgtgttctcattgttcaactcccacttatgagtaagaacatgcagtgtttcattttctgttcctgtgttagtttgctgagaatgatggcttccagcttcatccgtgtccctgcaaaggacatgaactcatccttgtttatggctgcata

SEQ ID NO: 621654 - DNA, 608 bp, Homo sapiens
aaaacaaaacaaaaagcctcaaaaggatcagtttccaaagttggaggacaggcagtatctgattttgagatcttttaaaactctacagtaatcaagacattttagtattggcataaaactagataaataagtcaataaacagaaaagacagtccagaaatagacccacacgtatatatgcaattgatttttgacaaaaatgtcaaggcaattcaatggaaaaagataatcttttcaagaaatgatgcaggaaaatttgagttacaaaaaamaaaaaacattgaccctggcctcctaccatatacaaaatattaacttggaacagtcatagacaggatgtaagagctgtaactataaaacttctagaaggaaacgtaggagcaaatcttattgacctcagatttcgcaaagatttcctaaatatatcaaaatacttactataaaagaaaaaacttgataaataggactgtatcaaaatgaaacacttttgccactcaaaagacactgttaagatattgttatgaaaaggaataaagccaaagataaaaatatttgcaaaacatcacatatatccaacataagatatgcagctagaatataaaagaacac

SEQ ID NO: 621655 - DNA, 618 bp, Homo sapiens
ttatatcaagaaacacattgctgtcaaaactatttttagagcatattcaaagattatctttgcctcaacaatgatgtccctctgactctcctaacatatgtattctttattatgaagcaaagatatagtccgtgtggttgcataaatatacaagtcccacaagacagcttgcattaaaataaaatacagctacaaaataaggtaggaattacaccttaataaaataaaataaaacaaaatacaggcatatacaaaataagataggaattacaccttaattaaaaacatactcaaactaaaaataatacagaaaagagcaactttaagacaatgaagagaatataattaatgcatcatttagcaaaaatgtttcaggcactttacttgacaattgggacaaatcagcaggaaagaaaggggacagattcctgctttggaggagttatattttaacaggctgagctgacccaaaaaacaataattatattaataagmaaaatataaaatatactagaagtttataagttctgtaggaaaaaaatggagcaggaaaaggggaaccacgaagacaaggaaggatatggagactgacattttgaataggatgggtaaggtaag

SEQ ID NO: 621656 - DNA, 629 bp, Homo sapiens
gtttaaataaatgcaccatgcaaaagaaacataagtaaaattaataatttgagaaaatattacattcttttaatgttgattgagctcagcagccacatccatgttttctgaggatgttagattgaatgaaatattggtttgataacaattactgtcttctaaaacaaaatattttcttttgattatggaagaaattgaatgttataaacatttcagaatataaagaaaaacacaaagaatagcaaaatagtaaaaaaawaataataataatgccctttttcagggttaaacactgttaactgctaacattttggtatttgccctaagactacatttagaaaaatgcatattttaaaataaatgtaaacatacacatttacattaacatttaccaatctccctcagaaaggatttggaagaaaagaaagatttatctgtttgcagcatataataacaagtgttagttaaggcaaaaataaacattctaaaataaaagaatgttattgtcaaaaacacattttaggggagagcatatctctaaaatcaaaagttgataattcagtgaaaataagattcactctggtaattttttttttctacaaattttgggcacacctacatcaagtgaa

SEQ ID NO: 621657 - DNA, 629 bp, Homo sapiens
gtttaaataaatgcaccatgcaaaagaaacataagtaaaattaataatttgagaaaatattacattcttttaatgttgattgagctcagcagccacatccatgttttctgaggatgttagattgaatgaaatattggtttgataacaattactgtcttctaaaacaaaatattttcttttgattatggaagaaattgaatgttataaacatttcagaatataaagaaaaacacaaagaatagcaaaatagtaaaaaaaaaataataataatgccctttttcagggttaaacactgttaactgctaacattttggtatttgccctaagactacatttagaaaaatgcatattttaaaataaatgtaaacatacacatttacattaacatttaccaatctccctcagaaaggatttggaagaaaagaaagatttatctgtttgcagcatataataacaagtgttagttaaggcaaaaataaacattctaaaataaaagaatgttattgtcaaaaacacattttaggggagagcatatctctaaaatcaaaagytgataattcagtgaaaataagattcactctggtaattttttttttctacaaattttgggcacacctacatcaagtgaa

SEQ ID NO: 621658 - DNA, 615 bp, Homo sapiens
tttctaatgaaagaaaatattttgaatgatgaaaatagcaagtagagaagtgtatctacagatttcgtatctatactgtggttttcttattttgcaatgtacggtcaaagacaaattagaaaaccgactagatatggtccacagattcctttttctgcaacaacctaaaatctgattatgaagtctttcactgataattacatttgtgtttaaggcaatgtttccctgttgtttgatgatatggtttggctgtgtccccacccaaatctcattttgaattgtagttcccataatccccttgaggtctgggagggacccagtgggaggtaattgaatcgtggaggcagttaccygtatgctgctgttctcataatagtgagtaagttctcagaagatctgatggttttataaggagattttccctcttttgcttggcacttcttgctgccaccatgtgaggaagaacatgtttgtttcccctttccccatgattgtaaattttctgaggccttcccagccatgctgaactgtgagtcaattaaacctccttcctttataaatttcccagttttgggtacgtctttattagcagtgtgagaatggactaatacattt

SEQ ID NO: 621659 - DNA, 601 bp, Homo sapiens
aatattttgaatgatgaaaatagcaagtagagaagtgtatctacagatttcgtatctatactgtggttttcttattttgcaatgtacggtcaaagacaaattagaaaaccgactagatatggtccacagattcctttttctgcaacaacctaaaatctgattatgaagtctttcactgataattacatttgtgtttaaggcaatgtttccctgttgtttgatgatatggtttggctgtgtccccacccaaatctcattttgaattgtagttcccataatccccttgaggtctgggagggacccagtgggaggtaattgaatcgtggaggcagttacccgtatgctgctrttctcataatagtgagtaagttctcagaagatctgatggttttataaggagattttccctcttttgcttggcacttcttgctgccaccatgtgaggaagaacatgtttgtttcccctttccccatgattgtaaattttctgaggccttcccagccatgctgaactgtgagtcaattaaacctccttcctttataaatttcccagttttgggtacgtctttattagcagtgtgagaatggactaatacatttg

SEQ ID NO: 621660 - DNA, 450 bp, Homo sapiens
gttttgggtacgtctttattagcagtgtgagaatggactaatacatttggtcctcatggcatattttttaatctagaattttccatggacttcaaagaatgctaaccaagctagcaatgttgcatacagtacattcatcacaatggctgaacagtactgtactctgtactgtctcatccagggcaccattcactaggttgaacttcagctcaaagaccttgtttgaattgttactaacttgygtggcccttaggaggcaatcatcgaagctttatctttcttcctatgggggctcaatttatataaccctctcatcttttattctcaattgattgtacctttcttctcagcaattcttatgacctgtttggcccaataccataatattcttattttttctgcagctgtagaaaaagtacattctaaacattgatcaatttggcagcatat

SEQ ID NO: 621661 - DNA, 450 bp, Homo sapiens
gttttgggtacgtctttattagcagtgtgagaatggactaatacatttggtcctcatggcatattttttaatctagaattttccatggacttcaaagaatgctaaccaagctagcaatgttgcatacagtacattcatcacaatggctgaacagtactgtactctgtactgtctcatccagggcaccattcactaggttgaacttcagctcaaagaccttgtttgaattgttactaacttgcgtggcccttaggaggcaatcatcgaagctttatctttcttcctatgggggctcaatttatataaccctctcatcttttattctcaattgattgtacctttcttctcagcaattcttatgacctgtttggcccaataccataatattctkattttttctgcagctgtagaaaaagtacattctaaacattgatcaatttggcagcatat

SEQ ID NO: 621662 - DNA, 599 bp, Homo sapiens
tatgtaggcctgaataaatgatttgaggataataaaacacagtttcaaattttcatgagagtcataggaaaacaacaagaacaaaagatatctataatgtttaatggtcctccttatatgatgatatccaaaatcaatattatcttttcattattaatgcagaatatatatcattgaactaatgaaataatgcaattattgaggaatgttttattcctccaagtctctgaccttatgttttcattggcagtgagtaacatagcagtttcaagtatctccacgattatgagaaactatactacaattgttgattaatgtactttaattcatctcaataaatagttttcaagtatctctcacatacaatctaggtatgttagattacatagaataaaatgctggataaaaacaagctttcccctctaggatctagcactattctgtaggctgtaggcctaggtagtagtacaaagttagaatgtawcctgtctgtatttataactaaatttcacatgcttaatctaaaattaaacttcttcttatacatcaatcatgattatgtaagataatataaattttgactgtatcaatgatgatat

SEQ ID NO: 621663 - DNA, 417 bp, Homo sapiens
aagacattaattctctcaatttctatacaacatgaaaaatgctgttagaagtagtgtataataggaacattcagaagaaacagtgaacctaaatttgagggatcaaggaggacagtgatatcaaaccaagaaagagsgtgatagtcatcttggaactttgagtggaagttatccttgagaggtgaatgggatggggagagggcatttgtccaggcaaaagcagtgggtcaagtaatggtatgctggaagacctttaaaaattcagtatacagtgtgatgtgaggtataaaataaaagtagtgagagaagagatggagttatatataagttaaggttagggactcaaatgacagactgcttgaatttgaagcctcactgtgccatttgctcatccctgtactggggtgtgctgtgtaa

SEQ ID NO: 621664 - DNA, 546 bp, Homo sapiens
attccctgaagaatattccttcacctttttgattttgccttgatgcaacatttgaaaacaacagccttaactttcagaaacactatgataataaagagacaataaatgtaaataataaatgccagtagctggtatataacagatgatcaataaattatagatgttattagaagtatagttttgtgaatttttgaaaacacttcaaagaatatctccctataaacaatttctgtctctgaaaacatgaaataagtgtatttcctatttatttcctcttattcttatgtgtcataaacaatatatagcatcacattagaagcaccatatttaatggattccactgcacacacatacacatrtatgtacattaatgtaaaactgaaagcaggtactgggatcagatgctcagtatggcaaacaaaaatacaatgctacaaagacactgttaccccaagctaacttgccacttaattttaaggggctttagatagagaaatgtataaatgtatggaacattccttgcttctaactcatggtcggacttgc

SEQ ID NO: 621665 - DNA, 250 bp, Homo sapiens
ggcaacatgttttttttcacaagaaaattccaaagatatgatactttattctaataaggtttttaaagtgtaagtgtctctgctcagagtaaaaatatattttacattgtgaggtaataagtacmtgtgtttttccaaaattagggtttcatgaaagagtacttacccttcaaagtgcaacaaagaggctgggcatggtggctcacacctgtaatcccagcagcttgagaggccgaggcgggtggatcac

SEQ ID NO: 621666 - DNA, 571 bp, Homo sapiens
taccagtcacccacatacctcaagcttaatgactccagaaaatagcagtctgtctcacccaaaagggcttaaaatcactgaatacttaatgtgaactggtcaatttctttggaggcatgagatgcaggaaaaaaataaatctctatttgctatggtttctgtttgcatggagaactttaagactttttggatgtaatgggaaaaaagttagaccatttctcaaaacacactccagaaccactgctttgaagactggctaaaaagatcacgacaggcaacaaagtcatttgcttttggaaagtaaaagcatcagaaagtccaatgggatacatagcaatgagcgaaagatygctcttgtttatgagaaagtattgggtaagctatgaagcccaaaatagggaccaacaatccagggtgattgtaaactacaaacatgctcttaaccacataggaaacatacatagcctatgtaggaagtaccgtagaaatcagagacacattcaggcccacaaaatgcgatcacctttgcagcattttcaaatgtaaataataatagctctatattaactga

SEQ ID NO: 621667 - DNA, 613 bp, Homo sapiens
cttatatgcttgttggtggcatgtatgtcttcttttgaaaaatgtctattcatatactttgcccacttttaaatggagttgtcttgtttttgcttgttaatttaagttccttataaattttggatattacacctttgtcagttgcatactttgcaaatatcttctctcattatgtaggatgtctgtttactctgttgatggtttctttttctgtgcagaagctctttagtttaattaggtcgmatttgtcaatttttgtcttgttgcagttgtttttgatgtcttcatcataaaatctttgccaggtcctatgtacagaatcgtattgcctaggttttcttcaaggatttttatagttttaggttttacatttaagtgtttaatgcttctttagttgttttttgtatatggtgtaaggaagggttccagtttcaatcttctgcatatggccaggctgttatccaggtaccatttattgaatagaaagtcctttacctgttgcttgtttttgtcaactttgttgaagatcagatggttgtaggtgtgcagctttatttctgagctctctattctgtttcattggtctatgtgcctgtttttgtatgagtaccat

SEQ ID NO: 621668 - DNA, 522 bp, Homo sapiens
attttttggaatagtttcattagggcttgtacctgttcttctttatgtgtctggtaaaatttggttgtgaatctatctgttccaggccttttttgactggtagatattttattactgattccattgcaggacttgtttttcacctgttcaagtttttgctttcttcatggttcaatcatgggagattgtgtgtttcctagaatttatccatttcccctagattttctaatatgtgtacatagagttattcacaatagtctctgtggatttttttgtatttctgtgggattggttacaatgtcatctttgtcatttctgattatacgtatttggatccttatttttctttattaatctaactagcagtctctgaatcatatttattccctcaaaaaagccacttttarttgattttttgtatgaatttttgcatcttactttaatttcatttgtctgtaattttagttattttcttctgctagcttggaggttggtttgttctttttttttaccctcacttcc

SEQ ID NO: 621669 - DNA, 448 bp, Homo sapiens
aatttatagttagatcagaggaataatttctggtgttctatcacacagtaggatgactatggataacaatattgttttgtatatttcagaatagctagaagggaggattttgagtgttctcaacataaagaattgataaatatgaggtgacagatatgctaaataccctggtttaaatattacacaatgtatacttatatcaaaatatacattgtaccccatgaactgtaccccataaatatgtgcagttatatgtcaattaaaaacatttttaaataaaaatcatcgtaaagatactraaatatgttttaaggctatcttccttctcacttctgttcgactgcatatactaacttcatccattatgattggtctcacctttgcttacctttgagcaaaactgacccactcagggggtgctttaagcaactcctgtccattttacaga

SEQ ID NO: 621670 - DNA, 421 bp, Homo sapiens
tttggttgctgagtgtagaatatatcttgagctaggttatgaaggaatgggtgatagggtaggagggagtgaaaccagggaaccagttaaaacactgatatttctgacttcaagtcttcacatatagaacaataaaacagcatccatactctatgttcactgacttttcttcttggcctttgatctgggttcatagtttgtgctccccttatrtcatgaagtcccttacatttgctgcatttgctcagagctcatcctctcaacccttgtgcagaagaatttgcagaattttcctctgataaaggcacagagcagttacctggaattaccagactcctttgtccagagggatgacagtattcaaagaagctatgcactgttttccagaacttgctaaatattatctataagtcagtaattt

SEQ ID NO: 621671 - DNA, 583 bp, Homo sapiens
gtgctttcaagggataggtttaacaacagaaacgagatagtggtttagactgaaaagaatcgtaagcaggaagaatattaccatgttttctaacagacactttctctgcatcaaagcttgagtctaccaaattattgaaaggagcatttgcaacaccaagcctcaataaagaatagagaaaaaaaaaaaaaaaaaactcagggcaatgttaccagtggagggcgtccaagttcctggcggcttgaacaaagaattggaaaaaacacacaaagaaagaaagaatgmagcagcaaaagcagagatttattgaaaatgaaagtacactccacaaggtgggagcgggcctgagagtatgggctcaagagcctcattacagagttttctggggtttaaatatcctctagaaatttccattggttacttggtatgcgccctatgtaaatgaagaggctgaagtaaagttacaaagtcatttactcggtttgcgccctctgtaaatggagaggatatttgctatcatagctgaagtgtttccatttgatttacttctaggaagtcaacgtgaattggccttatgtttcct

SEQ ID NO: 621672 - DNA, 506 bp, Homo sapiens
aattctacatatgtcctagaggagggagaagcagaaatattttatgaacaccttattgattaccacagcacttcactactggcctgcctgaaggctttctgtggactgcttcattgagttccaaatacctgattcctttctagcaacttagcctaaggaatcagtccttcctggaagactatcctataaaggttgctgatccaaggaaggagaaggtagcacatcacgttggcttttttacctgaaattctgattagttaggacatataggctggtattggtatcagtctccttcctgacacttgcacaatagcaactccatgaactgacctgccagcatatatcctaacgctggtagagacagcactttgttgtcctatgtctctgagatttcccacagggaaactgagtgttcctggtactttcctggcatcctggaacttccgcttctctgygaaatacttccacaccaggaaataaaacaccattaataatcactcatttgg

SEQ ID NO: 621673 - DNA, 570 bp, Homo sapiens
taaaatgattaggaactcagctaagcctttttctttctgccttcatttgttttaaaagccttttgaggtgtaatttacattctataaactacacatatttaaaatgtacaattttatgtgatttgacttatataaacaccagtgaaatcatcaatacaatcacagaatgaacacatccatcattctcaaaagtttcctggtgccccttttttttgttcctttctctggtcctcatcttcacctgtccccaggtaatgcatgatgtgctttctgtcactatagattaatgttcattttctagaattttatataaagagaatcacagtgtatgtactttcttgtatggcttctttcactcagcataactatttygaggtttatccatgttgttacacataccagggatcaacttctttttactgctgaatagtattccattgaataaatatatcacaatgtgtttatccatttacttgttaatagacatgcatgttgtttccagttttttaatactacatatgattctgctgtggacatttgtatactgatctttgtatggacatatgcttt

SEQ ID NO: 621674 - DNA, 559 bp, Homo sapiens
accagtgaaatcatcaatacaatcacagaatgaacacatccatcattctcaaaagtttcctggtgccccttttttttgttcctttctctggtcctcatcttcacctgtccccaggtaatgcatgatgtgctttctgtcactatagattaatgttcattttctagaattttatataaagagaatcacagtgtatgtactttcttgtatggcttctttcactcagcataactatttcgaggtttatccatgttgttacacataccagggatcaacttctttttactgctgaatagtattccattgaataaatatatcacaatgtgtttatccatttacttgttaatagacatgcatgttgtttccagttttttaatactacatatgattctgctrtggacatttgtatactgatctttgtatggacatatgctttcattttcctgaataaatacctacaagtaaaatgactaggtcatttggtggaagtatattttttaaaactgccaagctgttttccaaagtgccgtattataccatattctcaaaagcactgtgtgaa

SEQ ID NO: 621675 - DNA, 512 bp, Homo sapiens
ctttattgaggtataattgacaaacaataaactgctcatacttaaagtattcagtaagctttaacctatgtatacattgttaccaaaatcacgayaataaacacacccttaactttcccaaaatgatcctggagccctttgttatacctctgcttcaggccttctctcccaacctcagacaacaaatgatctgctgtcactgtatatttgtttgcattttctatataaatgaaattatatagtatgcactattctttgtctgaattctttcacttgacatacttattttgagattcattcatgttgtaacgtgtgtcaacatttattaaaatttatttataagagaataaaatattgcatggtataacacagttgttggcacctgttgatggacatttgggtggtttccacatttttactattaaaataaagctgctatgaacattcatgcataagattttgtgtggacatatgcttttatttttcctgggaaaataccttggcatgaaata

SEQ ID NO: 621676 - DNA, 486 bp, Homo sapiens
ttttacattttaagaaattgccaaatatttttccaaagtagttgtgccattttacaccaccagctgggtgagagatccagtttctccacttcttcaccagcacttgggagggtcagacttttaaattttagccattctaaaaggtgagcagtggatcccttcatggttcagtttgcatttccacaatgactaacagtgttgagaatttttctgtgtttatttgtcatccatatatcatgagctgttaacaaatcactcaaaatatgcttgttagcaaaattttaatgttatattcataatgaaaatctgtggttctgtatgacaattccctagggcttttttttctttagaggtcaggggagttcaaaatgtggtttttttttaattccttatcatcagtggtwcatgcctctgcactgaatagttgaaaacctagtgcccctttctgttggagctcttcaaaattacaattattaaaatacaaaa

SEQ ID NO: 621677 - DNA, 450 bp, Homo sapiens
aggtcagttgaggctccaattccacaggaggtagtgtgccatgatgacttgagcaccaggagtgtgactattctggtgtaccaggggtgtgaggtaatagaggatgagacaccatgttggctgtgataacaaggggatgactgttcccatgttccaaggtctagagtctcccaagggacagagtgctgggtcaactcaagcactagagggcatgactgctctggtgtgccagaagcctgaagtccctggggggtgtgacactgtgttggtttcagcacccgggacacaactgttccaatgttgtcaaggctcaggacccsaaggaggcaggttgacaattcagcttgaaccccagggggcagggcacatcagcaaggaataggaagatggaacgctttgcagtgcttggacccagagagtagggcatagcctcagcatggctcagggatg

SEQ ID NO: 621678 - DNA, 450 bp, Homo sapiens
aggtcagttgaggctccaattccacaggaggtagtgtgccatgatgacttgagcaccaggagtgtgactattctggtgtaccaggggtgtgaggtaatagaggatgagacaccatgttggctgtgataacaaggggatgactgttcccatgttccaaggtctagagtctcccaagggacagagtgctgggtcaactcaagcactagagggcatgactgctctggtgtgccagaagcctgaagtccctggggggtgtgacactgtgttggtttcagcacccgggacacaactgttccaatgttgtcaaggctcaggacccgaaggaggcaggttgmcaattcagcttgaaccccagggggcagggcacatcagcaaggaataggaagatggaacgctttgcagtgcttggacccagagagtagggcatagcctcagcatggctcagggatg

SEQ ID NO: 621679 - DNA, 234 bp, Homo sapiens
cactccactacccagcaatctcattcctgagcataatatataaaccacatacacaagcatgctaatagatacattgccgtggttgcaaaaaattggccagtctatttttctgtcactagggaaatgaatgagtttaagttggaccatatgaaattgtgaatttttgaccttttttctacaaaaaggtmaatttcatatagttcaacctaatgcaatgtggtagatatatactat

SEQ ID NO: 621680 - DNA, 518 bp, Homo sapiens
taaataacaaacatttatttttcatagttcttgaggctaagaatgccaagatcaagggtctggaagatttcatgtctggtgagggaccattcctcaaagagggcactttctcactgcgtcctcacgtggtggaagcgatagggcagatcactgaaaccccttttataaggacactgacaccatctatgaaagctttctctgcatgacctagtcaccccacccgcaagagccccaactcctaataccattgcctttcgtgttaggatcttaacatattaattttggtggaacacaattattcagaccatggtgtctatttgttgttgtttattatttgctcctcagcrcctagcagtgtttgataaatgtatgttgaaggaggggagcaagatggtctgacctgaatagccagttctcaaaagaagacataccaatggcaaacaggcttatgaaaaggtgctcagcatcactgatcatcaaagaaaatgcaagtcaaaaactacaatgagatatcatct

SEQ ID NO: 621681 - DNA, 607 bp, Homo sapiens
catttggcaaaaattttcaaatatgtagaaaagttgaaagtattatacaataaacactcatatgcccactactgatattctaacttmaattttccaattttgtatcttaagctttctaaatgtaaaaaaaaaaaaaaagcatgcttgttattttttaatctttaaagtacctttatttcacaaacatgaagactatgtgatgaaaatgaatccttccacaggaagaaaagtatcatttatacttttcctgattctctgaggacttcagatatggagtgaaataaaagcttggcgtgagagagaatgaagtcttgacagaaagtgaaatccctgtcctgtctgtttacagcaacccaaaccaaaatcaagcaaacggcaatgctttttatgtgttcttaaataaaatagacatttgttgattaatttactgtctagttttgtttccataaatgtcgccaaaaccttctgttatcctctaggtgcagccctgaaagggtggcttgtaagtgctgcaaacattacatccagttctatcacaatcaggtacagaaagcagttacgatgttctacaattgcttatttatgactttgctgccacagatttgtc

SEQ ID NO: 621682 - DNA, 532 bp, Homo sapiens
aaagagacccgttgagataagtactgagtaaaatttacagaaaacttaaaaaaataaacagcatacagtgtcttcataggctaacaacaacaaayaataaaaaacaaaaatacaggtgagcagattagatgaatatatatattttagatggagactagctctgtcaccaggctggagttcagtggcgtgatctcagctcactgcaacctctgcatcccaggttcaagcaattctcctgcctcagcctcccaagtagctgggcttacaggcgcgcgccaccacacccagctaatttttgtatttttagcagagacggggtttcaccttgttggccaggatggtctccatctcctgacctcgtgatccgctcaccttagcctcccaaagtgctgagattacaggcatgagccactgcgctcagcctagatgaatgtgttttacttcaacaatttagactaatcgtatacaacaattgtaatatatttatacattagtagcagtaaaatcagaatgattcttatttttttatgat

SEQ ID NO: 621683 - DNA, 532 bp, Homo sapiens
aaagagacccgttgagataagtactgagtaaaatttacagaaaacttaaaaaaataaacagcatacagtgtcttcataggctaacaacaacaaacaataaaaaacaaaaatacaggtgagcagattagatgaatatatatattttagatggagactagctctgtcaccaggctggagttcagtggcgtgatctcagctcactgcaacctctgcatcccaggttcaagcaattcwcctgcctcagcctcccaagtagctgggcttacaggcgcgcgccaccacacccagctaatttttgtatttttagcagagacggggtttcaccttgttggccaggatggtctccatctcctgacctcgtgatccgctcaccttagcctcccaaagtgctgagattacaggcatgagccactgcgctcagcctagatgaatgtgttttacttcaacaatttagactaatcgtatacaacaattgtaatatatttatacattagtagcagtaaaatcagaatgattcttatttttttatgat

SEQ ID NO: 621684 - DNA, 573 bp, Homo sapiens
ggcactttggatactgcaagggcatgagcttcccgtgcccctgagagtgcagggatgcctgggtctggagccatggctgggtggctgtagctgctcccagaaaggggcagagctcctgcctgctcctggctcccatgggcsccatggagtgtgtaaccctcgctgcacctctccttctgcagcgagtgtcttcgcagtggccactccagaggggccactgctgccatcattatctttgagaaataatacaggaaaaggagattaaagcaaactcagtcatttttatgaaggaaggactattaactgatgcattaattaggattctatttttgtgatagtaatttgtgggcttgttattagaaatgtatggatagaatctggaccccaactgcaaaatgtgagatgggcaaaatttaaacatacagttttggtttgtgtaaaatattgtaatttattctaacatgtatgaagagaataagtgcttgaggtgatggataccccatttatgctaatgtgattattgtacattgcatgcccgtatcaaagtctctcacgtaacacataatatataca

SEQ ID NO: 621685 - DNA, 573 bp, Homo sapiens
ggcactttggatactgcaagggcatgagcttcccgtgcccctgagagtgcagggatgcctgggtctggagccatggctgggtggctgtagctgctcccagaaaggggcagagctcctgcctgctcctggctcccatgggcgccatggagtgtgtaaccctcgctgcacctctccttctgcagcgagtgtcttcgcagtggccactccagaggggccactgctgccatcattatctttgagaaataatacaggaaaaggagattaaagcaaactcagtcatttttatgaaggaaggactattaactgatgcattaattaggattctatttttgtgatagtaatttgtgggcttgttattagaaatktatggatagaatctggaccccaactgcaaaatgtgagatgggcaaaatttaaacatacagttttggtttgtgtaaaatattgtaatttattctaacatgtatgaagagaataagtgcttgaggtgatggataccccatttatgctaatgtgattattgtacattgcatgcccgtatcaaagtctctcacgtaacacataatatataca

SEQ ID NO: 621686 - DNA, 594 bp, Homo sapiens
tatctcattcattcattgaatcactcgtgcactcaatgaacacatacttgcattcaacaaatacattgcatattcatctattctggtaacaaggaaacttttgttccaacaggagattgagtttttgtgaaaagtttaatttcttcttttgtccaattctttagatctagacaatcagagctgacatataaaaaattgtaattttaataatttttataattttgtaagtatctggcagtcccaaatcttatttccatcaaaggattgctttcaatttgatttcactggtgcttttcttttctttcttttaacttgtcatcataatgacatattggaagactatcgtaagtggataccactaaaaacacactatttcacttttgagttcaccagtgtttttcaggtcaaaaaattattggtagtagtttttagtaatgtattcattgcaataacagtagtccccaaccttttggcaccagggactggtttcatggaagacagtttttccayggaagttggggaaccattccacctcagatcatcaggcattagattctcataaggagcatgcaacccagatccctcacatgtgca

SEQ ID NO: 621687 - DNA, 542 bp, Homo sapiens
aagcattgcccttccatgaaaaaaataattaataaaaatcattttattatatgcagcatgctttaggggctacaatctaggtgaagttaaaagtgaacctttttttgttttgktttggtttttttaattgtagaggacactaagaagcaaagtttatcccattctttagtcaggaggtgaggcagaactctggaatgtaagattgctcaaaaacatctgcacttgccaacagttaacttatgggaataaaaccttttctgtataagtgattagattctctgagcttcaaagagagttgcggcatcttaattacatggaatataactactccagttaaaaacaaaatattcaaggtgaaaacacagtagaattaagcagtattatttcaaccttgaaactgaagctatatcttatcactctattgccccataatggaaaactgaacttgagttaatcagtattcctgattacaaataggaaaattgtggggatttttcagaaccttcttttcattgtaaaggaaatgtcatgaccgtgattta

SEQ ID NO: 621688 - DNA, 575 bp, Homo sapiens
agctgagcacattttagtcttcagatccaaggaggatgcagtatccatctcagttcaccatacacaagtgaataatgaaagatttaaaacacagagtgttgtttttattaaagagattactcytgaaatagtttcatagggctaaaaagtctcttgtttctacaccttttaaaatgaacaactgaacactgcaaatatactaattattttcaagcaaacaatgcatttataagtggaaatttatctctcaggagaaaagaaatgtcttttatcagcaaaaggaacttgttaagaataaaaagtattggtttcagaggacatacggggttgaaagtctgtactaaacacctaacccagcatgtactctgaaaacagtagttatgatatgaagaaagtattattgctgtctctattttgcagatgagaaaactaaggcttaggtcacctatccaagtgtacagccagaactgtctgaatcctatagacttgagtttagatatgtaatgtctatattaagctggtgaaacagaattacagttgagcaagtgttttgtttgtaggagggcaggaagggt

SEQ ID NO: 621689 - DNA, 622 bp, Homo sapiens
tgctaggcattgggaattcaaaaatggaattattgttttcygccttcaaggtatttctagtccagtagagagaatttcaaacacaccaataaagcatgatgttaactgtcaaaatcaaattatgcacaatatgatattgaactttcgaggggtaatccctgagtctgaatggcaaagtcaggaaagacttctcatagaaagcagcatttgagttgagacctcaaaggtaagaagaaatttgccagttggataagttagggataaatattttctctaacctgaagaaaagcctgatgttcaggggcatagatgcttgagaaaggctggggaacttcaagtggctggattgtaaaatgacattaataaaaatagcaataaccccaaacttactttgtgttagaaagttttctaagtgttttgtgtggatcatttcatttctccccataacagccctgtgaattagtgaatgtaactatcttaattttactggaggaatataaggcttgaagaaggttgatgataagcctgggatgcaatctcaggtagcttgcctccaaagtttgtggtatagctgctgtgctattttgcctctgaaatgggactgataaggggtgaaagtaga

SEQ ID NO: 621690 - DNA, 622 bp, Homo sapiens
tgctaggcattgggaattcaaaaatggaattattgttttccgccttcaaggtatttctagtccagtagagagaatttcaaacacaccaataaagcatgatgttaactgtcaaaatcaaattatgcacaatatgatattgaactttcgaggggtaatccctgagtctgaatggcaaagtcaggaaagacttctcatagaaagcagcatttgagttgagacctcaaaggtaagaagaaatttgccagttggataagttagggataaatattttctctaacctgaagaaaagcctgatgttcagggrcatagatgcttgagaaaggctggggaacttcaagtggctggattgtaaaatgacattaataaaaatagcaataaccccaaacttactttgtgttagaaagttttctaagtgttttgtgtggatcatttcatttctccccataacagccctgtgaattagtgaatgtaactatcttaattttactggaggaatataaggcttgaagaaggttgatgataagcctgggatgcaatctcaggtagcttgcctccaaagtttgtggtatagctgctgtgctattttgcctctgaaatgggactgataaggggtgaaagtaga

SEQ ID NO: 621691 - DNA, 622 bp, Homo sapiens
tgctaggcattgggaattcaaaaatggaattattgttttccgccttcaaggtatttctagtccagtagagagaatttcaaacacaccaataaagcatgatgttaactgtcaaaatcaaattatgcacaatatgatattgaactttcgaggggtaatccctgagtctgaatggcaaagtcaggaaagacttctcatagaaagcagcatttgagttgagacctcaaaggtaagaagaaatttgccagttggataagttagggataaatattttctctaacctgaagaaaagcctgatgttcaggggcatagatgcttgagaaaggctggggaacttcaagtggctggattgtaaaatgacattaataaaaatagcaataaccccaaacttactttgtgttagaaagttttctaagtgttttgtgtggatcatttcatttctccccataacagccctgtgaattagtgaatgtaactatcttaattttactggaggaatatraggcttgaagaaggttgatgataagcctgggatgcaatctcaggtagcttgcctccaaagtttgtggtatagctgctgtgctattttgcctctgaaatgggactgataaggggtgaaagtaga

SEQ ID NO: 621692 - DNA, 575 bp, Homo sapiens
aagaaccattcagagaatattggaagtaatccaagggaaatataaaataattagaagtacataccagaataaattaatcccagttaaaattaaattgatttaaatacagaasctttctattttgttaaagaaaactacaaactacagtatgttcagaagtttagttatttccaggtgcctcaggtggggcgtatatgtgcaatagtcttattggaacgtttgcctgtgtgctgctctgtgtttcagatagtgacagtttgagtgtgatatcttgcacatgctgctttggaaacatataaggaaacatcaaatgcacgtgccatgcaatgcataacttagattaagacagctttttttttcttgcttaagcagctgcagttaacacttttgtgaagtttgatatgtccccagtatctcttctactgggtgcagtaacagcagccccagagaaacaccatagcagtcggccatgtaattcccagtgtgcatttaaggaatgcaaagctactttatggaagggagaaaagtggtccactgggaggcaaagcataagtgaggagaaaactaatatccaa

SEQ ID NO: 621693 - DNA, 581 bp, Homo sapiens
gggcagggacacaaattcaaatcatatcaacctgtaacattcaagatttacccagatcgtcctctccatacccctgtccacygaactctgttagttaaatgcttaaaacaaaatgaaacaaaaaacaaaggtataccatatttatggccaaatagtagatttattagctatctctaatcatttcttggtgtgtcctagtgccaaataaggcattatttacaaaggtgactacagaaataaattattttactggacttataaaaaagacctgttaattagcttgaaaaagaaagtctttttcaggcctgcagccattccttgtcaggttggaatctccttaactctgaccagctaagtaaggtctgacctttcagcacatcctggagaaactcagaagcttccttaagcagcattggaggatactaaatctctctgtaataatgaaagaatctgaattgctgaaggtaccaatgtgacctctttcgcaggtaaattcatactgaggtaaatacaaatcacagttatctgtgctcagtcttctaattcttaacacaagaaaagcacttattatgggtagacac

SEQ ID NO: 621694 - DNA, 581 bp, Homo sapiens
gggcagggacacaaattcaaatcatatcaacctgtaacattcaagatttacccagatcgtcctctccatacccctgtccactgaactctgttagttaaatgcttaaaacaaaatgaaacaaaaaacaaaggtataccatatttatggccaaatagtagatttattagctatctctaatcatttcttggtgtgtcctagtgccaaataaggcattatttacaaaggtgactacagaaataaattattttactggacttataaaaaakacctgttaattagcttgaaaaagaaagtctttttcaggcctgcagccattccttgtcaggttggaatctccttaactctgaccagctaagtaaggtctgacctttcagcacatcctggagaaactcagaagcttccttaagcagcattggaggatactaaatctctctgtaataatgaaagaatctgaattgctgaaggtaccaatgtgacctctttcgcaggtaaattcatactgaggtaaatacaaatcacagttatctgtgctcagtcttctaattcttaacacaagaaaagcacttattatgggtagacac

SEQ ID NO: 621695 - DNA, 581 bp, Homo sapiens
gggcagggacacaaattcaaatcatatcaacctgtaacattcaagatttacccagatcgtcctctccatacccctgtccactgaactctgttagttaaatgcttaaaacaaaatgaaacaaaaaacaaaggtataccatatttatggccaaatagtagatttattagctatctctaatcatttcttggtgtgtcctagtgccaaataaggcattatttacaaaggtgactacagaaataaattattttactggacttataaaaaagacctgttaattagcttgaaaaagaaagwctttttcaggcctgcagccattccttgtcaggttggaatctccttaactctgaccagctaagtaaggtctgacctttcagcacatcctggagaaactcagaagcttccttaagcagcattggaggatactaaatctctctgtaataatgaaagaatctgaattgctgaaggtaccaatgtgacctctttcgcaggtaaattcatactgaggtaaatacaaatcacagttatctgtgctcagtcttctaattcttaacacaagaaaagcacttattatgggtagacac

SEQ ID NO: 621696 - DNA, 581 bp, Homo sapiens
gggcagggacacaaattcaaatcatatcaacctgtaacattcaagatttacccagatcgtcctctccatacccctgtccactgaactctgttagttaaatgcttaaaacaaaatgaaacaaaaaacaaaggtataccatatttatggccaaatagtagatttattagctatctctaatcatttcttggtgtgtcctagtgccaaataaggcattatttacaaaggtgactacagaaataaattattttactggacttataaaaaagacctgttaattagcttgaaaaagaaagtctttttcaggcctgcagccattccttgtcaggttggaatctccttaactctgaccagctaagtaaggtctgacctttcagcacatcctggagaaactcagaagcttccttaagcagcattggaggatactaaatctctctgtaataatgaaagaatctgaattgctgaaggtacmaatgtgacctctttcgcaggtaaattcatactgaggtaaatacaaatcacagttatctgtgctcagtcttctaattcttaacacaagaaaagcacttattatgggtagacac

SEQ ID NO: 621697 - DNA, 643 bp, Homo sapiens
gacttttacatagtctcattgctacagtgatcacttcactactttagacaagaaagtggaagagtggaatattcaatggtgggaagaggttttgggaattttttttccatatggaatccaagccccttaagcaccaggggcaaggctgcattggtgaatttatcacattgtgttgtaattgccagtctgtttgtttttttcactcaaggacaggaacatgatgcatttctattttttgttcccatcgccaataacaatttgccaactgaatacacaatatagcacttattgagcacctgccgtaagctgatttatttttaaaacaaccctatggggctaaatattattattccaatattcttcatgatgaaactgaaggtcaaagaggttagattgcatgtctatggtgggcaaagctggaatgaaaactcagaatgcctgcctccaaattcctcagcatttttccttccatcttatattaaagaggcttaatagactggatattataatgagaccattagaacatgaaccatatgcatcaaaggatcttctggaaactgaagatgatgaattacaaarcttttgtgatcataaaattgctaaataagttgaaatattgaaaaacatatacaaatcttatttt

SEQ ID NO: 621698 - DNA, 607 bp, Homo sapiens
attttcgtctgaacataacacaaaggaaacattttaatgatatcttcactatctgatatggcggtctcagttcagacagattgcttttgcaagcactcttgcaaattgaaggcatacacctgtgataaattttctttcagccaaaatacatgcataatgttcaaactagatcaagtcttctaaaatgaaatggaagctagtgttgttgctaagcaaatgctgtgccatcaactgaaaatagcattcctattaaagccaagtgaaaagtttgatttctattacttaaattgtacattgggttatagaactctaggcttaaattctgaatatatgattttatgttgttttaaacagaaatattttagttaagtgagcaactagygaactgtgatattcatattcaaatacatgcacatttgcatggtgtaagaagggatacagacagggcttaaatcttttaaatataatatttataagtaagatggtcacaattataaaccttatgagcaaggtgatccccagaggtgaatgcaagaaaataattatggaaagtagatgcagaaagatcctcaagggaaatattattcatgacgtattttagttctct

SEQ ID NO: 621699 - DNA, 607 bp, Homo sapiens
attttcgtctgaacataacacaaaggaaacattttaatgatatcttcactatctgatatggcggtctcagttcagacagattgcttttgcaagcactcttgcaaattgaaggcatacacctgtgataaattttctttcagccaaaatacatgcataatgttcaaactagatcaagtcttctaaaatgaaatggaagctagtgttgttgctaagcaaatgctgtgccatcaactgaaaatagcattcctattaaagccaagtgaaaagtttgatttctattacttaaattgtacattgggttatagaactctaggcttaaattctgaatatatgattttatgttgttttaaacagaaatattttagttaagtgagcaactagtgaactgtgatattcatattcaaatacatgcacatttgcatggtgtaagaagggatacagacagggcttaaatcttttaaatataatatttataagtaagatgstcacaattataaaccttatgagcaaggtgatccccagaggtgaatgcaagaaaataattatggaaagtagatgcagaaagatcctcaagggaaatattattcatgacgtattttagttctct

SEQ ID NO: 621700 - DNA, 575 bp, Homo sapiens
cagaaagatcctcaagggaaatattattcatgacgtattttagttctctaacatatgttaaaatgaaaataatattgctggggtagaattcaaaataatttataagatcagaattttagtttgattttatagttagaggaatatttattggttgtgttaatctgttttcacactgccataaggaactaccagagactatgtaatttataaagaaaagaggtttaattgactcagttctgcttggctggggaggcctcaggaaacttacaatcatggcagaagatgaaggggaaacaaggcatggtggaaggagagagagagaaatcagggaaaatgctgcacacttttaaaccatcagatctcatgagagcttacccactatcactagaacagcaagggagaaattcgcccttattatgcaatcacttcccaccaggmgcccctgacacatggggattacaattccagatgagatttgagtggggacacagagtccaaaccatgttatttgttatttgattacatttcagatgacttagagatccaggatttagaaagagacatagaaagtaagt

SEQ ID NO: 621701 - DNA, 607 bp, Homo sapiens
gttttatttaattttaatgcctatctcagaattataatagttcaaaaagaataagacacttaaggaataaaaagggtctcatctacatgaaagcttgtgcaataagaaaaatcctgctaccaccgaccaagaaaatcattacttaagtactacaaagaaataaagaataaaatgaagttataaagttatggtactttcaagaggtttttactcttcttgcaactttaaggttaacaaaatcaaagattctaaacacacaccattataatttttataaatgtgcttattaatacatttacagctttaattacaatatacataactcataaacaggttgccaaatactttcttgagttcagtaaatccaagaatgaaaattaaagctgcttcataataattaatttggttgaatttagatattttgcacattataatcttcaagtaagaagctttaagatataktaaaattgatttttcaataattattaattttcatatttagtgaatttgatgattaagattttttggtattttaaaatacatatgcatgaaagaaattattttaaattctatagttagttcagcagacatcaggaagttaggacta

SEQ ID NO: 621702 - DNA, 607 bp, Homo sapiens
gttttatttaattttaatgcctatctcagaattataatagttcaaaaagaataagacacttaaggaataaaaagggtctcatctacatgaaagcttgtgcaataagaaaaatcctgctaccaccgaccaagaaaatcattacttaagtactacaaagaaataaagaataaaatgaagttataaagttatggtactttcaagaggtttttactcttcttgcaactttaaggttaacaaaatcaaagattctaaacacacaccattataatttttataaatgtgcttattaatacatttacagctttaattacaatatacataactcataaacaggttgccaaatactttcttgagttcagtaaatccaagaatgaaaattaaagctgcttcataataattaatttggttgaatttagatattttgcacattataatcttcaagtaagaagctttaagatatattraaattgatttttcaataattattaattttcatatttagtgaatttgatgattaagattttttggtattttaaaatacatatgcatgaaagaaattattttaaattctatagttagttcagcagacatcaggaagttaggacta

SEQ ID NO: 621703 - DNA, 607 bp, Homo sapiens
gttttatttaattttaatgcctatctcagaattataatagttcaaaaagaataagacacttaaggaataaaaagggtctcatctacatgaaagcttgtgcaataagaaaaatcctgctaccaccgaccaagaaaatcattacttaagtactacaaagaaataaagaataaaatgaagttataaagttatggtactttcaagaggtttttactcttcttgcaactttaaggttaacaaaatcaaagattctaaacacacaccattataatttttataaatgtgcttattaatacatttacagctttaattacaatatacataactcataaacaggttgccaaatactttcttgagttcagtaaatccaagaatgaaaattaaagctgcttcataataattaatttggttgaatttagatattttgcacattataatcttcaagtaagaagctttaagatatattaaaattgatttttcaataattattaattttcatatttagtgaatttgatgattaagattttttggtattttaaaatacatatgcatraaagaaattattttaaattctatagttagttcagcagacatcaggaagttaggacta

SEQ ID NO: 621704 - DNA, 583 bp, Homo sapiens
tgactttctttgtaaattacaattgtattttgccaagactatttctctgaatatgtaaaacaaagtggtataataggggaaacataatcattgacgggattcatttatttgttcagcatcaaaatcttcatgttaattcacatctaattacaacacaaatcttttcagctgaaaaactttccttttccttaagtttttatagtaaatatagcaaataacatatctataatatattgraaaacaaaagttttcaagttacttgacaatccaacaatttgaggaatgagactaaatttgtgaaacggtttatcatagtgacataaagataccagactcacaataatattgtctttattgaataaaaaagaaaatattctggctataataatcagattacttgggcagtagtggttgaaacaaatagagatttattttacttttattacagaagtctcaaaattgctggtgttggctgagtagctaaattatatcaaggccagcattagactttctctcatggttcttagataaaagttccagtttaggaatgaagtttccattcaaggctggaaaaatagatagg

SEQ ID NO: 621705 - DNA, 655 bp, Homo sapiens
atcaattttctttttaattttttcattgacccaatggtcatctaggagcatgttttttaatttccatggtttgtatagtttctgaaattcttcctgttattggtttttggttttattccattgtggtaagagaagatggttgatattaactcaatttttttttggaatgttttaacacttgttttgctacctaacatatgatctctccttgagagtgatctatgtgctgaagagaagaatgtgcattctkcagctgttggattaaattttctgtaaatatctattaggtccatttattttatagtgctaattgaattcaatatttcatcattaattttctgcctggaagatctgtccaatgtttaaaatggggtataaaatctccagatattattaataatgatattattaaaataataatatgcaccagtgttgggtgcatatgtttacaattgttatatcatcttgctgaattgacccctttgtcattatataacaacctatttttctcttcttactgttcttgtcttgaaatttattttgtctgatataaatttagctactcctgatctttttaggtttctgttggcatggaatatctttttccatccctttgttttcattctatgtatgtctttatagatgaactgtgttt

SEQ ID NO: 621706 - DNA, 257 bp, Homo sapiens
ctttttaaattgcagctaatgttatataaattttgctttcaaagattttgccctccttccaagtaattccagaaatgacaaaaacccaccctcactccaaagggtgatttcagtgtctccaggctctacccctgcattgaagaattggcttcgtggcacatcaaacttctccyataagaagtgggagtaacttgaagctccaggaaactccctctggatgccatgtaggtgcagataacaggaatagtttccctgag

SEQ ID NO: 621707 - DNA, 562 bp, Homo sapiens
gtgatgtgcacctgtagtcccagctactcaggaggctgaggtgggaggatcaggattgcgaatagggctgaagttttggattcctatccagaacatgacagttctttacactttcacagacccatgaagcttatcccttctccttcaacccatgaggatgaggctgcagtgagctgtgatctcaccactgcactccaccccctctaaaaattaaaaaaaaggcacctctctattataaaactcctamatttactgtttactcttatgtgtacagttcttgtagggaataaagtctgtcatttcccaatcagacttaaaactcaaaggctgactttccgggcaagaaaataacactgacttcatttgacactgatatgtaaatgctcaataccaggctttgccagaaagctaagaaaaagaaaatgacagcaggagaagccactgtaaatgtaaaggagggctgcacaaccgaatgtcctgttttcaaattcctgaggaattttcctaagctctcattgattgtgtatttcactttcaaaatggaaattttataatatttaag

SEQ ID NO: 621708 - DNA, 574 bp, Homo sapiens
ataaggctgaagtgttggattcttgtccagaacatgaaagttctttacactttcacagacccataaagcttatcccttctccttcaaccctccatcagcaagctctttataaatgaaccctagacagagtcatcacagtgaattgactctctgagtaccaaaaagcaagtgaaaaagtacatcataaaacactcatatttatggtattttaccatttagaaagtgctttaacacctgattttatttactctttacaacaagcctgcatagctggcattattattatgcccaatttatagatgataaagccaaaaagaaagcttagcttgctcagggacaaagtggcacattccagtctcatactgagatccgggattccagaatcgatgctcttttcctggagcccctcagaagctccactgatgatgggcaagtaggagtgtatccacatttgaaggttgctacagagmaacggtctagctgctctatcagattaggaaggaaaacaggaagaaaaggagggtggaagggagggagggaaatactgctcattatgttttgagttaaacaggtt

SEQ ID NO: 621709 - DNA, 516 bp, Homo sapiens
ttttgtcaaaaattattaagtgacacaactgttgtttaaaaacagaaaataaaactttagttaagtatacaaaatgcatgtattcactctcctttctaagatattgtctaccttattggttgatagcattttcggtgcactattacaacacataacagttctccccacaccaatttggctatataggtctatgaacattcctcgcgtttaatatttaaacatgccactgagcacaaaaaaaagaattaaaaaagtaaaatctaacattggcagttgggttttatgtataaagtagcaacagggcagacctcaggtgatgtttagacttacttcttggcctagacttatgttaacaraaccccaaaaggtctaaagcactaaagaggtttgccaactacacttagatgtgggtagatgttctatgggtttacaaatacaaggtgaataaaactgaatatacccatcagaatctttatattctacatagcaaaacagtactaggaaaaattagaaata

SEQ ID NO: 621710 - DNA, 658 bp, Homo sapiens
atgctggccagtgagggataaggaggttgccttggaatgtaaatcaactatatcactaagcacactgtttagttcagctgtcatttttttttaataggaagactatttactgaaggaaacagagtgttgatttacattctgacatacacacctgagtctgtcatggactagtactttgagtagccttgctataaatgacccatattagaacttctattgaaagcaagtttattttattctttaaaccaacataacatatggacatactaaaaaaaatgaatagcatataaagaacrcatagactgaaaagaaaaatgtttcttttctcagaacactcatacactgttggtgggaatgtaaattagttctgccactgtggaaagtagtttggagatttctcaaagaactaagaatagaactaccatttgacccagcaatttcattactggatatatatccaaggaaaataagtcattctactaaaaagacacatgcacctgtgtgttcactgtagcactattcacaatagcaaacgcatggaatcaacctaggtgcccattgatggtggactagaaaaagaaaatgtggtacatatatatatgatggaatgctacatagccataaaaagaatgaaatcatgtcatttgcagcgacatga

SEQ ID NO: 621711 - DNA, 658 bp, Homo sapiens
atgctggccagtgagggataaggaggttgccttggaatgtaaatcaactatatcactaagcacactgtttagttcagctgtcatttttttttaataggaagactatttactgaaggaaacagagtgttgatttacattctgacatacacacctgagtctgtcatggactagtactttgagtagccttgctataaatgacccatattagaacttctattgaaagcaagtttattttattctttaaaccaacataacatatggacatactaaaaaaaatgaatagcatataaagaacacatagactgaaaagaaaaatgtttcttttctcagaacactcatacactgttggtgggaatgtaaattagttctgccactgtggaaagtagtttggagatttctcaaagaactaagaatagaactaccatttgacccagcaatttcattactggatatatatccaaggaaaataagtcattctactaaaaagacacatgcacctgtrtgttcactgtagcactattcacaatagcaaacgcatggaatcaacctaggtgcccattgatggtggactagaaaaagaaaatgtggtacatatatatatgatggaatgctacatagccataaaaagaatgaaatcatgtcatttgcagcgacatga

SEQ ID NO: 621712 - DNA, 599 bp, Homo sapiens
tttgcctaaaagaggatgataaaactcctgtgcccagctaaggcaatggctccccatagagcacataagtttgagctggagatttctaagtcctatttattgctcctgagaaggctacttcttcattgctaagagtttctatccaaatgaactctgttggagaagatggatgtgattccttctagtagccattatttacttttgctctggtcactgaaaataygtatttcttatataaaatgctgctctcagctccaccaatcaaccaagaacccagacagtctcaatctcttctgtagcagtttccttggcaaccaggacccagccagggagctcgccaacccacagtgggaccaagtgaaaccctgcagcactgtcaggcactctctgcttttaaatagtaagcgaccacacaaatgccaacccagctgccatcattctctatttgtaaagcaccttccatctgggcacctcaaagcggaatgctttcacaacaggggtcttacctgattgagatgaatgttatcattattcacattgttcctataaggaatcaggggtgagaaaaatcaaaggattctccaatgggctcttttgtc

SEQ ID NO: 621713 - DNA, 498 bp, Homo sapiens
gctggtgcctcgatcccaggttccagaactgagcattacatttctattacttataaattacccagtctaagttattttgtgatagcagcctgaactaagacagctgtatatggaaagtgtcagattttttttttttccacaattgcatgtttggtatacattaagcctctagtaatgtacatgtacacttgtagtccaygttatgtaaattcatttgataatcattgatcaagtatctactatgtagtatactgtagatgttattttgcaaaagtattagagaaaaaaatttgaaaatatttgaaaatcaaatcagcctctgatattgaccctcattttcttcgttaagttttgtctgacctactaagctataggaaaactttatcttaacatatttggccaaatccttggtacaaagaaaaaatgtttgtacgtgttaaggccacagacttacagtgtgtttttttcctctagtactattataataagttaacatat

SEQ ID NO: 621714 - DNA, 546 bp, Homo sapiens
gttccttttgacaactctaacattaccagattatctgtactagataggtgtgggtactgatataaaaggagtgaaagaatgaacaaagatctatagaactacatagatatggtggtgggggaaggagtcaaacctttcactacgttttcctgaatgaatgaatggtgtgcaagaaccctgaagccatctactgaacctcgacatgtgatgcttgcaggatgtttgggtaaatagggccctatccacttttatgttaagaaactgtctgggcttttcattgctgagtttaaacaggtatttttttattgtgttaaaaaacatataacatacaattaccctctgaacaatttttatgygtacagtacaatgttgctaaccatatatgtacaagcttgtacaatatcactaggctttttcatcttgcagaactcaaactctgtaaccactgaacagttcctcactctccctccccttgccccctggcaaccaccgttcttctttctactgctatgtgtttgattcctctacatacctcatgtaagtgga

SEQ ID NO: 621715 - DNA, 401 bp, Homo sapiens
tttgtttttgtttttgagacagagtcttgctgttgtcacccaggctagagtgcagtggcttgatcttggctcactgcaacttccgcctcccaggttcaagtgattctcctgctcagcctctccagtagctgggattacaggcacctgctaccatgctggctaactttttgtttttgttgttgttgttgttgttgtatttttagtasagatggggtttcaccatgttggccaggctggtttcaaactcttgacctcaggtgatccgcccacctcggcctcctaaagtgctgggattataggtgtgagccaccctgcccggctaagaaaagagatttaattggctcacggttctgcaggttgtacaggaagcatggcagcatctgcttctggagaggcctcag

SEQ ID NO: 621716 - DNA, 555 bp, Homo sapiens
gtttattctcttggtttcagaaactgctttgaaaaaatatttttttgtcaacttgaatagtgtacccttaaagtgtcaatttttaaattttccttttaatccttaaaatagatgaatacagtttgatatggtttggctctgtgtttccacccaaatctcatgttgaattgtaattcccaatgttaggggagggacctgatgggaggtgattggaatatgggggcggatttccctcttgctgttcttgtgatagtgagtgagttctcatgagatctggttgtttaaagkgtttaacacttccccctttgctctctctctcctgttgccatgtgaagatgtgcttgtgtcccctttgcctttctgccatgattgtaagtttcctgaggcctcacatccatgctttctgtacagtctgtggagctgtgagtgaactaaacctcttttattcatcaattatccagtctctggcagttctttatagcaatgtgagaacaactaatacagaaaattggtactggagaagtggggcactgctataaagatacctgaaaatgt

SEQ ID NO: 621717 - DNA, 574 bp, Homo sapiens
tgtccattttccattttggcaaaagatacatggagtatttggtaggccaggaaagtgggtcttagtatatgaccactaaatacaactttagtgaagaaggtgatgaggataggaaggggaagaaataaaatactaaggatattgaaaagaataatttaaaaaawttttaaaatatatcaaaaatcacaaaccttatttataaaaagacagctgcatgagaataaacaaaacacatgccatgttattgaatatgaagactccatagtatacaaatgtccattctttctgaattactctatacactgaacacaatataagaaacaatgaaattcattctggaacttaaaactaatatgttaatcaggaaaaaataaatgtatgaaacccatcaagaaaattgtgtaaaatgaaaaaagttagagggtatttgtattataaaataattttaaaagcataattttatcacagaaagagtcagcactttgaaacagaacagaaactcttgacagatatcacatgtatatccgatataaatatgtgattaaaaatccatgcaaatttagttgataaagca

SEQ ID NO: 621718 - DNA, 646 bp, Homo sapiens
tgtgcctacatcaagaaaaaaataaaaactttaaataaataacgtaagatgcatcttaaagaactggaaaagcaagagcaaaccaaacccaatattagcagaagaaaataaataataaagaacagagcagaaataaacaaatttgaaatgaagaaaacaatagaaaaaagcaatgaaactgtaagttggttttttgaaaagataaataaaattgacaaactttagccaggctaaatatgaaaaaagagagaagactcaaataaataaaatgatggatgaaaacggagacattacaactgatacttcagaaattcaaaggatcattagaggcaactattagcaagtgtatgccaacaaattgaaaatccagaggaaatggatcaattcctayacacataaacctacaaagtttggaccatgaagaaataaaaaaacctgaacagaccaataacaagtaataagatcaaagccataataaaaaaagtctcccagtaaagaaaagcccaggaccctatggcttcattgctgaattctaccaagcatttaaagaactaataccaatcctactcaaactattctgaaaaatagagggagagggactatttccaaactcattcaatgaggacaatattattgtgataccaaa

SEQ ID NO: 621719 - DNA, 606 bp, Homo sapiens
atttcaataataccaaaaagatggtgtggttagaagggaataaggaaggggagagtggaaaagatgagacatattattattttgctataggctcatgtccagttagaagtatatgacgaaattgattttgtgattttgcaagagaacagaggtagttataggtgcaacaatttctcattgtataagaacatcttatttgtctcttttctagtactgcacctcttttttctttatccctgccttcattcacatctccctgtttacccctttccctcttcaagagaattggatttatcagacagagcttaaataatctaggaggcagagctgacctttgtggaaaacaaattatatgccaggtgctaggtcagtgtagtgagtttttaagatggccaagtttcattctcacaggtagatgcaggattgtcataagtgtcatggaagcaggaacggattcagaaaatgaacctagtcttcccagctcctgaatcctgactcttaaagtctttactaacatttccttattacctgtgacctcagactgttctacagagaaatgtatgtctttcatattaatctgcrtaaagttgtgcatctcttcaacta

SEQ ID NO: 621720 - DNA, 448 bp, Homo sapiens
aaggtccctgtggaatcacagacagagagaatacatgttccagtattctcaatgttactcagaaggtatggtgaaatttttttaggtttttatgtatacagctagtaattgcaatagatagaaatgaaactttgggtctgaactcctgaaaaaggaatttccttttatatattgagaatagattttagtttggtaatgggaaatttttttgaagacccggtatgggtaaggattaaaaaaaatgctcccattgggatatgctttcacattttaagsggagaaaacacatccacgtaatatttactttatgtggggacatatatgtacattactgtcttgtttatatatataaaatatacattaaatgcattgccgtattttgcattttacatatatttagaagaaatgcttagcttttctgagattatgttgtctctcttttcttctg

SEQ ID NO: 621721 - DNA, 559 bp, Homo sapiens
ctcttggccaaggggaccccagagaattcttaagaactgagttcctggccatgatggaaacaggaagttggacatgtctcgttatatccactccctttgtagtttatgcacaaccacttaccagcattaatattaaaatagagatcataagactgacagcatcaactctttgtggcaataagataccaaattataagtaagacttaatggatgtgccaggcaatggttaagtcatgtaccttctacacttaaagaataatttatgttctaactgccacaaggtttttctctttctctaccaactgaacaagcactggcctcaagataagcagtattgaaacaataacagctcacccagctcacaggcactgactaactgactcccctcttccagcagtcataactagagctctgattggacaagaggctgatttcaataacattctattcacaatggwctggttctggctagtttgtagttgtatacatttaaacgttaagtctttaccctaaggtgaacatgggtcatatgtaacatgcatgtttgttcaatatgcat

SEQ ID NO: 621722 - DNA, 570 bp, Homo sapiens
tgtttttatttactgtagaatctaaaaatgtcaaacttatagatgcagggagtggaaaaccatggttatcagaggctggtggggttggggagaggaatcagggagacgttggtcaaagggcagaaaattgcatttagacaggggaataaattattagtatttaaggtgatggatatgttaattagcttgattcaatcattccacactatatacatatatcatcactgtgggtcccawaattgtatatgattataatttgtcaaaataaaaaatttaaaaagaaaaacaaaataaacctagtggaagaaaaagaaagtgaaagatattgaagggagagagaacagtgtatccaaaaagcatgtgttcaggacactatgacatgttgaaaacttgcatatatatggtatggtcaaggtgagtagggaatgaaccatatccaggaagaggccaggcaggcagctgctctgatgtcaatctactatgggcattaaacattaaaatattaagtagtagatggcaccagttaagtcatgtttctatctacaactcattatatcactgccaaaatag

SEQ ID NO: 621723 - DNA, 580 bp, Homo sapiens
attaataaaaaaataaggtggtatatttcttcaaatttgttgtgatttttctaactactttcactattctaggtcagttgtttaaattccatatatattcagggaatcagatagtcaatttctacaaaaaaagcatggtggcattatgtttaagattgcatggaatctacagataattttgaggataattgacatcttaaaaatgttgtcttccaattcacaaatatgaaaatgtttccatttatttaggccttaatttttctcagcaatggtttttagttttcawtgtagaggtcttgcacatctgtcattagatttatttctagtaataggtttttgttgctattgtgaattctattttttatttttcaacagtaaaatatgaaaacataattgatttttatattagtttatatcctgctaccttgctaaaatgacataaatattatagtaattttagtggtagattctttataattttctacatatactttcatgggacttaaaaacaaaagacttgcttcttccttactgatttttaaaaaatgtatacaaatttatggggtacatgagaaatttt

SEQ ID NO: 621724 - DNA, 608 bp, Homo sapiens
tatcaggaagtgtataatgtctgatttttgttagcctgtatccattaattccttgagattttcaaaattgtaagattttaattatatgatttcagtttcatttattagctagaataattttatatggtagtgttgtctgtcatctactgtcttgttacccagttgcacaatttatataggaaagacagaataaaggtttggttgcttcygtttatttacccagttttcaaataatacattggagtattcttaaacctatttgatggatttcagctaattgcaattcctaatccttattgaagccagattgtcccatttttggttagtaggaacctcttattggctcctgagtccttctgacatgatcctgggaatctttgatagtttccttactatctctatgccaaggtgttccatcctcatcttgtacatgtcttgcagcagacacataattagcatctcttctcaaatccctggtttcttttagtgagagatgttatcgcaagagcataatctagaacatttgagtctcattgctgctgggctgtttattatttctgggcctcttgatttatatactaatgatgttaaaatatctataattggag

SEQ ID NO: 621725 - DNA, 634 bp, Homo sapiens
catgtctggaccatgccagcagttaacaaaaacatcgtgcatagaaatatggctcagatcagtagatgcaccgtctggaagactaaatgtaagtcttcattattagcagtcaataatgactcagctaataagagctaattctgactcagttctgattctctgtgcaccacaaagggcactttgcataaagctctgtattaccatttctatctttaattcagatagtcttaacactcagttacaaattggaatttggtggctgggrgagtgaattacattgaaggttaaaacaccacatttgttatgaagaaaagatgatctagtaactcatttatgaaacaagaaaaaagcataatatgcaagtatattttgttttatcataggaatgatagatttgtagagtacagtggaaaaattcttaactagaagtaggaagatattcattctctcattcattcagtcatttgttcattcatttaataaatatttactgatcccctactctgagcctgttccaggcactgaggacagaaatagtagtgaacaacacataaaaatccttgccctcaagcaatttgtcttccagtagtggtagtgggagacatataagaaataataaataagtaaaatgttt

SEQ ID NO: 621726 - DNA, 559 bp, Homo sapiens
gctatgaacttatattactccatgcccagaatctgtttgctgattgtcaattcctgtccaagataggccacatgtgaactcacatctgggtagtaccaagtctgttctatgccttagccttaatttttagtagcctgccccttgagctccatgtgagttttacaattagaaccttctaaatcagtgagtcacactggtttacaggtgtgaccaagatattgatcccctcakcatgcagtgtggctgggtgggacctgggcatcctagaggccctggaccagttgcttccaatacaagcagccttctctgtttatcccaaggtgccctataaatggtatcattttccaggcatgcatgacataaaatctgagaagtactgccacagactttctaaaagcttgctgcacagtgggattaacaatggggcattatcaattccagaaacaaacaaacaaaaaaaaacttttgccataaaggatgtgtggtccgttgcccattatcttctcccagttacctaattcatgcttacagtttcaatttcggtctatatatcaataac

SEQ ID NO: 621727 - DNA, 576 bp, Homo sapiens
cagaaacctggagaaacaccttagaaatgccactgttccagtcagaagtttttctcattatttattttcttcttttaagagacaaagcagaaaatattaatgggttaaaaaaagaatttttttttacagtataatctgtaatgggtcagagggaggataagctacattgtataaacattttatttataatctgagtacatcacaaaacatccaaaagtctttcaggcctaaatcctgtacaatttacttcaattttgtgtaattaaagaaaaactttcagtaactacatagccagcattcaaagatattaaagtacataaaagacctatttaaatagccagaaaatcctattcctgaacaaagattaaatgagctaatgaaatctatttcatataataaagaaggagggcaaattagttcacacatatttatactgtatgaaaatgaaaaataaatacagtgacaataccaataaaagtaayaaaacttacatcaccgatgattttcgctgttactgttggaactgcaccttgatataaattaaaacataaatttaggatctttacaattatttta

SEQ ID NO: 621728 - DNA, 402 bp, Homo sapiens
ttgaataaattctggaaaaacaaaacaacaaaaagtatcaatttaatctttgttaaaacaaagaagtattgtgtgcctacatatgccaagcacmgttctaggcatgtaaggtacatctgttaacaggcaatgttcctgcctctgagcagcttattacggaatggggggagtctcatttatgatgaaaaaataaaataacttaactaataatcttcctcaaaaataatatcctcccaatagataatatgggtgataaaagtaccattcaattttatagaaggcagttaaattaaattccaaatacagaatgaactacaaatccaagtttaataggaatgatatagaaacttatacaacccaggccctagcaaacacctaataaatgtgcattactatagtagg

SEQ ID NO: 621729 - DNA, 533 bp, Homo sapiens
ataaattttggcgggagactcgtttcagcccataattctgacctattggtctccctcgtctatttggaaacagacatgtgaaaaaatcataatgagataataaatggtatagaatatatatatatatatatatatatatatatatatatatatatatatatatacatatggcaatattggaagacagatgaagaatcaactaaactgcggcttgtctgattgacaggatactcaatatatctctaagatgctcttctttcctgagtgattaattaaggataattaatgaaaacaatgctaacaatttttactctggtgtaaaagccagcacacaagccaacattctctagcctcatttgcttgagtggtattgctcttatctacagcaaaagggaagtcttctggcttccttgaactggaagttctcctgtctgccatctgaagcacttagcacyctccaattctgtattggtgttttatatcatcagcaccagaaacaaatcttccattaaacctctatgtgagtgtgtcac

SEQ ID NO: 621730 - DNA, 533 bp, Homo sapiens
ataaattttggcgggagactcgtttcagcccataattctgacctattggtctccctcgtctatttggaaacagacatgtgaaaaaatcataatgagataataaatggtatagaatatatatatatatatatatatatatatatatatatatatatatatatatacatatggcaatattggaagacagatgaagaatcaactaaactgcggcttgtctgattgacaggatactcaatatatctctaagatgctcttctttcctgagtgattaattaaggataattaatgaaaacaatgctaacaatttttactctggtgtaaaagccagcacacaagccaacattctctagcctcatttgcttgagtggtattgctcttatctacagcaaaagggaagtcttctggcttccttgaactggaagttctcctgtctgccatctgaagcacttagcactctccaattctgtrttggtgttttatatcatcagcaccagaaacaaatcttccattaaacctctatgtgagtgtgtcac

SEQ ID NO: 621731 - DNA, 535 bp, Homo sapiens
tgtgcctatgtgttttcatctagacagacctattttaaaatcttgaaaaccgtcatttactaggtaccatattagttatttaatccctctttatttttaaaacagaagcaaaaatatgcccctcaaagtgtgctaggaaggttaatttggagaatgtttataaagtaatttattattggacattactttcaatgccccaaacagcaattacttttgcaccaacgtagtaaytcacactaaacactcaggaaatctttgttcttccccatcctaccctttaacacttcacagatccacaggacctcagcacctatccccacatacccaccccaattaattcttcgaaacataaattcaaaaactgagcagtcttctttctatcagtgaagtcctatgacaggaaaatggatgaagagaaacctagaaaaagaaaataaagcggggggggggggcaaaagaaaacaaacaaaaaacaacgtgggttctattactctggatccaaaacaaccaggcaattggatcagtttagccaagc

SEQ ID NO: 621732 - DNA, 535 bp, Homo sapiens
tgtgcctatgtgttttcatctagacagacctattttaaaatcttgaaaaccgtcatttactaggtaccatattagttatttaatccctctttatttttaaaacagaagcaaaaatatgcccctcaaagtgtgctaggaaggttaatttggagaatgtttataaagtaatttattattggacattactttcaatgccccaaacagcaattacttttgcaccaacgtagtaactcacactaaacactcaggaaatctttgttcttccccatcctaccctttaacacttcacagatccacaggacctcagcacctatccccacatacccaccccaattaattcttcgaaacataaattcaaaaactgagcagtcttctttctatcagtgaagtcctatgacaggaaaatggatgaagagaaacctagaaaaagaaaataaagyggggggggggggcaaaagaaaacaaacaaaaaacaacgtgggttctattactctggatccaaaacaaccaggcaattggatcagtttagccaagc

SEQ ID NO: 621733 - DNA, 490 bp, Homo sapiens
tgacaaaaattatatacatttatggtatacaccatgatgcttgacatatgcatacaatgagaagtgatttaaacaagctaattaatgtatccacatcaaatgcatatcatttttgtggtgagaatatttaaagtcgattttcttagcactttttgagtatacaatacattattattcactatagttaccatgctgtacaataaatctctagaacttactcatcctaagtaaaactgaatcctttgaccaacatcttcctattcccagccycacccctaccctcacccctagcaaccatcttttactctctacttgtacaagttcaatgttttaagattcctcatataagtaagatcatgcagtacttgcctttcagtgcctggcttatttcactaagcgtaatgtcctccaagttcatccacgttgttgcaaatgacagcatttccttcttgtttaaggctgaatagcattccattgcacatatatacca

SEQ ID NO: 621734 - DNA, 388 bp, Homo sapiens
ctcccaaagagctgggattacaggcatgggccaccgcgcccggctatatcctgtccttttctaagactaatttatgttgattggtatcctcaatgaacaaaagaccaaatcagtacatttaaaaaaaatcaataatcacaaatgataaactcaaataagcaacgtaaaataaaagtggtatcaaggtaaattttctactttttaaaaaataatraacacaaacaaaacggaaacaaaaacaaaaatatgctctgttgcaaataaaaatataggattcatgggttttcaaaaattaatgtaaaaaatatcttatgttttagaggaccacaagtttggaaggaaccgaagaagagatgctgcacaaatacaagcagaggggcctgattag

SEQ ID NO: 621735 - DNA, 600 bp, Homo sapiens
gtgaattcaaaaacaattgaaatcataccaactatactctcagaccacaatagaataaaaatggaagtcaataccaacaagtttccccaaaaccacacaattgtgtggatattaaacaactttctcttgaatgacttttgagtaaataaggcagaaattaaaaaaattctttgaaagaaataaaaacagagacacaacataccaaaatctgtgggatgcagcaaaaacagtgttaagaggaaagtttgtagtgctaaacaactaactcaaaaagttagaaagatctcaaatgaatgatctaatattacaactaaaggagttagaaaaacaagaaaaactaactacaagctagcagaagaaaagaaataaacaaaatcagagcagaactgaatggaagtgagaccccaaagtccatacaaagaatcaacgaaaccaacagctgtttctttgaaaggataaatgaaagcactagactagctggattaacaaagaaaaaaaagaagatctaaayaagcacagtcagcaactataaagatgacattacaatccatcccacagaaaaataaaagctctttagagacaattattaacaactttatg

SEQ ID NO: 621736 - DNA, 593 bp, Homo sapiens
aggcaagccccgcctatttaacatgaggccataggaccagcctccctggatccgaaagggccactcactccctccaaatgcactcagcctgcaggggatacaagggaccagggaaagagaaagacttgagggcctctgtctaaggggctggccatctgtgctaggacaagttgctgcttctgctccaggaagcccagataggactggactggacttagaccacttaccccagaagtccaaaaacccaatctctgcatgtctctgagtggtcagggggctgggattctaaagctgctggtcagtcccwaactccagcctaccctgatgggccaggtaagccaactcaccctcagtcatcttctgggacacatgaagcaaacaaaatagccctgtggttctgtcttcacttttcagacaattgcccacggctcaacaagagctagtgggttaatcccctaatttccagtaacctcaggccttcaggacagagtccatggcctcatttctgaatctgctttgtcattgtttgagcctgttactggcatgagacaacggtgggggagggggtatgtcacaggctcctgagtcaaagc

SEQ ID NO: 621737 - DNA, 534 bp, Homo sapiens
ctggggcaaatggaaaagccacctgccctttcccatctacaaagctgaggcacagggtgcaggcctgctacacctagcacgcgaggcactggtttggggaagtctggactagcagtagctcagccctgggagtcccatgaggaaactgctatgcaccgagaccgtgcgcacctcctcacagctgtgctgggctcagtcacagggactgtgagaataagggactgaatacatggacgcccccaccacaaggtcaagcatagtgacacactcactctccaaacccccacagccatcttcyttcccatctattctcctacccacacagcctgaaagggcttacagagaaaacacacagatccaagctgctgtttctgtacaagcttcaggtggggatctactgccaaggaataaaactgaagcttttcagtctgacacagcccttgctcctgggactccttgagccaacatgaactcaagtttagccatcagcatgatatacttttccatctccactaggtccctgcctagaacgtt

SEQ ID NO: 621738 - DNA, 598 bp, Homo sapiens
aagcttttcagtctgacacagcccttgctcctgggactccttgagccaacatgaactcaagtttagccatcagcatgatatacttttccatctccactaggtccctgcctagaacgttctacctccagctcccaccccacatgcccaaaccccacgtccactctcagtgcatgtccctggacctgcctgcagttcattagacacaatgccaggaacttaccccrgggcacctcatgttgcatcatataccctgggagtatcaggtcacctttgccctttacaccctcctgtttcctaatgaatgtttttgaatgcacaaatcaatgaacagtctttaaagaactgccaaaagctgtcctgttctgcactgaacatttcagtttacctaatcactgtctgtctaaataatgaatctccccagggctcaaaaatcaagcaagggctccaaggaatttggaaaaacagaacttaggggaccaagaggggaggtacaggacttggaaaggacaatgagcccagcaacaccgcagccaggagcaacgaggagccactggcctgagaccctgctaaggctgttcctgtccactgagcacaggta

SEQ ID NO: 621739 - DNA, 587 bp, Homo sapiens
aagaagctgctaaattgccataaaagagtgctatggtatttaaattgcccgcctaccatatcccactctccagagcaatatgactgtgaagacggcaacccataccctgagttcaggttgctaatgccacaaggaaaaacatgaaccttattctcaaagaactgtggttgtaggtttcaagcggcctgtctggtagctccctgaaggattggtgcaagggcttgcctttgttttgcccaactcasagcattcctgggactggagcaacttcccaagtagtggcttgctgaaagcatttgaaggcaaaagtgttggctgcagcagactagggcaatgaatgacactcagggcaagcaataaacagaccaaacctagggaagaagggcttgggaaaggagatgcctaggggaataagggattttaaaagctaccatctatgctgggggatcaaggagatgaggcacacgcccagggttggacacatgctctgaaaaggcctgagaagaccttaagcactcacctctggtgaattttcaggttttatgcaaataggaagtgaaggccgtgaaccccaaaaatctgagaca

SEQ ID NO: 621740 - DNA, 557 bp, Homo sapiens
tctacaattatagttggaattttcaatagcccattttcaataatggatagaacaattacacagaagaatattatcgaaataaaggtcttagatgacataaactaaacctaaccaacacatagaaaactctacccaccaacagcagaaatacacaagtacacacggaacattctccaggacataccatacaacaggctacaaaacaagtctcagtaaattgtaaaggactgaaatcatacaaagtatcttctcttaccacaatggaatgaggctagaaatcactaacaggaggaacactgttgcaaaatatgtgaaataagcaaatacatggaaattaagctacacactcataaacaatcaatgggtcaagaagaaattacaagggaaattttaaaatacttaagagatgaataaaaatggaaacagaacatagcaaaacctatgggatgcagagaaagcagcattcaaatggataggtatagctatamatgctagtattaaataaagaaaagagatccaaatcaataacttaactttacactttaggaagctagcaa

SEQ ID NO: 621741 - DNA, 628 bp, Homo sapiens
atctcattgggactggtcagaaagtgggtgcagcccacggagggcgagccaaagcaggatggggcatcgcctcacctgggaagtgcaaggggtggggggatttccctttcctagccaatggaagctgtgacagactgtaccgggaaaatcgggagactatgattctaaacactgcgcttttccaatggtcttagcaaatggtacaccaggagattatatcccatacctggctcagtgggtcccatgcccacagagccttgctcactgctagtccaagatggaactgcaaggtggcaagcctgcctgggggaggggcgtctgccattgttgaggtttgagtaggtaaacaaagcagcctggaagcttgaactgagtggagcccaccgcagctcaacgaggaccacctgcctctgtagactccacctctgggggcagggcatagctgaacaaaaggcagcagaaacttctgcagacttaaatgtccctgtctgacagctctgaagagagcagtggttctcccagcatggtgtttkaggtctgaaaagggacagactgcctcctcaagtgggtccctgacccctgtgtagcctaacttggagacacctcccagtagcagctgactgacacc

SEQ ID NO: 621742 - DNA, 594 bp, Homo sapiens
aaattaagcattatcttctaagaccttttttggatagtcaaatataagagataaatagtttaattttttcagaccttttttggatagtccaatattagagataaatagtttaattttttcagatataatgccagtcgatgtgatctgaattttagtactagtttacacgtataaatacagtcttaaacctttatgtctgagtctgaaatgaacctgttcacttagactagattttatagtaacaaaatgtgcttttaaatgtctatgaatgaaattcttattcatggtttttattctctccatgattttattayaattttgacactagacaagaaaaaaaaatattatttgtctttcctgccccctatctgtttgctgtgatagtgcaaagaagcacaggaaaatgtttaattatccatttttctgtgatttgtaattgaaaattgttctgtggggttctgaaagtattatctttcttaagtagtaaaaatgacagtggtaatgtagatgtttttataacatactatgtactttcattttagaccaaactagagtcagaacgaatactagcatcagtggggaagaaacctcccc

SEQ ID NO: 621743 - DNA, 465 bp, Homo sapiens
cctggtcccagggattgcatccaggcattccagttattataattgggcataacgaatggcaaaccagtgaagtagggaaagtcttgtcagtgagacatctgggccccccagctggcagtgatggccaccttggtcaaggctgtagatatccagttctggtgagacctaggatggtgcatggcaaacacccgtgacctcctagggtctcggtttgtgggaattcaagcagatgccctgtattgcatcgtggtccagcttggctaatagggacagccatgacctcctggtcttctgtatatgtgtctgtcattgcaggattctcttggcaccacgggagccatctccaatactctcaatgaaacacccctgggatgtatattttaaaagctggaataatttgggtgagatgagctaaaaaagraaaaaaacccttatcttcttttgtaacactgtttagcctgggaa

SEQ ID NO: 621744 - DNA, 616 bp, Homo sapiens
catactcctgctctaaaactgtcaactttcacaaaaacacaacttccacatggaatttcatatatctattccaaatttatatattctaaacatatatatcctgaatatatatatatagctacaaaaaaaatgctttgcttattcattgtaacaaattcagaattgtgattatacagatgtgtaaccaaaaaaataaatgtctcactcatcagaggtaattactgttaacatttgatatgttatattccaggcatttttctaggtgtgagtatgtgtgtattctaggtatgtaggtatatgtctatatacatacatgtcacaaacatttttacaaaaataggaccatagctcacatacygttctgcaatttagtttagggttttcttttaaccatatattacttcctggatatctttttatggcagcacatgcagatctacttcattcattcaaaaagtggtatagtattggaccatcatttaagtctttcaaaaggatactgattacataagtaataatatacaattggctatccatttccatgggttccacatccactgatttaaccaaccacaaatggaaaatattttaaaaataagagtacaacaataaaagt

SEQ ID NO: 621745 - DNA, 575 bp, Homo sapiens
tggtagatcgtgcagacctttgtggactgtggtgaggtttttggcaggggagcaatactgcatgatagatttaaagttccttctgtctgctgtggggggctgggggattggggggagcaggcaggatgggagcaggaagccaggtcattgcattgatccaggggaggggtgagcagaggtgggaatgtgctttttcttcttttcttttctttttttgagacggagtcttgctctgttgcccaggctggagtgcagtggtgtgatctcggctcactgcaagcttcgcctcccaggttcaagccattctctcgccttagcctcccgagtagctgggactacaggcgcccgccaccacgcctggctaattttgtttttgtatttttagtagagacagggtttcaccgtgtyagccaggatggtctgatctcctgacctcgtgatctgcccgcctatgtagagacagggtctcactatgttgcccagtttggtctcaaactcccagggctcaggtgatcctcctgcctgcgcctcctattgctgggattacaggcatgagccactgtgcccagctggaa

SEQ ID NO: 621746 - DNA, 455 bp, Homo sapiens
ccaggctggtcttgaattcctgggctcaagcaatcttcctaccttggcttcccaaagtactggattacaggcgtgtgattctgaggtccagggagactcggggctgggttgagtccagggaatctctgggggagaactgcctgagagtggaattgccctttccatccccagtaacacctcatatcctgctcactgccccacctgaggctccctgaaggaagacgatcaagaacaagcctcccattttacagatgggaaaactgagccccatagaggcaaagcrgttttcccagggtcccagcttggtgctgtgtgatggagatagctctaactgtagctgtcagttggggctggggtaggggaaagtcactgtctagtccaagggagcagtaaagatgacatgctgattttcattcttcctttaaagaaaaaattgatgttaaaagtaactgtgg

SEQ ID NO: 621747 - DNA, 465 bp, Homo sapiens
cactacacctggctaatttttgtatttttcagtagagacggggtttcaccatgttagtcaggctggtctcaaactcctgacctcagttgatccacctgccttggccttacaaaatgctaggattagcgtgagccaccgcgcccagccttatttattttaagtaatacactttgtagtagcaatatcactaattcatgatagttacatttaataaagggataagctttttcataatttttcaacttcgttctatcttttttttttttttttttttttttgagatggagtctcgctctgtcacccaggctgkagggcaatggggtgatcttggcttactgcaaactccgcctcccggattcaagcgattcttgtgcctcagcctcctgagtagctgggattacaggcatgcaccaccatgcctggctaatttttgtacttttagtagagacagggtttcaccatgtt

SEQ ID NO: 621748 - DNA, 535 bp, Homo sapiens
ctctaaagttttatccaaaaatttkcactagccgactttcttgtgaatatgtaatttttattcaccaagtggtatgataaaaatgatagtgcttataagtacaaactatgaataataaaaaatgttcttacttataaagtgaattccaagattacttttgtaaatatatcttagaatgtgattgtgagtgtgggagggtctatggctccaatgtattgatgatgaagggcatgtgtctgagaaattaaagtgatgatttccaaggaatcttttcagagatcaaatctttcctctgtgtattagatcattcctgcactgctataaaaaaatacctgagactgggtaatttataagaacagaagtttaattggctcatgtttctgcaggctgtctaggaagcatagtggcatctgcttctggggagtcctcaggaagcttgcaatcatggcagaaggcaaagggggagcaggcctatcacatggagcaagcaggagaaagagggaagagagtcggggaaggaggtgccacgcacttt

SEQ ID NO: 621749 - DNA, 503 bp, Homo sapiens
acttcaaaaatatgagtaactaggaaagaaaggaaaaccttgttaactacggatagtttgctgagtcagcatgatgagacaaataaaaaagaacactttgagtcaggttcactacttattatgaccttggacaagtgcctttccctttactgtacctcagttttcttgcctgttagaacagggagttggattatatgattgtaagatcacctctagttcttaagttcagtggttataaatgattcgagcttcatcaggttttatttgtaggggaagaaaaatttctttagctcagaaaaagattatgtaataaccacaatcaaatatataacatctatgctaactgaataatggatagagaacactggatctacagccagaggcatttggtctgagtcatgtctgaccccagagagcagaattattgagatcagtgatggataaggtagagccttctaaagagactctgactttctttttatawaaatgctggcaataggtca

SEQ ID NO: 621750 - DNA, 629 bp, Homo sapiens
tggtgcttacagacatgtggaagacatgcacaggatgtgggaaaatcctggatgccgtggaaaccaatcagagggacacttaccccgtttagggatgcagtgaatgggggcatacccctgaagaagtgacatgtgttctaagatctgaaggttgagcaggaactaggcaagtaaggagagggatgataatgtactaggctaagggacccatatgtgcaagtgcttggaggcaaaagtgcttgtcccctcatcccttctaaggagctgaaaataattccaaaaagccagagcagagagatatgaatgaggtatgaccttcagattctcttcaacaaattattagaacaagaaaaaaattgttctattagtatagtaggtatattaggaagcaaatattagtatacctggtgcctacctagtgcttgggactaacagatattcaatgaataaatgttttccagcttatcagctgactgagtggctactcaatactatgtaaggagcttcagattttgatttctgccttccaatatcttttggttttatttgggrgcaggtggaaattgaaaaacaacaaaagggttttaaaaatcaaaaaagaactcaacagaagagcaggcaaaggttta

SEQ ID NO: 621751 - DNA, 567 bp, Homo sapiens
atgaatattttattagtttggtatcatttttcttttcatcagcctagcttgggcctcctctattatacattgcttccatctaggaaaagcatgtgttgtagcagaaagagttcagaccctggcagcagatagtcctggggtcatattctggttctgtcacttactagccaggtttccttggataagttaatgtttgagcttcatttccttctttttatttcttcataaaatcagaatcattatcaccataatatctactttttacattattaagattgttagataattgcacaataaaagaaggctgttattatttttacattattgaacttttttgaggttgagcaaaatactgtaagtaaagctctcagaacaawgcttaagacatagtaggtgttcaacaaatatttttcacttctctttgaaacaaactctacattaaagcctatattaaaccctgtattaaataataacaccacattacatttgtatacttttttacaatttacagaatgagtttgatacatagataattgccttctacatgaggactgaaatataaatata

SEQ ID NO: 621752 - DNA, 551 bp, Homo sapiens
tattatctctattttgaaaactaggtattaagcttkaataaaatagccttttttacattgttccatccagcccgtcgcaaagaaggagtaattgatttcctacttgcagatggtgacttggagtatttgcttcctgaggggttattaaatagatagaaagggggtatgtaattttgggaaagaagaacattaaaacctggcttcagatatagaatacctcacataactaaaaatattttgacaattttaatatgttgatacattcttaaagctacacactaccctctcagactcctagaaaggttcagcttccaagaatatggtttacaaaagtatttaaatagaataggaaatatattacagccccctacctcacatatctcattttcttcatgatgtctactgtgatgttggcaaatacttggcttccaaaataatacccaatcccaccatcaccctttagatgagaggctcccagctgagaaggaagcagagcaactttgcttccctcccacaccaggtgacatctggcaatgtctggagatattttc

SEQ ID NO: 621753 - DNA, 515 bp, Homo sapiens
gcctctagaactgcgaggcaacaaatttttgtcatataagccccctctgctcccttgtttttggtactttgttaaggcagtcccagaaaatgaacacaatgtaattcaccatcttaataaaggagagaaaaaccataagatcttctcaacaggagttgaaaaaacaacccataaaatgcagttactgatgacgatgatgatgatgatgatgatgttgatgaagtaacctttagcaaactgggaagagaagggaatttcyttaacttgataaaggatacacacacacacacacacacacacacacacacacacacacacccttatagcgaacactatgctccatgaatgtgggccccaaaaggctgctgcagggagctcgttagcagcaatgacaagagcagctgggagggcagccttggcctcatgggtccccatcttgtgtttgtgcatctaattggcaaaatctcatttgccttgagaaactcagccacaaagcagtctggaaatgtttaaaa

SEQ ID NO: 621754 - DNA, 515 bp, Homo sapiens
gcctctagaactgcgaggcaacaaatttttgtcatataagccccctctgctcccttgtttttggtactttgttaaggcagtcccagaaaatgaacacaatgtaattcaccatcttaataaaggagagaaaaaccataagatcttctcaacaggagttgaaaaaacaacccataaaatgcagttactgatgacgatgatgatgatgatgatgatgttgatgaagtaacctttagcaaactgggaagagaagggaatttccttaacttgataaaggatacacacacacacacacacacacacacacacacacacacacaccyttatagcgaacactatgctccatgaatgtgggccccaaaaggctgctgcagggagctcgttagcagcaatgacaagagcagctgggagggcagccttggcctcatgggtccccatcttgtgtttgtgcatctaattggcaaaatctcatttgccttgagaaactcagccacaaagcagtctggaaatgtttaaaa

SEQ ID NO: 621755 - DNA, 515 bp, Homo sapiens
gcctctagaactgcgaggcaacaaatttttgtcatataagccccctctgctcccttgtttttggtactttgttaaggcagtcccagaaaatgaacacaatgtaattcaccatcttaataaaggagagaaaaaccataagatcttctcaacaggagttgaaaaaacaacccataaaatgcagttactgatgacgatgatgatgatgatgatgatgttgatgaagtaacctttagcaaactgggaagagaagggaatttccttaacttgataaaggatacacacacacacacacacacacacacacacacacacacacacccttatagcgaacactatgctccatgaatgtgggccccaaaaggctgctgcagggagctcgttagcagcaatgacaagagcagctgggagggcagcyttggcctcatgggtccccatcttgtgtttgtgcatctaattggcaaaatctcatttgccttgagaaactcagccacaaagcagtctggaaatgtttaaaa

SEQ ID NO: 621756 - DNA, 515 bp, Homo sapiens
gcctctagaactgcgaggcaacaaatttttgtcatataagccccctctgctcccttgtttttggtactttgttaaggcagtcccagaaaatgaacacaatgtaattcaccatcttaataaaggagagaaaaaccataagatcttctcaacaggagttgaaaaaacaacccataaaatgcagttactgatgacgatgatgatgatgatgatgatgttgatgaagtaacctttagcaaactgggaagagaagggaatttccttaacttgataaaggatacacacacacacacacacacacacacacacacacacacacacccttatagcgaacactatgctccatgaatgtgggccccaaaaggctgctgcagggagctcgttagcagcaatgacaagagcagctgggagggcagccttggcytcatgggtccccatcttgtgtttgtgcatctaattggcaaaatctcatttgccttgagaaactcagccacaaagcagtctggaaatgtttaaaa

SEQ ID NO: 621757 - DNA, 502 bp, Homo sapiens
accctggagctaggggccatggctatatgccaacaggattagaaatatcttaatgtatttaattaacctacacaaccatattggtgggtgcctactgaatattagccctagatatggacctgaaatggccttattctcttktagtttgtttaagccaatggagccttactagaatgtgagctacaaaacagtagagctattctctattcaatgctgcatctgtagggcctagaacagcacctgaaggactggcggaggcttaataaattgttaaaagggcagactagccaggtgtgatggcgtgtgcctgtagtcccagctacttgggaggctgaggcaggaggatcacttgatcccaggatttctgggctgtagtgtagtataccagtcaggtgtctgcactaagttctgcatcaacctggttgcctaaggatggttgaactgacccaggtggaaattggagcaggtcaaaactcaatgctgatcagtaacagggtcgcac

SEQ ID NO: 621758 - DNA, 540 bp, Homo sapiens
tctaatttattctttagtgccgctatttcaytttcttcaataccactagacaagcagtccccaacctttttggcatcagggaccggtttcgtggaagacaatttttccatggacgaagcggggtggagggatggtttccggatgaaactgttccacttcagatcgtcaagcattagattctcacgaggagcgtgcaacctagatccctcccatgcacagttcacaatatggttcgcgctcctatgagaatctaatgccgtgctcatctgacaggaggcggagctcaggcggtaatgattgctggccccactgcccacatcctgctatgtggcccggagcctaacaggccacaggctggtgctggcctgtggccgggtgttggagacccttgagctaggctggtcctaaattccacaagggcaggagccacctctcttttttctttaccattttactcccagagcctagcacagcacgtggcgcctggcgatagcaggcactcaatgaatcgttgttgaatgaaattaatgaatggttaaa

SEQ ID NO: 621759 - DNA, 540 bp, Homo sapiens
tctaatttattctttagtgccgctatttcactttcttcaataccactagacaagcagtccccaacctttttggcatcagggaccggtttcgtggaagacaatttttccatggacgaagcggggtggagggatggtttccggatgaaactgttccacttcagatcgtcaagcattagattctcaygaggagcgtgcaacctagatccctcccatgcacagttcacaatatggttcgcgctcctatgagaatctaatgccgtgctcatctgacaggaggcggagctcaggcggtaatgattgctggccccactgcccacatcctgctatgtggcccggagcctaacaggccacaggctggtgctggcctgtggccgggtgttggagacccttgagctaggctggtcctaaattccacaagggcaggagccacctctcttttttctttaccattttactcccagagcctagcacagcacgtggcgcctggcgatagcaggcactcaatgaatcgttgttgaatgaaattaatgaatggttaaa

SEQ ID NO: 621760 - DNA, 639 bp, Homo sapiens
agagtgattcctaatgcaaacaatgcaatttagttaataataatgtattagctcatcatttgtaacaaatgtaaatgttaataataggggaaactgggaaatgatggtgaaggactatataggaactgtctgtaccttctactcaatttttttaaaactcttaaactgctcaaaaaattatgtttaaaaactgaaggatggcataagggttcatgagaataaataaacccaggctagcagcattgctgttgtttggtttgtgtgcttgcttagaatatttgtgttatttagtaagagatggattttaaaaataataataaacaaaacaggcaaataaataatgaagttaatttggcaccaggaaatacaaatatgaaaaaatgtggagagtttctctcatatttattttgcatgtctttggggctagatagatgttattcaataaatacacattaaatacattactcaggtraaaggcatataaataaattaacataaatgaatattattattcataagatcaagtagcccaaagtagcaactatttgttgatctaaaaccattttcaatagttataatttatatacccaacatgaggttctaaaactgaattagcttctgagtttgtgaatataggaa

SEQ ID NO: 621761 - DNA, 583 bp, Homo sapiens
ggatgtcacagtggaaatgggaggatttatgccactggacttgaagtttcctagggtagaattgttggtgtgttgtggcaaacaagccccaaagtgacctcaaatgatccctgcctcctggtgttcacccctttgtataataccctcccctagaatgtaggcaggatctgtgaatttctgtgacttgtttctaaccaacagaatatgacaaaagttatgagatgttactcctgtgataatgttactatatgtatctatataaactctgtgttgctagtagacgagctagtcagactctctttcactggctttgtagaaataagcagccatgaagtaagtggccatgttggagaagcccatgtagcaaggaactgtgggtggcctgtaggagctaagcatggcctgcagcaaaaaactgagacctcaatcttgtaaccataargaattgaattctgccagcaacctaagggagattgggagcatacctttccacagccaagcttttgatgagaacatagccctggaagataactagatcacagtctggtgacaccttgaagcagaggactcagctaagctgtgc

SEQ ID NO: 621762 - DNA, 653 bp, Homo sapiens
aatggtgttattgagttattctgtatccttgctgatcttctgtctagttgttccatcaattgttaagacagggtattgaatctccaactataattctatatttgtctatttctcctttcagttctatcarttttactttacaaaccagctctgttggtttgtccaaaaacatttaggattgctatgtcttctaggtggattgaccaagaaagactattacataatgtaatagccactcctgctttcttttgattaacacttgcatggaatatcttttgccatccttttatgttcatcctacctatatcattataattaaagtgaatttcttatagatagcatttagttaagtcatgtttttaaaaaattaactctgccaatttttgtctttcaatttgtgcatttataccatttgtatttaatgtaattattgataggttaggacctaagtctatgaatttatttttaacatctatttttctgttgttccgtttttcagttctctagttttcttccttgtaggttacttgaacatttttagctcagtttagtttttattttaactctttgtatagcattttagcaatttttttttgtattccactttacacacataacttatcacattctactggtgtcaacatttttccatt

SEQ ID NO: 621763 - DNA, 526 bp, Homo sapiens
cccaatcctctgtgtcttttggttgtcttcctacctctttgattgttccccttcattcgtctttcttagcttctcactcacaccctaaaagtaggcatttctcaaggttatatccttagccaacttcctttttttgctatatgcttttcatgggctcttttattcattctcatgctctcagctgtcatctatatattatctgtatatattatcacacacatatatatgtgtgtgtgtgcatatatatatatctccatatatatcacctgtcacctattatctttatataggataatatatacagataatacccaaattaacatttgaagctctggttctcaatgggggtgcttttgcccacaggagacatttggcaatgtctggggacatttttggttgtcacaactgggaaggattctgccactggcatccagtgggtakaggccggggatgctgctaaacaccttgcaacatgcagaacagctttccataacaaagaatcatccagcccaaaatgccaatagcg

SEQ ID NO: 621764 - DNA, 601 bp, Homo sapiens
accatggtagtcccagtatctatcacagtttctggcatatagtgggtgcttgatgaaggctgttgaatgaataaatgaaaaaaaaatcccttctatgaagccttccccatttctcccagtcagaacaaattgctctttccatgtttcatagcactttttttaacagacttctattctaggctgcctcatgttataactagttgtgtactggctgtcttccctcacacagtttcatgcttccaggaggcaagaaatttaccttatttatctttgtactttccccaggacctaccktctttcttatatgtacaaagtagacctcaacgaatttaattgaatttccctgccctctagccccactgtcacacagttaatgatcaataatgattggttcacgatttgtaaataaaaaacttaactgtgctagggaaatagctatttaaaggaataagttagtgactggggaaagcaaacaataagaaagaataatgagtaatgtgaataattatcttctagtttatctagtttgtaagtccaagatttcataaactgggttttgggatttttttctgcaagtataagaatagccagccctgtgatc

SEQ ID NO: 621765 - DNA, 601 bp, Homo sapiens
accatggtagtcccagtatctatcacagtttctggcatatagtgggtgcttgatgaaggctgttgaatgaataaatgaaaaaaaaatcccttctatgaagccttccccatttctcccagtcagaacaaattgctctttccatgtttcatagcactttttttaacagacttctattctaggctgcctcatgttataactagttgtgtactggctgtcttccctcacacagtttcatgcttccaggaggcaagaaatttaccttatttatctttgtactttccccaggacctaccttctttcttatatgtacaaagtagacctcaacgaatttaattgaatttccctgccctctagccccactgtcacacagttaatgatcaataatgattggttcacgatttgtaaataaaaaacttaaytgtgctagggaaatagctatttaaaggaataagttagtgactggggaaagcaaacaataagaaagaataatgagtaatgtgaataattatcttctagtttatctagtttgtaagtccaagatttcataaactgggttttgggatttttttctgcaagtataagaatagccagccctgtgatc

SEQ ID NO: 621766 - DNA, 564 bp, Homo sapiens
ttttacagtccacttggctgagatggacttttcctttcagtggaacaactatgaaatactgccttatcaacaatccatttcaaaaaggatggaacttggatatgtgtgccctctcagttgtcccacaaactaaaatttgtgcttargaattcttcaccctgaagcatccacattgatttccttaacctcctatctctagtccagctactactggagtgaacaattcaccatgtagggtttatacaaaggcccactccccactgcttcttaaagccccctgccctattcttgacgcccattgcaggcatccatttccactatagactttcaattatttggttccccccacatcatcatgggcatccaaaaaccagatttcagcctcctggcaggcagcctttccccacatttctcccataaacattggttcaaaatgcagttctttggcataggttcctcaaaatgcaaatttccctggcagaataacacttctaaacacagtaagtctgaatacctaagtgtcagtgagtctgggagttcttaccaagtgtcagaaagctagga

SEQ ID NO: 621767 - DNA, 603 bp, Homo sapiens
aatatactcagagcattataaaatttgctctgaaaatgttgagggaaagtgaggactttcttaaagaaaactggtcttaccaagtcaacatcatcttttaggtatcaactgaataataagctccttaaaacagctgcagacagtggaggaaacaaagggaaggccagacagaataatcagggaataaatcagtaattgtttgaaagtgtgaactgaagacctagtaggtccccagtttgtggaaagaacaaaatggatgcaaattctgcaatctcatttgaaagacaaaacgtgtacattggagacaggtacataacaatataaggaaagatatgattttgttacaggaaaagyggtacagagaataatgctgtagaattataaaagaggacaaataaaggatggaggaggcttttcttgtaattagtagaaaactattttagataaaacttgaactgccaaaggaacatcagagcttagctgttgcttctcagtcctcacaaaaaaagagaggcttgcattagtcctactgacaatctagctccaaattcaagttagggaaggcttcctgatggacttgagatcaactgaatttagatctgt

SEQ ID NO: 621768 - DNA, 597 bp, Homo sapiens
aaacgtgtacattggagacaggtacataacaatataaggaaagatatgattttgttacaggaaaagtggtacagagaataatgctgtagaattataaaagaggacaaataaaggatggaggaggcttttcttgtaattagtagaaaactattttagataaaacttgaactgccaaaggaacatcagagcttagctgttgcttctcagtcctcacaaaaaaagagaggcttgcattagtcctactgacaatctagctccaaattcaagttagggaaggcttcctgatggacttgagatcaactgaatttagatctgtggagaggagaaagcattccactactagggagcaagcaacatacacaaatacctggaagcagcaagaaccctattcagctgatatcaaagagctttgagagaaaggcagagggatttggaccttattatgtatagcaggatattaattaatgttcttgaktaggagagtaacataatgaaagtactgtttttaagatatatattgtgacagtgtaaaggatagattggaagggaacaatacagaatgcagaaaggttacttgggctgttgcagaaatcaagg

SEQ ID NO: 621769 - DNA, 602 bp, Homo sapiens
atggcagattatagcagctcttgaaactacgtttcccataactgtggctgatggaatacaacagaagaggatattttcaactcagcccttttttggggccttcaaaaattggctcgatgttttaataataaacattcgagagcattagattcgaaatgtcaatgtgctaaatttaaagagatacaaacacttgggttcactaatactaactgttctcatccccttattctaacactggtttctcttccaggcttcaatagagcatttctttcaacacaccttaagtcttcatacctatcatcagaagcccttctgatgtaataggttctgtttttttctctggggacctyatgagtcctagcactatgagtgtctacagtaagcacaaattcttgcacagacataaatttgattttctatttatagtctttgtttcttttcccagtgatctttgatctgttactcatgggaaggaaagagtctgtgcttgcatggactaatccacacaaatcaaaagtaccctaacctctggtagtaaagtccttctgggcttggactatttatatgtaaattatgcttccaaatttggggcaaaacactaa

SEQ ID NO: 621770 - DNA, 500 bp, Homo sapiens
tcatgacctctggtccgttttcctttcaaaaggatgagtgccctatgcagaataaggaaaaagtcagaacaacaaggatggctatcttaacaatgcatcttaacatcagagtcatatatcccctttaattactgctgtttccttctcttctggttaaaggggaatgttaagagaaagatccacaattcaattcaacaagtatttctgagtacttagcatgtacctctctgacttttttcatartaagttcttgcctgttgccataatttttcatagaaaagtggtagatacttcattgatattagtaattgtaggatttcctgagttttcagtcaatgattattttaatctttcccgacatctgagctaacaatatctgactaatcactatctcatatatatattctacatataaattgtatataaatatataatttccagtgtgcatagaattggcatcaatttcatttacacttgtctctagcaagaatattagtaac

SEQ ID NO: 621771 - DNA, 500 bp, Homo sapiens
tcatgacctctggtccgttttcctttcaaaaggatgagtgccctatgcagaataaggaaaaagtcagaacaacaaggatggctatcttaacaatgcatcttaacatcagagtcatatatcccctttaattactgctgtttccttctcttctggttaaaggggaatgttaagagaaagatccacaattcaattcaacaagtatttctgagtacttagcatgtacctctctgacttttttcatagtaagttcttgcctsttgccataatttttcatagaaaagtggtagatacttcattgatattagtaattgtaggatttcctgagttttcagtcaatgattattttaatctttcccgacatctgagctaacaatatctgactaatcactatctcatatatatattctacatataaattgtatataaatatataatttccagtgtgcatagaattggcatcaatttcatttacacttgtctctagcaagaatattagtaac

SEQ ID NO: 621772 - DNA, 500 bp, Homo sapiens
tcatgacctctggtccgttttcctttcaaaaggatgagtgccctatgcagaataaggaaaaagtcagaacaacaaggatggctatcttaacaatgcatcttaacatcagagtcatatatcccctttaattactgctgtttccttctcttctggttaaaggggaatgttaagagaaagatccacaattcaattcaacaagtatttctgagtacttagcatgtacctctctgacttttttcatagtaagttcttgcctgttgccataatttttcatagaaaagtggtagatacttcattgatattagtaattgtaggatttcctgagttttcagtcaatgattattttaatctttcccgacatctgagctamcaatatctgactaatcactatctcatatatatattctacatataaattgtatataaatatataatttccagtgtgcatagaattggcatcaatttcatttacacttgtctctagcaagaatattagtaac

SEQ ID NO: 621773 - DNA, 500 bp, Homo sapiens
tcatgacctctggtccgttttcctttcaaaaggatgagtgccctatgcagaataaggaaaaagtcagaacaacaaggatggctatcttaacaatgcatcttaacatcagagtcatatatcccctttaattactgctgtttccttctcttctggttaaaggggaatgttaagagaaagatccacaattcaattcaacaagtatttctgagtacttagcatgtacctctctgacttttttcatagtaagttcttgcctgttgccataatttttcatagaaaagtggtagatacttcattgatattagtaattgtaggatttcctgagttttcagtcaatgattattttaatctttcccgacatctgagctaacaatatctgactaatcactatctcatatatatattctacatataaattgtatrtaaatatataatttccagtgtgcatagaattggcatcaatttcatttacacttgtctctagcaagaatattagtaac

SEQ ID NO: 621774 - DNA, 554 bp, Homo sapiens
atcaatgtatgagagttcacaaagttttgtattaactttattccaactgctgaagaaattgctggagaaacytaagtcctgaaagaagctcttttcacttggagtctctcctaggtagatttttcaagtagatagaggcattaattcaatatctacatagagtttttttcccattcatagaggactagagaagtgccattaaatttcaaagccccatttttttattttttcacttagagaagaaaactattttgtgttgccttcctccctgccacccctcttgattagagttgttctgaatctgagaacactgacaactatattttcctaggatggccttgtaacttgagattgcagcataacaaacatggcagacacaatttctgatgcatggatttatatccataagacgaattggagggaacaaggctattctgtttatgcattgacattgcaacatctgctactattaagagacctgagctctgatatcaagtttggctaccctgacaaggtctccaagatcctaaggctcctcacagttgatgatatct

SEQ ID NO: 621775 - DNA, 478 bp, Homo sapiens
gaggcattaattcaatatctacatagagtttttttcccattcatagaggactagagaagtgccattaaatttcaaagccccatttttttattttttcacttagagaagaaaactattttgtgttgccttcctccctgccacccctcttgattagagttgttctgaatctgagaacactgacaactatattttcctaggatggccttgtaacttgagattgcagcataacaaacatggcagacacaatttctgatgcatggatttatatccataagacgaattggagggaacaaggctattctgtttatgcaytgacattgcaacatctgctactattaagagacctgagctctgatatcaagtttggctaccctgacaaggtctccaagatcctaaggctcctcacagttgatgatatcttctatagtcaactctccatctctaggtgaaatgaagacagatttaggtatttaatcca

SEQ ID NO: 621776 - DNA, 509 bp, Homo sapiens
gggagttctaggtcagaaagcagatagaagcccttaacctggttcactgttgggacaccttcaactgtgactcatagtaggcatctgatcttctgagtcaccactattaagggatactggtcatccagtgctcattgtgagctcctgatagctatgcagactttacagactctcggaagaacaagagaatctattttgaagctcaccactccctacctcaygccctccatgcattattgagtccatttgtggctgtgtgtatacttatgcacactcatatggatttgcccctgctgatgtatgtgtgtttctcttcctactagtatgagttagtgtttctgtgtaggagtctagcattatgtcttttagtcaagtcctgtgaggggcattctcggataattaatagagtaatttgtttagaaagcacttcccacccccagatgtccctaagcagactgggctgatcacaaaaaatgaatgaataaataaataaatcagaactatctggg

SEQ ID NO: 621777 - DNA, 595 bp, Homo sapiens
ctcatagtaggcatctgatcttctgagtcaccactattaagggatactggtcatccagtgctcattgtgagctcctgatagctatgcagactttacagactctcggaagaacaagagaatctattttgaagctcaccactccctacctcacgccctccatgcattattgagtccatttgtggctgtgtgtatacttatgcacactcatatggatttgcccctgctgatgtatgtgtgtttctcttcctactagtatgagttagtgtttctgtgtaggagtctagcattatgtcttttagtcaagtcctgtgaggggcattctcggataattaatagagtaatttgtttagaaagcacttcccacccccagatgtccctaagcagactgggctgatcacaaaaaatgaatgaataaataaataaatcagaactatctggggagctcccagaagatcaaatagccctatttcagatcagccatttgggatccaggaaatggtattgggrccagagcctgcaagatggaagtactgggtatgagatggaaaaaaaaaagagaaaggagctttaataaaaggttaaaagtattcccacc

SEQ ID NO: 621778 - DNA, 561 bp, Homo sapiens
cacacacctaataagtgatgaagctgtgtttcaaattcggatttatctgagtccaaatctacactcctttttgctgtactatattggttttgcataaatatatgtgcttggatatattaatataagaatcctcagtgtatttcttccaatagtgactggcytttaggagccaattgatagaaaaatgaatccaggaacatttgagaatacctttttcattgtcctctccagatgtgttttccccaattcaatttcactttataaatatccatcaagtgctaattatgggtaagttgtggcactttgggcactgtgcctgacagatataacttggctatgacacatatttgtgatttacccagagagttttatgctgaggtttgccttcctggcctgctcagttttgaaataatctctattcctgggcccagggtctatccccgcagtgttaaattaagtaggaggctactttatggcaacagacctaagcgatattaatagcttgttttttctgttatgccttggcttcccttgatgaatcaagtgccaaattttcatatc

SEQ ID NO: 621779 - DNA, 627 bp, Homo sapiens
aagtaataggaacagagagataagtatgcctttagggtgaggttttatgtttatctggctaggaactaagctctgtttaatgttttttgtagatataggtgaacttcagtttcctctagtgtccttatttttatcttctctgatatctttgggtttgcctagcaactacttcttaaatagagtctgcaagtttttttcagctacaattcactataattataaaggaaccctattaatgtggttagatgtggaggaaagtgaagcctcctataatcttattattaggtattatcttttagtgagcctgtgttttttaaccaatatgataatctttcttttttgattgaattgtttaatccataaacattgaatattattattgataaattggacttacatctgtcattttgcttttggttttctatatatctcatgtcttttctgttcctctgtttyctttttaatgctttgttttgcactaagtgaatatgcctcgtgtaacagtttaattcctttaattattttttcactatattttttgagttatatccttagtgatttctctagggcttaccatatacatcttaacttatcagaatctaattcatatttatactagctgaattc

SEQ ID NO: 621780 - DNA, 627 bp, Homo sapiens
aagtaataggaacagagagataagtatgcctttagggtgaggttttatgtttatctggctaggaactaagctctgtttaatgttttttgtagatataggtgaacttcagtttcctctagtgtccttatttttatcttctctgatatctttgggtttgcctagcaactacttcttaaatagagtctgcaagtttttttcagctacaattcactataattataaaggaaccctattaatgtggttagatgtggaggaaagtgaagcctcctataatcttattattaggtattatcttttagtgagcctgtgttttttaaccaatatgataatctttcttttttgattgaattgtttaatccataaacattgaatattattattgataaattggacttacatctgtcattttgcttttggttttctatatatctcatgtcttttctgttcctctgtttcctttttaatgctttgttttgcactaagtgaatatgcctcgtgtaacagtttaattcctttaattattttttcactatattttttgagwtatatccttagtgatttctctagggcttaccatatacatcttaacttatcagaatctaattcatatttatactagctgaattc

SEQ ID NO: 621781 - DNA, 572 bp, Homo sapiens
tagtgatttctctagggcttaccatatacatcttaacttatcagaatctaattcatatttatactagctgaattctagtatgatataaaaatattattcctatacagctctatctgcccctgttctgtgctattattgttatatatatgtagatagataatacctatatatattttaaaaccaacaatgcagtgttttaattattacattatataaatgtatgtatttgaaagaagctgagagaagaaaggacaagtattttttaaacagtttagtagccttcttaattagctatttgagttctttttgtttcttcttttgtattcgtattaccatatggtgtcattttcttactccaaatcagcttttttcctacctgcaagctttgtccttttattatcaaacggattacattctatwtaagtccaaaatacaattacatgcatacatcttttatgtgattgacttttaaattggctatactgttatttataattacctgcacaattacctttatcagtgcttattttttcttgtggatttgaatttctatctggtatcacctgttttca

SEQ ID NO: 621782 - DNA, 604 bp, Homo sapiens
attaagctttattgtttaggccctgtttccaattaaaagacagttcttctcccccacaggacaaatttgcccactgttttgctttttttktgtgtgtgtgtgattcaagactggctgtcccccagattgcagctgataacccttctcttcccagtagccactactgcctcttcccagaaattttaaacagggagcagcacatatggattagggcacaatctcagagtcaatgaaatggtggctcagagatctttccaggaccagtgggaatcccatgtgtcattgatgggaaaataagcatcccttgtcatctacaagtctatgagtgtttgctgccacctctagccctccaatgcaacatgctcatcctattcttatttatttcctactcctcttcctcctccctttccaggcctatcagactgagttataataccactgatctcttccttccctcccacccctctctctttctctcttattgcatttgtacttttatggtcagcccttctggatatgctatcaagagttgagcagcacaaaatccagatggtaacagtcagccttgctctaagccctggctggtaggtgttagaatttgatt

SEQ ID NO: 621783 - DNA, 435 bp, Homo sapiens
aagtgttgtacaaagaaaaggtactatccctctcaaatggcaccagtgaactttacattcagcactaaggctaaaggatgatacattttaatcccaggctggcttcccgctgccccagtctatttctggttaccttccccatcatccaggtaggcaacactcccaagaaaggcactgtccaaaagaaaaagaattaggaggcaaaccttctggggaaaaatcatacctcttttccaaaccraacaaatgatttgggaattcgctgcgtcattgttcccatctaacactacagagaattaagagttgatgataaactcaaaagcagtgacactcttgctattaactaccaattagtcagacacccctacctaacagggaaggacccttcgccaactcagtaatggaggtgatccatcctccattatgtttcattat

SEQ ID NO: 621784 - DNA, 423 bp, Homo sapiens
tgcaacactttaaactgtgaatggagggaarggaaaagtagccaaccaaaaactgtaaaatgagctggtacaggggacattacatacgacaaaataagaagagtaaaggaagcatttaataattttaacagagcagaacaagttgggaaaagggcagagataatggatgttgattcagttgtacagaattggagccgttaaattttggaaattaagtctttagcagaaaggagtaaataggactgcctaggtattatgaagacttagtatggagaagtatatggatagaggtgagaaggttaggataaaaaaaccaaaagccatttttgagaactgtactttaggccacctggccagaaaggggaaaggaacaatatattattaatgcttatagcagttgttttctcttggatgactcaattt

SEQ ID NO: 621785 - DNA, 423 bp, Homo sapiens
tgcaacactttaaactgtgaatggagggaagggaaaagtagccaaccaaaaactgtaaaatgagctggtacaggggacattacatacgacaaaataagaagagtaaaggaagcatttaataattttaacagagcagaacaagttgggaaaagggcagagataatggatgttgattcagttgtacagaattggagccgttaaattttggaaattaagtctttagcagaaaggagtaaataggactgcctaggtattatgaagacttagtatggagaagtatatggatagaggtgagaaggttaggataaaaaaaccaaaagccatttttgagaactgtactttargccacctggccagaaaggggaaaggaacaatatattattaatgcttatagcagttgttttctcttggatgactcaattt

SEQ ID NO: 621786 - DNA, 572 bp, Homo sapiens
ggtatctgcagagccatgctttctctgatgaccctagggaaggatctttctttgcctcctcctagcttctggtgattgcaggcaaactttggcattttttggcttgcagatgcatcattccaatctccaccttcattgtcacctggtgttctcccctgtgtctgtgtgctctgtatctttacaaggtgttctcctctttgtgtgtgcctgtctgtgtccaaattcctctcttcttataaggatwccagtcattggattagggcccgttctaatccattatggcctcatcttaatttgattatatcggttaaacccctatttccaagtaaggtcacattcataggtaccaagggttaggacttgaacatatttctgaggggacacagttcaatcgccacacatactcatccagggtgggaagcatcaactttttcttacagaataggatgtacacaaggaatataaattccatcacctcaactgctgaacctaagtaatgtccattttacctattcctttgtattctgtaggcaatttagatgatgaaatttaatattatacccaggcagagc

SEQ ID NO: 621787 - DNA, 572 bp, Homo sapiens
ggtatctgcagagccatgctttctctgatgaccctagggaaggatctttctttgcctcctcctagcttctggtgattgcaggcaaactttggcattttttggcttgcagatgcatcattccaatctccaccttcattgtcacctggtgttctcccctgtgtctgtgtgctctgtatctttacaaggtgttctcctctttgtgtgtgcctgtctgtgtccaaattcctctcttcttataaggataccagtcattggattagggcccgttctaatccattatggcctcatcttaatttgattatatcggttaaacccctatttccaagtaaggtcacattcataggtaccaagggttaggacttgaacatatttctgaggggacacagttcaatcgccacacatactcatccagggtgggaagcatcaactttttcttacagaataggatgtacacaaggaatataaattccatcacctcaactgctgaacctaagtaatgtycattttacctattcctttgtattctgtaggcaatttagatgatgaaatttaatattatacccaggcagagc

SEQ ID NO: 621788 - DNA, 572 bp, Homo sapiens
ggtatctgcagagccatgctttctctgatgaccctagggaaggatctttctttgcctcctcctagcttctggtgattgcaggcaaactttggcattttttggcttgcagatgcatcattccaatctccaccttcattgtcacctggtgttctcccctgtgtctgtgtgctctgtatctttacaaggtgttctcctctttgtgtgtgcctgtctgtgtccaaattcctctcttcttataaggataccagtcattggattagggcccgttctaatccattatggcctcatcttaatttgattatatcggttaaacccctatttccaagtaaggtcacattcataggtaccaagggttaggacttgaacatatttctgaggggacacagttcaatcgccacacatactcatccagggtgggaagcatcaactttttcttacagaataggatgtacacaaggaatataaattccatcacctcaactgctgaacctaagtaatgtccattttacctattcctttgtattctgtaggcaatttrgatgatgaaatttaatattatacccaggcagagc

SEQ ID NO: 621789 - DNA, 616 bp, Homo sapiens
aatctcagaaagggagattaaatactaagaatctaaatcttggtattggaactcaagactgatcaatgatatccttttctctccccctccttttttttctctgctcttctcttgtcgtttcaggtgcatgatgactgtaggagacggttttccaaggaatgttgcttcagaagccatcgctcatcagtcattcctcccactgctctaagcgaccccaaaggcgatggtgagtagttaaatcttaacctcagaagcacattgggcatgtagggaaggtgcaaaggctgggaagaagsactgcaattaaattattctcctcaaccagtcaaacattttggggaagtaggactgtgcatgtgtatatagatagctcctggttctcttacctttgggattgtgaatgttgttctttctggtgtatatgtatgtgggcatgttctctgtagctcggtcacaattgtttctgatcagaattgatttcagctttttcatgatttccaaacactggataagtcattaaataagtttgtgtccaggtggtcaaggaagaacttcatgaaggccaggttatcttacttttaaaatggaaacaaacaccaatgttgttcctaaatat

SEQ ID NO: 621790 - DNA, 604 bp, Homo sapiens
tgggcatgttctctgtagctcggtcacaattgtttctgatcagaattgatttcagctttttcatgatttccaaacactggataagtcattaaataagtttgtgtccaggtggtcaaggaagaacttcatgaaggccaggttatcttacttttaaaatggaaacaaacaccaatgttgttcctaaatatgaaactaacatgatcattaccccaacttcactgatgctttgtcaattcctggacwctagtgatttattaagaactctgttctcaaggtgtctgaaggctacagaaagatctaagacatgggcattgccagagctattgattattgtggattcaggctactgatataatacaacaattaacaatttgatgtgtcatatgctaagtgccaagggaatggtagagacatttggaaatgagaaaaccttagaaatattaaccatttataggaggttgagcggaaaggaggtagtaatgaaatcaatgcagcaagaataaactttgtatagagtcttctatcaagaggtctagcaatgttagaacaaaaaaagcagaagccaagaagaagggtattttgtatagtttttgtgtttgtttaa

SEQ ID NO: 621791 - DNA, 480 bp, Homo sapiens
tgcctcttcctgtcccacatcactyacatcatctcaatcaggaatactttaacctctctgattgatagagcctcatttcctttctggcttcagtgcagagccatttgtgggttgggtggggcttgtctcttgggaagccagggtctaccatgtatccttcaaacattgaagcccctcttcaaaactaaaggatcctactgggaagttaaggctgcagtgggccatgatcatgccaatgcattccagtctgggcaacagaatgagaccctgtctcaaaaaaaccaaaacaaaacaaaaacaacaacaacaaaaacaccaaaaaaactagacgattctagagcaggggccccatggataacgttcaagggttcagtgaaccctcttcaaattgcagagccaatgatctgtttaagcatattctctcttggggaaaagtctataatttcatcagattttcaaagaaactaaaaaagggatgga

SEQ ID NO: 621792 - DNA, 480 bp, Homo sapiens
tgcctcttcctgtcccacatcactcacatcatctcaatcaggaatactttaacctctctgattgatagagcctcatttcctttctggcttcagtgcagagccatttgtgggttgggtggggcttgtctcttgggaagccagggtctaccatgtatccttcaaacattgaagcccctcttcaaaactaaaggatcctactgggaagttaaggctgcagtgggccatgatcatgccaatgcattccagtctgggcaacagaatgagaccctgtctcaaaaaaaccaaaacaaaacaaaaacaacaacaacaaaaacaccaaaaaaactrgacgattctagagcaggggccccatggataacgttcaagggttcagtgaaccctcttcaaattgcagagccaatgatctgtttaagcatattctctcttggggaaaagtctataatttcatcagattttcaaagaaactaaaaaagggatgga

SEQ ID NO: 621793 - DNA, 439 bp, Homo sapiens
atcattgttaaatttcataagtgtgatcattgtattgtgtatgaaggagaatgtccttgctgtttatgagatacatgctgaaatacttatgtgtgacatgtcatgatgtctgcaacaaacgttcaagtggctcagccaaaaataaagaggtagatatgcagataaatagatggagttatagatattaagtaaatgtgataaagtgttagcaatcagtaaagaatatgtaagtgatcactgtattattcttgcaacttttctgtaggattgaaaagttttcaaatcagaagttggtggaaaaaaaatcttgaagtttatttagtaggtttgttgttggtagtagcattggtkaagtaattccaaactattttggatgtgctataggattaagcaaatgagtaaataaattgactgaccaaagtagccctccaggcacttt

SEQ ID NO: 621794 - DNA, 401 bp, Homo sapiens
agcagcttctgcttctgggggggcttcaggatgcttccaatcatgatggaaggcaaagggggagcgaggcatctcacatggctaacgcaggaggaaaagagagagaggggaggtgctacatactgttaaacaaccagatctcacaagaaatcactcactatttcaacacagcaccaagggagatggtgctaaaccattcataagtagccacccccatgatcaaatcacctcccccaaagccctacctccaacattggggattacaattgatatgaaatttgggcggggagtgggaacgcggatctaaactatatcactakcctacttaaaacccttcaattcaaatacagaactacatagtaggtagtatatagctcttatagaattatggcctttgttta

SEQ ID NO: 621795 - DNA, 540 bp, Homo sapiens
tgaacccagctgtgttgctgggaggaaacccaagaagccatgtgaagaggcccacatgaaggaaaaccaagcccttagacaacaatcccagctgagcaatcagccaacagccagcaccaacttattagccatgtgaatgagatcattttggacygttcagttatcccagcatcacaactgacagcacatgaaacaaaactgccaagtcaacacacagaagcatgagaaataataatctattgttctaagccactaaattttgtagcagtaaatgaaacaggtccttgcacacaggaaagaccaaaagtaagataatgtgttaagctaaagtaacttgtattatcttctttgcgcttttggttttgtttatttcatattttccaaccttttttctcttataatgataagcaactacctttataattagaaaaataaacgtttttagaattaaaaaaataggagcatttctggggcattttagatatatagtcttggtcagaggcttgggtggttagcctgatagatgattgtccacataat

SEQ ID NO: 621796 - DNA, 555 bp, Homo sapiens
agtttgtctcctactgtatctccaatcacacctcaaagcatataccatctactctctacactcagccatgctagccttctttcagtccttcctccttcccgtgtttcctacagccaaaagaacttggaataccctgctccctcagcctggaatgttttttttattcttcaggcttcacctacttaactccttttcattcttcagatttctactacctagcaattcctcctgagaaaccttccttgatctgccagtmtaaattaggccctcatattattctctcacagcacgtggaagttttcctttccagcacttttcaaagttggacttttagatctgcctgtttgattagttgatatctctctgatatggtttggatttgtgttgccccccatcaaatctcatgttaaattgtaatcttcagtgttggaggtgggacctgacgggaggtgattggatcataggggcggagttctcatcaatggcttagcaccatcctcccttggtactgtatagtgagtgagttctcaagagatctggttgaggtagcacctc

SEQ ID NO: 621797 - DNA, 583 bp, Homo sapiens
tgcctgcttccctttcaccttctgccatgattgtaagtttcctgagaagccaagcaggtgccagcatcatgcttcctgtacagcctgcagagccatgaggcaattaaatctcttttatttataaattacccagtctcaggtatttctttatagcagtgtgagaacagactaatacactgtctctcttattagactataagctccaggggagcaaggactggatttgttttgctttctatcatattcctgatgcttagcacaatgaacaggtgctcaatagaaatatgaatccaatctccttgctcctttgtgcttctagccatrctagcctccgtgctgctccactaacctgctctttgaacactcctgtgcaggggctttggcacttgctcttcattctgcctagaaaactctcccaccagcttaccccttcacatcattcaagtttctgctctaatgtcttttctttgagcagatgtttgtggcatgcacacttgcacaaagtgctgctatgtggtagtgatggtaaggattattaacacagccccaatggaatatgagcttcataagaacaaggatgatg

SEQ ID NO: 621798 - DNA, 538 bp, Homo sapiens
atgaacaggtgctcaatagaaatatgaatccaatctccttgctcctttgtgcttctagccatactagcctccgtgctgctccactaacctgctctttgaacactcctgtgcaggggctttggcacttgctcttcattctgcctagaaaactctcccaccagcttaccccttcacatcattcaagtttctgctctaatgtcttttctttgagcagatgtttgtggcatgcacacttgcacaaagtgctgctatgtggtagtgatggtaaggattattaacacagccccaatggaatatgagcttcataagracaaggatgatgatctgttttgttcactgctctgtcctcaaggcctagaacagcgcctggaaaatgattgctactcaacaaatatttgtatgttctaggataataagaaagactattgaaaaatgaagatcattggaaaatttgtgggtagatatctgaagcaatttgtatgaggagtaaatgttgggagatttacaagttattggaggttctttttttctggcttta

SEQ ID NO: 621799 - DNA, 574 bp, Homo sapiens
atctccagctttcctgggtgggtgtggtttaaggatgctctcaatgtggtggggacagaaaagggttagaatagggatgttgagcctcagagaggaatagtctcagactgggaaaccgggagtctgactaggctaaccaccatcagcaaggacttctgggtagagaagtctgaacttgtttagatccctgctttctcttkgttaagaagtaaagcacagtctaggggaggagaggcatggaactttctatttctgggccgcagggacccaacttaaggaatgaaagaatattctggaggccccatgagaattatctatccttccagcaacagacctttgatttgtcctagtattagttgtcaaaatcaagatctcctcttatcctacccctttactactcaacttacctttcatttctgttgccttgttttttttgacaaagtagctggctatctgtcgtcaacatttgtaatgtcatttgagtgaatgtgtttcagtaacacttgttggttggttttcatggacagacaaatagagcagacaggagcctttatcatggctctggtccagactg

SEQ ID NO: 621800 - DNA, 568 bp, Homo sapiens
ctaaccaccatcagcaaggacttctgggtagagaagtctgaacttgtttagatccctgctttctcttggttaagaagtaaagcacagtctaggggaggagaggcatggaactttctatttctgggccgcagggacccaacttaaggaatgaaagaatattctggaggccccatgagaattatctatccttccagcaacagacctttgatttgtcctagtattagttgtcaaaatcaagatctcctcttatcctacccctttactactcaacttacctttcatttctgttgccttgttttttttgacaaagtagctggctatctgtcgtcaacatttgtaatgtcatttgagtgaatgtgtttcagtaacacttgttggttggttttcatggacagacaaatagagcagacaggagcctttatcatggctctggtccagactgtatttcctaaaggcacttctgtctgacatgccagtacctcactgacataccactcaatgacattcaactcawctcaggtccctccacatagttggaattgagcttatcatgccacagcccccactg

SEQ ID NO: 621801 - DNA, 616 bp, Homo sapiens
aacaattatcattaattcattttctaaagtattgacatttcattgtattgttgaactgtgctggtaaaaggaacatttccaattattctctttaccaaccaggtttaaagaaaaaaaaaaagcctaaaaggattatttaagtatcacattatcttgacagaacagtacatgatgttttctctggttttcwgagaagtatatgtaatattcataaggtcttcttaacctaacctgctttttttggctagtaatttctctacttcttaatgttacatatattaatgtaattgtgtaaagattaattacaagagtacttaatctttttaaagacaatgtcaagaaaaataacactaaaatttatagcattattttaaataatatctttcttctaaaaatgtctaagtatgaaatacagtgttaactgtcttaatgatgaggtgtggctgcaaaatcaaacactcacttgttgcagagtaaactcaacttatttttgtcatcatatcactgagcatccttgaaattctcttcactgctctgctattggggtttctttaacaatccattttatgaagctcatccaaattacacgattgcattgtaaagatgataatatagt

SEQ ID NO: 621802 - DNA, 608 bp, Homo sapiens
cttcttcccttcctctctggagacctgaaatataaacatctcttatttccagtgatccatggagtacagtcaggaaacccaatcaatcttggttctgttctttaggtgaggtttgaggggtcattactaagctttttttgtttgtttgtttttcttttttttttttcatacaggcgcctgccattaagctcttaaggctcattccagagcattccattagggacgtttcctttcactttaaggtaggattattaacatttaatcactgtacttacgttcagcttgctaacacttgattcaagagccttggaccaactttagattacttcttcagatttcaaaaatatataagaatgtattgcaactctggaactcartgagcaaagatgagtttttccagttaattagagatattattaggaagtgtcctcttactctttttatcagaacatttattggagagtgtgacttaagtcagacctttatggttgcttccatgtcatttattaaatataattacctaatttccacaagctgtacagatgtaatgagcacacaggtttttaaaagaaggatcaaagcattgagaaactctgagaatttagagt

SEQ ID NO: 621803 - DNA, 623 bp, Homo sapiens
cattctcacgctgctaataaagacatacctgagactgggtaatttataaaggaaagaggtttaatagactcatagttcaacatggttggggaggcctcaggaaacttacaatcatagcaaaaggggaagcaaacatgtccttcttcacatagtgacagggagaagaagaatgagaaccttataaaaccaccagatttcatgagaacttactcactatcatgagaatagcatgggggaaaccactcctatgattcaattacctcccatagggtccctttcatgacaggtggggattatgggaactacaattcaagatgagatttgggtgggaacacagcccaaaccatatcagtgttattttaaacaactaacagtgtcaattcagtatgtggccctcatgatctgagaccaaaaaaaatacaaaaagtataaataaaaatgaatgtgggtggagtcctaaacaatattatatttgtgaccattgtataaaccagcttaggaaaaaaatatttttctttatcattttgtaraagatgaaaaattcagagtcatggcatagtatcataggagaataggagaatgatagctgtgtgctaataagaataatcaaataaacaacttta

SEQ ID NO: 621804 - DNA, 507 bp, Homo sapiens
gggaggcgaaggttgcagtgagcagagatggcgctactgtactccagcctgggtaacagagccagactttgtctcaaacaaacaaacaaacaaacaagcaaacaaacaaaaaaaacaaggttgtgtccctacttatgagtgatcttcatgactctcaactgaaagtatgaggtgtagcattgtgttttcatgctagttaaacattgcagggttttttggttttgttttttgttttttcttaccacacatcttttggcatgtacctaatattctgggtagcatgtactttctggtgattgcatctgtcgaaagctcccatgagtcaaggctatgaccagagctttaagtgaaccctccaaagtttcagctgctctggacrggggagccagttgaaatggagctttcaattggagtagatatgtgtattttctgatttataatgtaatttagggaactgcaaaatggggtcatgaattcaacagagaatgtgaagaaagacagggaaag

SEQ ID NO: 621805 - DNA, 460 bp, Homo sapiens
aaaaccagcacaccaaggctgaaaattccaaaaaccagaatgcctcttctcctccaaaggattacaattcctcgccaggaaggcaacaaaactgaatggagaatgagtttgatgaactgacagaagtaggcttcagaaggtgggtaataacaaactcctctgagctacaggagcatgttccaacccaatgccagtaagctaagaaccttgaaaaatggttagaggaattgataagtagactaaccagtttagagaagaaaataaatgacctgttggagctgaaaaacacagcaagagaacttcatgaagcatacacatgtatcaataactgaatagatcaatcagaagaaagaatatcagagattaaagatcaatttgatgaaataatgcattaggattagagaaaaaagaatgaaaaggaatraacaaagcctccaagaaatatggaactatgtgaaaa

SEQ ID NO: 621806 - DNA, 622 bp, Homo sapiens
ttgtcagttgcaaccacggcatataggttgttgtagttagaaactagtatttgcttttagaagagggactcaccagtataaatatgaaaagataaccaagaatgaccagctattttagaaaaactagtaccatcaaaaagaacacaagtccatagccccaaactaaaataaagcggtactaactttaaaataaaaggagagggaagaaaactttaaaataattacatcatcaattctaaggcagaactttttttctacattttaatctttttggaatcagaaagcatyttataattaatgatgtctgacaatcactcagccaggtgagacctatgacttaggagtataaaaatcttctattgatgttttctggtaagataaagtactgccaacgatctgttacatttgatgaatgtacttgtacattctctttagaaaaaaattatttaattatttatttattatttatttctatttatttatttatttatttaatttgagatggagtctcgctctgtcacccaggctggagtgcagtggcacaatctcagctcactgcaacctccgcctcccgggttcaagggattctcctgcctcagcctcccaagtagctgggactaca

SEQ ID NO: 621807 - DNA, 538 bp, Homo sapiens
tgttcattgttcctaccacacacacamaaaaaaagtttgagtggagaaacaaacttttgaaggtaatgaatatgtttatcttctttattgtgttaatggttccactggtgtattcatatattctaacccaacaaattatatacatgatatgttcaattttttgtatgtaaattacactttagtaaggcagataaaaagtttgtgtgtgtgtgtgcttgtgtgtgtgtatttataaagagagagagagaagatagaaagagatgctctaaaatgaacaattataaattttcaaactgaaaaaaagacaccacttttatataattggtacacatggcctctttcctaaaatttattctgtgttagaccagaaagaaaatttccataatggtattgaaaaattaggcacaaataaaatctaattttattttcattcacctgtctaatctaactacattagatgatcttgttacatattccataatattttttcaaaagatttccacagattatacttccctttcattttaattaattgagg

SEQ ID NO: 621808 - DNA, 541 bp, Homo sapiens
ttgtaaactcataccagattttcagtttgtatgctacatcccaatacagactttgtagctgcatctccactcacccccaatgagatctacttggatttaaatttaattattagtgatgtagcaatgagaggtgactgaggtaggttgtgaggagaaatgtttataagacaattgccaaagggagattgttaaagatatgtcagcagggaaactaacctgagaatggaaaggagagactacttctccaactgaggaagtttagagggaagtagggtttaaggcacatagacccattagaatcccccatgtggtcccacttttataaataccttaacttgytaattataattaaggacagggaaggctgttatttgcaattcagcaagctttaaactcatacattgtgtctaattttctgaaatatttgtattgtgtcttaaaagagccaagaacttatttcaaggaagtatagaaaacctctgattctctgaacatgattggaaatgtgaatttaaattcatgagattctccttttctttct

SEQ ID NO: 621809 - DNA, 541 bp, Homo sapiens
ttgtaaactcataccagattttcagtttgtatgctacatcccaatacagactttgtagctgcatctccactcacccccaatgagatctacttggatttaaatttaattattagtgatgtagcaatgagaggtgactgaggtaggttgtgaggagaaatgtttataagacaattgccaaagggagattgttaaagatatgtcagcagggaaactaacctgagaatggaaaggagagactacttctccaactgaggaagtttagagggaagtagggtttaaggcacatagacccattagaatcccccatgtggtcccacttttataaataccttaacttgttaattataattaaggacagggaaggctgttatttgcaattcagcaagctttaaactcatacattgtgtctaattttctgaaatatttgtattgtgtcttaaaagagccaagaacttatttcaaggaagtatagaaamcctctgattctctgaacatgattggaaatgtgaatttaaattcatgagattctccttttctttct

SEQ ID NO: 621810 - DNA, 580 bp, Homo sapiens
ggcacatgtatacatatgtaacaaacctgaacattgtgcacatgtatcctaaaacttaaagtataacaataattaaaaaaaaaaaagaaaagaaaaatacttgtgtaattcttagttttgacccatggtggaaaggtcaactcctaacagataatgcaaataatatgtgctcttcctggtcaaagtattgtaatcattataatgagccatatccatggtggtcaatattattttgatgcgttcaacagcttaaccctggaattggttaaattgaattgcttgtgtctcaattgaaagtaaaaaccttttgcaaatcaattgtaagttcagtaatctatataagctacatccaatctcagacttatattgaaaaatcactgttttttgttctactttagtacacatagaataaatttaggagtcaaatatctcacatctgtaatgctgcaatttaggctgttaaaaggatgatttttttwaaattttttaagtgccttcttggtcccctaaacgaattttagaaagtcttctaatctatcctaatctaaatttaaataagaataatacaaatattcacaaa

SEQ ID NO: 621811 - DNA, 372 bp, Homo sapiens
aaaaatggataaacaatccaactgcaaatagtcaaagtggactaaaattgattcttcacaaagaatgatatataagatatatgaatggccaataaacacatggaaatgaactgacgatcatatattattaggaaaaataagtttaaactatgatgtgataatgtttacacagccattagaatggtaagatttagagagtgaaaacttcaaatggtgttgagaatgaggagcaattttaacactgcttctttgccatcaaaattktcacatataccaatatgattttgctgtgtgtctccccgcaaatcgtatgtggaaatttaatcctgatgtgtcaagagagggacctggtgggaagtgattggatcatgg

SEQ ID NO: 621812 - DNA, 372 bp, Homo sapiens
aaaaatggataaacaatccaactgcaaatagtcaaagtggactaaaattgattcttcacaaagaatgatatataagatatatgaatggccaataaacacatggaaatgaactgacgatcatatattattaggraaaataagtttaaactatgatgtgataatgtttacacagccattagaatggtaagatttagagagtgaaaacttcaaatggtgttgagaatgaggagcaattttaacactgcttctttgccatcaaaattttcacatataccaatatgattttgctgtgtgtctccccgcaaatcgtatgtggaaatttaatcctgatgtgtcaagagagggacctggtgggaagtgattggatcatgg

SEQ ID NO: 621813 - DNA, 614 bp, Homo sapiens
acagtggctcacacctgtaatcccaacactttggaaggccgaggcggcaggtggattgcttgaggtcaggagtttgagacaaacctggccaacatggtgaaacactgtctctactaaaaatacaaaaaaaagaaaaaagaaaaagaaaaatattagctgggcgaggtgacgcacctgtagtcctagctactcaggaggatgtggaatgcgaatcacttgaactttggaggcggaggctgcactgagctgagattgcaccactgcactccagcctgggcaacagagtgagtgagactccatctcaaaaataaataaatatggcagcatagtattccatagtgtatatgtgacagattttctttatctagtctttcactgatgggcatttgggttggttccaagtctttgctattgtgaacagtgccacaataaatataygtgtgcatgtgtctttatcatagaatgatttataatcctttgggtgtatacccagtaatgggattgctggatcaaatggtatttctagttctagatccttgaggaatcgccacactgtcttccacaatggttgaactaatttacactaatttacactcccaccaacagtgtaaaag

SEQ ID NO: 621814 - DNA, 660 bp, Homo sapiens
caatgaagcatggtttgcttttcaaaatgctatagattaaaatatatatatatataaagtttcaaatgtctcagtggaatacaccctttcaaacactttggtaaaagttaaatttgcatagacactttggtattcaacataaaatgactttattttgaagaattgatgctaaggatacagatatacaggcaaatgtcaaggaagcttatgaaagcattattacagtaaaatattggaaacttattttaaatattagatactgtacattcataaaattcatattctmaaagaaaattcacaaatgtaagaaaacaaacatgatatagtgttaattgaaaacatgacaaaatactatgtatatagctatatctatatatatagaaaatgatactgtttttatataaatatatgtatagttacaaataaatgaataagaaagggcctagaaggaaatatggtatcaacagaaattaactttaggtggtgagcctattagatgatattcatttacttctatatatatattactgaatattcttcagagaacagaaactaattttacattaagaaaattagaccatacattaattgcttcaggaaaaaaatagaaattgaaaaaaaattctatatttatggaagaaattataaaagtcacataat

SEQ ID NO: 621815 - DNA, 584 bp, Homo sapiens
gtcccatgaactccaagcaaggtaagttaagtgaaatccatacttggaagttcttcttaaaaatcttaaaagcagccagtgaaaaaacattacttttaaaggaacaaggctgatagctgagttgtcaatagaaacaatgaagccagaaaaaagagtatctttaaagccctggaagaaaattactgacctagattattcaccttatgaaaatatccttcaagaataaaagtgaaatgaagacatctccagatgaacaagaatggtgataactcatcattaaaggaaattcaaaagtacatttcagacagaaggaatatgaccccaaatgaaagtttggagatgcagaaataaatgaaagacaatagaaaggtaatacatagataaatagaagtagatgttgaatgtataacaatgtccttatggatttaaaatatgcataaattaaaatatatacaaataaaaaataaatcttgacatttgcaacaacatagatggacttgcaggacattttgttaagtgaaacaagccagacatggaaagacaaataccacatgatctcrttcatatgtggaatctgaaacaag

SEQ ID NO: 621816 - DNA, 546 bp, Homo sapiens
catcaccattcattctgcaattccagatttctccattgtgttgtcattaaatccatattactatgctaataaatttaaacatcttagaaggggcatagaaggaaagggaaatgtgtcataaaattattaataacttctttgtcaccttggctacacaatttatggtggcaatctcctgactacaaaaacagtggctggccgggcatgttggctcatgcctgtaatcccagcattttgggaggctgagtcaggaggatcasttgagcccagcagtttcagatcagcctggacaacatggggagactctgtctctacaagaaataaacaatattaatcaggcatggtggcatacgcctgtagtctcagctatttgggaggctgtggaaggaggatcacttaagcctgggaggtagaagcttccactaactgagttcatgccactgcattccagcctgggcaacaaaggaagatcctgtatttaaaaaagagagagagagagaaaagaacagtttttgcgaaaacctaccttagatacctacataatga

SEQ ID NO: 621817 - DNA, 578 bp, Homo sapiens
aagcttaaccaaaatgtagcccaagagaaggcccccaaaggaatagcaacatccactacaagtaaaataatgggttcctctctgcaaggacttagcaataacccctaggctctgggtctatgtgagtcccagactgtctggatcttctgtcccaaaccccatatccccccatctcatcagccagaagcccccctcactagtaaattgttagaaatgtgctgacaataatgaatattaataggtgatcattgctttcactcatttataggacaaatattttttatcaactacagtcatgaatgacataatgatttttggctaatgacagatagcatatataatggtggtctcataagattataataccatatttttgctgtaccctttttttttttttttttggagacagagtttattgcctgggttgaagtacagtggcatgatcatagctcactacagccttgatctcctgggytcaagcctcctgagcagctgggactacaggtgcacactgtttcaccaagctaactaaaaaacaaagtttttgtaaagacaaggtcttgctatgttgccttgtt

SEQ ID NO: 621818 - DNA, 616 bp, Homo sapiens
attaatgaaagttttgcaatatttctctgttctcctaaaaattaccactggcaaatgactctttcattcttaaaagacaattctgcctcctacttcatttccatcagataagaatcagtcaactgcttgccaacaaacctaaaaaccttcctccattacactcatctttcctcttttcctctagtttcaacagagtaagtgcccttctgcaatccaaggccaatgctgttgcataaacttttgatcacatttattttgtccttcataaagctccattgtataattttccttttcctctttgtaatttaaattttaactctttttatcaataattaaaatgataaaatgtccactattaaaaaaaaaaaaaaaaaaagaagctgtcccttcccttctggtggatgacatgaccagtcattgaggttgttttctgaacayaggcatttattctgctagttagtggtcgggagtacttactgcagatggcttacagctgagtacctccccaggcaatgccgtaagtagcatataaaaagaatctcctctcctgcacatggatgagtaaaacagctaaggattaggcccagagcttaattataagagtagctgaacttta

SEQ ID NO: 621819 - DNA, 589 bp, Homo sapiens
gtcacaaccacatattaacttacctatatcccttcctaaatgaggagctgcttgagtggaaaactataattttttcagtgttgtatctcctgttgcttgggttcacatggtttgtgatatttacctaacaatatttatggaatgggttagtgaataatcagagaatatcacaactataggacatgtgatacatagatacaaagcctagggggtacatttaaattcttatcagagtactctaggcaaggttttaattttcatttacatattgtatctgaaataagggagccaggatatagaataattgagacctcaaagtcagacatatctataattgaatcctttctctgacacttactctctgtttgactttaggcaaattatgaaatttttctccttctrttttctcttttgtatgataggagaaatagcagtgtcttcctcaaggggatcttatgtggattaaataaaataatacatgtggcctttgataaatgctcaaaaattgtatatacttattttattagaagtagcagtattaagtgaatattttatttatacaggacaaatataaaacttcatatttgcc

SEQ ID NO: 621820 - DNA, 590 bp, Homo sapiens
gtagttattataaatggaattgtgcttttggtttctttttcagatagtttgttgttagtgtatagaatcagtactgattttttgtgtgttgattttgtaacctgcaactttattgtattcatttattagcactgacaagtttttggtggagtctgtagggttttctaaatataagatcatatcattagcaaacagtgacaatttcacttccttctttcctatttaaatgcattttatttctttctgtggcctacttggtccgagaaggacttccaatactatgttgaatagaagtgtaacagtgggcatcctccttgttttccagatttaaaggaagtctaaacttttcaccactgagtgtaatattagctgtgggcttctcatagatggcctttattgtgttgagatacattccttctatacctaatttggtgagagtttctatcatgaaaagatgtttaattttgtcaaatgcttttctgcatcaratgagatgatcatatgggcatattattgtcatttgttctcttaatgtactgtatcacaccaattcatttgcatattttgagccatacttgtatctcagggat

SEQ ID NO: 621821 - DNA, 605 bp, Homo sapiens
tttttaaatatctgtattaatttctttattgacccactgttcattcaggagcatgttgtttgattttcacgtgtttgtgaattttctyaaattcctctgttgttggtttctagtttcatgctattgtggttggaaaagatacttgatataacttcaatcttcttaaatttgctgaatcttgttttgtgccctaacatgtgattaatcctgaagaattatctgtgtgtgcttgagaagaatgtgtattctgttgcggctgaatggaatgttctgtaaatgtcagttaggtacatttggtctagcgtgttgttcaagtccaatgttttcatattaatattttgtctcagccatctgtttattgttgaaaggcatctactatagcgcagtcctcttctcccttcagatcctttaatatttgtttttatatatgtaggtgctctgatgttgggtgcatatatatttacaattgtcgtatctttttgaagaactgatccctttataatgatataatgtccttctttgtcattttttatagttcttgacttaaagtctatttttgtctgatataaatatagctacctctgctctcttttggtttttatttg

SEQ ID NO: 621822 - DNA, 594 bp, Homo sapiens
taagtgtgatagtacaaagatgactaaaggagcaaggaaacacagaagagggaatattttatcttttccttggaggatactcaagggagatactagagaagagataactccaagtttgactttgaaaaatgagtaggaatctgccagttcaagtaggggcaggggaattcccagccaaagaaatgaacaatgcttcaaaggtgttcacatatgtctgatgccagggactgtgattcagacctggctagaccacctgaggacttcagctttactgaggaaataatctttcctgaatctctctattgttaccattaatactatyaaaaatacacaattcaattagttttgatgattctattcaccagcactatgaccaccattgccaaatattgctacctttgtttccagtaatggattttggagtattttaccactaccaatacattagctaagatgtatgggtggggaaacgactttatttactgtcttctaattactctattctccttgcaaaaaacatcagcaagcttaaaggacctcatgatcctatcgctctgctaagtataaaaacaatccaaatacttcagcatttga

SEQ ID NO: 621823 - DNA, 569 bp, Homo sapiens
agaatcaaactcagttctgatcgacattaaagaccacattctgtttttgtttttgttttctttgtacacaggcccttgctcttttgccccagctggaggacagtggcatgatcatagctcactttaaccttgaactcctgggctccagccatcctcccacttcagcctcctgagtagccaggactgcagatgcataccaccacacctggttaatttattttcattctttaaagaaatggaatctcattgtgttgcccaggctagtcttgaactcctggcctcaagkgatccgtctacctcagcctccaaagtactgggattacaggtgtaagccaccatgcctggccaaagaccacattcttaaactgatatattttgtggcctctgataatttttagtatttactgagccataatgtatccccattactatgccatctctctttctacagtaaaacaaacaaacaaacaaacaaacaaacaaaaacttctctaaccctaaaactacctgcaaggtaggtattacttctgtaaataaacaaatggaaaggaccttttcaaaagtgcaaa

SEQ ID NO: 621824 - DNA, 623 bp, Homo sapiens
acataatcaatataaggaatgaaaaggggacagattaagataaggcaaacagtttcaacaagggagaaatactgtgaacaacttatggaaattyatttgacaatcaggtcaaataaaaattttataacacattataaattactaaactaacttaatagtacagaaaacattggtgaacttgtaatcattacataaattgaaccacttgttaaaacctaacttccaaaataaaacaaatctatcagagatataaacctatagtaacaattaaggcagtatgacactggcacagagatagagaaggaaacctacaaaaaaaaaatatatagaatcctcaaaatgaccccttaataaagcaatactgaaagtgactagaatcaatgactgagctacaggggtagtttgcccagtatacactttggaaagaccaagttttaaatcagacaagatggtttggagtttgcttaggttcactttttttctagtttcttcagttataaaattggaaaacaaacaaacaaaaaaagcaatgtgcagtctttttatgtgtattgaataaaaggatttgagaaaaaatcggtactcaacacattctcaaataagtaatgtcactgttctcttca

SEQ ID NO: 621825 - DNA, 623 bp, Homo sapiens
acataatcaatataaggaatgaaaaggggacagattaagataaggcaaacagtttcaacaagggagaaatactgtgaacaacttatggaaattcatttgacaatcaggtcaaataaaaattttataacacattataaattactaaactaayttaatagtacagaaaacattggtgaacttgtaatcattacataaattgaaccacttgttaaaacctaacttccaaaataaaacaaatctatcagagatataaacctatagtaacaattaaggcagtatgacactggcacagagatagagaaggaaacctacaaaaaaaaaatatatagaatcctcaaaatgaccccttaataaagcaatactgaaagtgactagaatcaatgactgagctacaggggtagtttgcccagtatacactttggaaagaccaagttttaaatcagacaagatggtttggagtttgcttaggttcactttttttctagtttcttcagttataaaattggaaaacaaacaaacaaaaaaagcaatgtgcagtctttttatgtgtattgaataaaaggatttgagaaaaaatcggtactcaacacattctcaaataagtaatgtcactgttctcttca

SEQ ID NO: 621826 - DNA, 564 bp, Homo sapiens
gcaaaatctagatttgatcagtaagaatataactagttttctctcttttarattttcctccctcccttccttccttccttccttccttcgagaatgattgctacagttttcatgaaaaacatgtagcgagtcatgatatgaaagcatgccttaggcaagggacaaagggactttgagaagtctcagagtcattgtacaatccaagaaggtgttttattgcccacttctttgcgtgttaaaatattcccagttgagagttgggataataactcacaacgataattttaattaattaattttttgttagaatttttaaaaattatgtcttttgttttaaaagcctcaggcataaacagattgtaaaaaaaatcattaattaaatattctaaacaaccaatagtagcattagtaaaatgaagggggaaattaagctttcagggaaaacaccgtacccagtggacaaactatctcgtgcattaagatcaagatcaaaaattatcagcttgcttaaaattcaatactggacacctgtaagtgtgtcagagaagcttatgcaataatgtt

SEQ ID NO: 621827 - DNA, 564 bp, Homo sapiens
gcaaaatctagatttgatcagtaagaatataactagttttctctcttttagattttcctccctcccttccttccttccttccttccttcgagaatgattgctacagttttcatgaaaaacatgtagcgagtcatgatatgaaagcatgccttaggcaagggacaaagggactttgagaagtctcagagtcattgtacaatccaagaaggtgttttattgcccacttctttgcgtgttaaaatattcccagttgagagttgggataataactcacaacgataattttaattaattaattttttgttagaatttttaaaaattatgtcttttgttttaraagcctcaggcataaacagattgtaaaaaaaatcattaattaaatattctaaacaaccaatagtagcattagtaaaatgaagggggaaattaagctttcagggaaaacaccgtacccagtggacaaactatctcgtgcattaagatcaagatcaaaaattatcagcttgcttaaaattcaatactggacacctgtaagtgtgtcagagaagcttatgcaataatgtt

SEQ ID NO: 621828 - DNA, 523 bp, Homo sapiens
tgcattgaggaccccataagtgcttgtcaaatgagtaaatacctccaactgcataacagaaaacacttgaagtgactttcttcctttccttttttttttttttgagacaagatctcactctgccacccaggctggagtgcagtggtaagatcatggctcaccgcagcctcgacctgctaggttcaagtgatcctcttacctcacttgttgtccagtctggtgtcaaacttctgaagtcaagtaatccacctgcctcggcctctcaaagtgctgggattacaggcatgaaccaccgcacccatcctgaagtgactttccattccgcgaaaaataaaataaaataaaaaagytaaatggtcttagggaagggatacctaacttccttttcaaaaatttagaatacaccaagtgagggtaagctgtttgtcaccttaccagaacataccataggttccagtgtccctccttgtaggtcacaagaaaaatgtgattctataagtaagagaatgtgtcattttgtgaa

SEQ ID NO: 621829 - DNA, 711 bp, Homo sapiens
cactgaaccatatcataagtcattcctccagatttctaaatggagaccttatggtacaggtcctgccagcatactgttattttttgttttgttttatgtttgttttaataacagagctattgcaattaaattacaggagagctatagccataagcattgacttgtcttctcatggcatctttgastagaactgagctgggtgttaaaatacttaagaaatttgtaactggtgaatgaacatatcaaaaaatactatactaagaagagagattaaccactgatgctgtgaccttccacactctagggattttaaggacatcactgatagcaaacttctcactatatatgaatagtaaaaagctcggaggtttaactaagttttaaaaaatgttaagtcaggagggaataatgggctaaatttaacagattgaaaagtattagggataaatgtgcagccctatttttagtttccaagacctagctacaaaaaagcaatatgggaaaaaataagaacaatcttaggatacataatggaaatataacgtccaagatgaaaagtaatatttcccctttaccatgtactgaaaaaggatgtattatattccattaggtactacatttgaggagaaaaatagtcaacatagaacacactcagagagggcagttagaatgaacaaactcaaaacacagttacctgagaaatagcaaaag

SEQ ID NO: 621830 - DNA, 628 bp, Homo sapiens
tctgtctcaaaaaaaaaaaaaaaagaaaaaacagttctctgtgtttggtatttaaaggaattttacttaaaacaaaggatagaagctaatgggggtgcayagagggtggcctccatggtgcagcacatgcccagcaggctctcagacactgctgctggagaacagtaatggggtgagagaagagctgggacagaggagcatccacatccgagtccattgctaacgagcaaagcatgctactttgcccaacagtcacattattatctaagtattatatttggaagagaattcagagtatctttttatagacttatgttatttgctccaagttcacactgagaaatggagattaatgggcgagagggaggagagcattatatagtggtgttatcaaaaagaaactttgtattaaaccagagcatttgggaaagatatgatcattagcatttttatgagcttttagtttccatttttttctgacactgataagagatctgtcttctcttaaatgtaatgatttgtatatttgccctcatttgcaagttcagagtctgggggaagacaaatccaagtactgtctagtcctgaaatttccttaggctgctgagacaaaaacaaaaaggcattc

SEQ ID NO: 621831 - DNA, 539 bp, Homo sapiens
tgccggtgggattctagccttcttgtgatctttacctcctgatggcttcccttacagactttagacttgctagcccatcctcacattgtgtaagtggtaaacatatgtatgtttgtgtacacacacmcacacacacacacacttctacttctctaattggaccctgactgatagaattttttaaatggcctataaggcctggcactattaaacccaggcctactttttgaacttatcgcctcttttctatgtcatgtaagaatgcacttagcagcaaataacagaaaactcaattagcttttgcctagagatagggtttacttctttcacaagcaagacatttgacccagctctgacagaagtccagatttggagatactacacaacagtgtagtaccagaaaatactctcctctgcagtctcttgtctcataaaggttacctcattgtggcaaaatggctacaacattcttggacatcaaatcaatgtacagatggaaaaaaggacgaggtttaagaaaaacacagcaaaaaatgaaa

SEQ ID NO: 621832 - DNA, 539 bp, Homo sapiens
tgccggtgggattctagccttcttgtgatctttacctcctgatggcttcccttacagactttagacttgctagcccatcctcacattgtgtaagtggtaaacatatgtatgtttgtgtacacacacacacacacacacacacttctacttctctaattggaccctgactgatagaattttttaaatggcctataaggcctggcactattaaacccaggcctactttttgaacttatcgcctcttttctatgtcatgtaagaatgcacttagcagcaaataacagaaaactcaattagcttttgcctagagatagggtttacttctttcacaagcaagacatttgacccagctctgacagaagtccagatttggagatactacacaacagtgtagtaccagaaaatactctcctctgcagtctcttgtctcataaaggtwacctcattgtggcaaaatggctacaacattcttggacatcaaatcaatgtacagatggaaaaaaggacgaggtttaagaaaaacacagcaaaaaatgaaa

SEQ ID NO: 621833 - DNA, 563 bp, Homo sapiens
taccgtaacaaagtgctgcggactggttgccttaaacaacagaagtgtattgtcccatagttctggaggctggaagtccgagattgaagtgctggcagggttggttcctcctgaggcctctctcctgggcttgcagagggcaccttatccctgcatcctcccgtgtccttcccccgtgcctgtctgtgtcttgatctcttcttctaaggaccgcaatcatattggattagggctcactctaatgacctcattttaacttaatgacttcgtttaagaccctaatatggtttggctgtgtccccacccaaatctcatattgaattgtagttcccataatccccacatgtgaaagggacccggtgatggataattgaatcatgggggtggttacccccatgctattgttctcgtgatagtgagttctcatgacatctgatggttttataaggggcttttccccttttgctgggcgcttcttcttgctgctgccaccatgtgaagaaggacatgtttgcttccccttctgccatkattgtaagtttcctgaggcctctccaaccatg

SEQ ID NO: 621834 - DNA, 452 bp, Homo sapiens
ggggagggtgacacaggccctccggcagcagcggcttggccactggcgctgagattggtatgagtgactcagtgccaggttgcgccacagaaagctgaggctgcggatccttctcctgcctctggtagggccgtctkaaaggcagggtgagtgagcctggctccaagaggctgggtccgcaggcaggggctgacgtgggctggcccaagccccagctctcctcactctgagtgcttctatgctttctcacctccacgcttccaatcatgttattttcctcttattaaaatgcctccttccacgtccacttggcaaactcctacgcaccctttaaggccgggcacaaatgtctccacagggttatgcgccccagccctgttagtgacggccttccagctagacaagattttcatctttatactgcccttccccaggaaagggacatcacagac

SEQ ID NO: 621835 - DNA, 522 bp, Homo sapiens
caagcagggcagtacttggtgtctggggatgcagtgtgcgacctcctgtattcggtgcgaggcacatggggccagcaggagctggtgtgagcccgggtctgaagggtggtgggatcttagtggggaagactgggaagacagcagggaggaagaactcaggctggaggaggatgggggcctgggaggatccctgccacactgttaggaagccagggagcttgggtggtggtaggatgggaagagggcagggaaacggggggagggtgacacaggccctccggcagcagcggcttggccactggcgctgagattggtatgagtgactcagtgccaggttgcgccacagaaagctgaggctgcggatccttctcctgcctctggtagggccgtcttaaaggcagggtgagtgagcctggctccaagaggctgggtccgcaggcmggggctgacgtgggctggcccaagccccagctctcctcactctgagtgcttctatgctttctcacctccacgcttccaatc

SEQ ID NO: 621836 - DNA, 588 bp, Homo sapiens
ccttgtgaagtgtggcatgaggactctactggcttcagcttttctggtggcagtagaattgcccatctagtgcctactgatctgagtggacttgacttcttggccrtgtctctgtttggagttaaagaggaacgattttccttgtgcattattttgaaaatcacctttgaagtcactagttagagttgttttcaaatgcaaatgtcgaggtcacatgaagttgagtgaccacatcctgtggcacattcccacttgctcttctagtttatttttaatacagaccaagagtaaaaatatatacacaccccatttcagatgcaaattgaagccagactttgtttctacatatctgtgaaatggagtaagctaactaatgggaaaaaagattatgcctaatacttagacatagtttgctagtagttgctaatgtcaaaataacattgagtttttaggaaaaattaaggaatgtgtacagaatgatgctgcaattatagtctttatgtctttaatgaaatagatttaggatttcattagaaatccaatagaagtaggattttccacactaaggctcattagtcagagtcaagg

SEQ ID NO: 621837 - DNA, 568 bp, Homo sapiens
ataagtttgaaaacattccatgctcatgttcagggtcatatttttccctgtcttmtatgttcctctttgtggctataaacccaaacttatgtgttgtgtgttttttctatgacaattatggatatgacttatttactatatgctctatgaggtataacctaatgtcaactgacttcaactatgtttgccatacttccaaaaaaatagccactcatgtatctgtctgatcaggaggtgaaccgatggtgctgtatgaaattgagaactaattatctcataaacattctaagtggatataaggaattatgtgctcagttgcaaccactaatttatcgaagcaccgggtctaaatacctcagggaatgcacagaagcctgatggttgaaaagccttcaaagcattctctcagctaaaaagtacaagaattggggctcatatctagtgcctttttggacagttggtcacagaagcttagaaacattggcacaagtattgtcaggtggagcctggccgtgacctctgtgaaatggctgtcatgagcttggcagggtgggaataatggctctcc

SEQ ID NO: 621838 - DNA, 568 bp, Homo sapiens
ataagtttgaaaacattccatgctcatgttcagggtcatatttttccctgtcttctatgttcctctttgtggctataaacccaaacttatgtgttgtgtgttttttctatgacaattatggatatgacttatttactatatgctctatgaggtataacctaatgtcaactgacttcaactatgtttgccatacttccaaaaaaatagccactcatgtatctgtctgatcaggaggtgaaccgatggtgctgtatgaaattgagaactaattatctcataaacattctaagtggatataaggaattatgtgctcagttgcaaccactaatttatcgaagcacckggtctaaatacctcagggaatgcacagaagcctgatggttgaaaagccttcaaagcattctctcagctaaaaagtacaagaattggggctcatatctagtgcctttttggacagttggtcacagaagcttagaaacattggcacaagtattgtcaggtggagcctggccgtgacctctgtgaaatggctgtcatgagcttggcagggtgggaataatggctctcc

SEQ ID NO: 621839 - DNA, 568 bp, Homo sapiens
ataagtttgaaaacattccatgctcatgttcagggtcatatttttccctgtcttctatgttcctctttgtggctataaacccaaacttatgtgttgtgtgttttttctatgacaattatggatatgacttatttactatatgctctatgaggtataacctaatgtcaactgacttcaactatgtttgccatacttccaaaaaaatagccactcatgtatctgtctgatcaggaggtgaaccgatggtgctgtatgaaattgagaactaattatctcataaacattctaagtggatataaggaattatgtgctcagttgcaaccactaatttatcgaagcaccgggtctaaatacctcagggaatgcacagaagcctgatggttgaaaagccttcaaagcattctctcagctaaaaagtacaagaattggggctcatatctagtgcctttttggacagttggtcacagaagcttagaaacattggcacaagtattgtcaggyggagcctggccgtgacctctgtgaaatggctgtcatgagcttggcagggtgggaataatggctctcc

SEQ ID NO: 621840 - DNA, 560 bp, Homo sapiens
gaaatttgaatttggatctttgtgtgagatctctcaattcttaaatgttggtactacaaacaacaacaaaacccatatatgaaacaaaacacrtcggcaagtcacatgtgacccacaggtaactggtttatgccccactgtctttagtcatagccacttcaaaataagattttataacctgctgtactatgtttctggcaagaataatgctagtagataaggaacaagtagagtttgtaatgcgactagaacacagaagatatctgtgaaatagagaagaaaaccctggcttagccatcagatgatctgggtttgggtcttgcttctgtgctagctgctgagtcacaatgggtgaagcactccatctttttgagcatcaggtttcttacctctaaaataagaacaggaccgaggctgggcgcagcggctcatgcctggaatcccagcactttgggaggccgaggcgggcggatcacttgaggccaggagttcgagaccagcctggccaatggcaaaaccccaactctgctaaaaatacaaaaattagccaagtgtggtgg

SEQ ID NO: 621841 - DNA, 559 bp, Homo sapiens
cctatagagcttttcaagaacttgaagtgtgacacacccatgcaggagttaaaagttgtctttcaacagcattatagcttggtaagcaatggagaacccaactaatcattaataagtggttttgttagaatttttgttaaactaaagataaatacagtatgtttagctactggggtaataacctaaactagtctgtgaaagaaaaggttaactgaaattgggatgcctgcaaatcatctagaattttagtggatcttatttgttaaaaacatcatcacagatttatgtgtagagggaagtggtaagtgaaacagaaaatcagtaattagatagcagagcttccagaggttaaaaaatactttccaagttatayacagaacaatcctctgcaattatgctgattacatggcaagtaaatacctgtgtattctgacttcggcaactacagtattactgtctactgggtgaggaaagcacacttctgaaggtcactgagcatttgatgactagaaatctagatgtccttgatagttaaacagcaacatactaaagatgaaaa

SEQ ID NO: 621842 - DNA, 564 bp, Homo sapiens
gttttgttgggcttcatctatcatactagttgctaagagattttaaaggaagctgaacgttaactctactgataccaggttagatacatcttcataagctgaggaataattgggatcacaggaatcaaacaaatccatacattgaaaatcacagtcactatataaagaaaaggaagctgcataggaaagcttctggcactgaggttgagatcacactgcaacagaaattatttgaattctaagccaacataagaaaaaaagaatttattctaaaatttattgaacaagtttggagcaagcatcaatgaccatatgcttggaaatgctgcgtgggatgataaaggtttattattgttcccagacaggtccagtgtagttaaaaatggtggatgccagctgtctattgatgtrtatactttgtatagaaaacattcaaggtcagagtggctggtgccctgagtagagatagtgctttccagtgttaaggaggcttaaagcacgatgggatagatctgtgtggttttcccttcatgcataaagcagaaagaagtgtgttcctgtcct

SEQ ID NO: 621843 - DNA, 336 bp, Homo sapiens
ggttttaagagaaattatggtacattcacacactgaaatactggatacctggaaaaaatgagaaggatctgtgtgtgctatcctgaaaagtcttggataaattttcaagtgaatgaaagtatagactacaggacaatataaacatgtaggacaatataaaaatcaacatgtttacataaacacaaaaggatctggaaggagacacagcacacgattsaaagcagttttttctggtggttggcataaaggaagatgagaatatactgaatttttccttattccttttttgaagtgttagcttttattacaatgtacgcatcttactttttttgtttt

SEQ ID NO: 621844 - DNA, 555 bp, Homo sapiens
gatttcaacacttttgttaataaatcaagaaagcagaaaagcagtaaggatatagaygacctgaattactgtcaattaatttgatttaattgacatttatagaattttttttcaacaacagcagaatacatattctcaagctcacatggagtatttagtaagatatacctcattttggatcataaaacaaactttaacaacttttaaagaatagaacttacatgaaacatgttcctagaacaggaattaaatcagaaatcagtaacaaaaagttaactggaaagtatttggaaataaaatgacacaattataaataacccatatgtcaaagaagtctcaagagaaagttaaaacattttgaatgaaattaaaataaatacacaacttatcaaaatttgtagaatgaggcaaaaacagtggttagaggaaaattcatagctttaaatatctgtattgggaaagaagagagatgtttgtttcttttttaagatggctgactagaggcctttccagcatgcctcatcggcttaaaaaaaacgaaataatttcactttt

SEQ ID NO: 621845 - DNA, 591 bp, Homo sapiens
ctggtggtgacacctaagatctgggactgcattgcagactagaaactgatgtaactaactgaatatccttactacctgccacagctgaaatagagaagggagccccattaggtctggggcatgagaggaaagtagatttcactcccactggcaaaggctgtggtactaggaccactccttgccgagaccctggtgcagcagcagttgcctctcacctaggcattttgccacagacctgaggagtgcctcactgcacctgtcagggctagtgcttgtacctgccattgagagacctgagtgcaggcttctctggtccagttctgtctagctttgtaccacctccaaacagaggatgggacccagggtcctggrtgatccatggcccgactcaccacctgagacaaccaagtagtttttttttttttttttttttttggctaataggggttgggtacaaaccctactgctaccactgcagctggttcttacttgcaagcatcacctactggaagtatgcccacacagtccattacaactgctgacacaacagcatggtgctcaggaatgagaaaatctcacaaccactgctaa

SEQ ID NO: 621846 - DNA, 661 bp, Homo sapiens
aagacaaatagctaatgcacaaggggcttaaaacccaggtgacgggttaataggtgcagcaagccaccatggcacacttatacctatgtaacaaaactgcacgttctacacgtgtatcccggaacttaaagtaaaaaagtaataaawtttttttaaaaagaacatttggactgttattcttacagaatattttcagtaaaaactagatgaaattattcctcattttaactatttttgtttgctgatattaaatcatctgcatgagaactcactctcttccacagcattggattaaatgtctattcataatctcctgattttctagatttcatgccaaccaatcaggaggtaggataaaattatctcatatagattacaaacacaactgaattaagacacagcttgctttacatagtttattaggtactttgtaaaataaactagattaaaacattattatcacgattaacagcacagtgcagtgaatatggtatagattaatgcttaactccttgggctctggaagtaaggcgcctgtgtcatacttactaacttcatggtactggacacattacttccatatttaaacattaagtttcctcacctgtaaaatggagattaaaatgtactgagttatagtgataactaaacgagttaatat

SEQ ID NO: 621847 - DNA, 537 bp, Homo sapiens
aatcatcctataatgaacatgggatctcaggaaaccttgaatagctaaaataatcttgaaaaagtaaaacaaagttgaaggatttatgcttcctgatttgaaaacattacaaagctattacagtcaaaatagtatgatactcgtgtgaaggcagacatatagattaatgaaatagaatagagtccagaaacaaacctaaatgagggtgccaagatcagtcaatgggaaagagtctcttcaacaaatggtattcrgaaaactggatatgcacatgcaaaataatgaatttggagccttattttataccatatacaaaaattaactcaaatatattaaaggcttaaatgtaaaatccaaaaatgtaaaactcccagaagacatatgaaaaaaatcttcatgatattagatttgcccatgattttcatacataacaccaaaagcacaggtgacaaaagataaaatagacaaaagggactatgtcaaatttaaaacttttgggcatcaaaggacacaatcaattgagtgaaaggtggccta

SEQ ID NO: 621848 - DNA, 456 bp, Homo sapiens
gacagacttgaggagatggtgtttaaggactgaaaaacacactccacagtattgactgcgttattcagtgacaactacctgctgccatgtctgctctataaagcrgcgtaccaatggctgtggtgggctctgcatcatgaagcccactctccctatgctggtgtcctcatgacaatgtctaaattctcagaaaatgttatttctgttggctcttggctcatattgctcaccacatttggaaacttacatctttttaatctaatttccatttatttcccatagtctgcacttcatctcccctgctgtaactcttccctgtacttctagagtatctatcacactttaggatatgttctactgttatctggatttgttttatctagaagtttttagttcccatgtgatgtcttacagttttttttttttattttctgagcatttagtatccacaaattc

SEQ ID NO: 621849 - DNA, 456 bp, Homo sapiens
gacagacttgaggagatggtgtttaaggactgaaaaacacactccacagtattgactgcgttattcagtgacaactacctgctgccatgtctgctctataaagcagcgtaccaatggctgtggtgggctctgcatcatgaagcccactctccctatgctggtgtcctcatgacaatgtcyaaattctcagaaaatgttatttctgttggctcttggctcatattgctcaccacatttggaaacttacatctttttaatctaatttccatttatttcccatagtctgcacttcatctcccctgctgtaactcttccctgtacttctagagtatctatcacactttaggatatgttctactgttatctggatttgttttatctagaagtttttagttcccatgtgatgtcttacagttttttttttttattttctgagcatttagtatccacaaattc

SEQ ID NO: 621850 - DNA, 658 bp, Homo sapiens
aaatcaaatacaaagtatgaaatgaagagaacaaaaagtggtaaagatgaaagttaacaccataaatacaaacttgtttgctttctgtactagtctgttctcacactgctatgaacaactacctgagactgagtaacttatgaagaaaaaaagtttaattgactcacagttctgcaggcttaataggaagcatggctgggaggccttaggaaacttgcaatcatggcagaaggcaatggggaagtaagcacatcttaccatggctgagcaggggagagagacagggagaggaggtaccacacactttaagccatcaaatctcatgagaactcactatcatgagaacagcatggggaaaatccatccctacaatccagtcaccttctaccaggtccctcctccaacactgtgaattaaaatttcatgagatttgggtggggacacagagccaaaccatatcaccttccttctctcgccttctttaaaaraaaaaaaatgcatatattaatcgcaaaaatgtatggctgggtttctaacatatatagatacaccaagtatgaaaatgaaagaatatagctatacaagtaaagtttccctatcagattagaattaaggtagtataaatctgaagtcgatatgcaagggagagggtgggagg

SEQ ID NO: 621851 - DNA, 594 bp, Homo sapiens
ctttatcataagatgtaacattttacataaggtgtaatatgaccatacttatgttttgtaaatgaacattttggtttttgaatagaaaactaatataaaagatcaaaaatatatgaaggacgcacattatctgtacaagaaaagctacaaaactctaatgaaagaaatcagagaagtactaagtaaatgaacaggtatttcacttatttcattttatttcatggttaagaagattcaatattgtcatcatgccagtacttccaaatatgatttatagattcaatgcaaccccaatcaaaatcccagaaagttattttgtgggcaacagcaaacctacttattctaaagttaatatggagaggcaaaagacccagaatagccaacacaatattgaaggagaagaacaaagttgaaggacctacataaagataatcaactgatctttgacaaggaattaaagacaatgcaatgyaacagagatagtcttttcaacaaatggttctggaacaattgaacatctacatgcaaaacaataaatctagacacaggccttacactttacataaattaactcaaaatggaaaataaacctaa

SEQ ID NO: 621852 - DNA, 459 bp, Homo sapiens
cacctgaggtggggagttcgagaccagcctggccaacatggagaaactccgtctctactaaagatacaaaattagccaggcatggtggcacatgcttgtaatcccagctacttgggaggctgaggcaggagaatcacttgaacccaggaggcagaggttgtggtgagctgagatcttgccattgcactccaggttgggcaacaagagtgaaactccgtctcaaaaaaaaaaaaaaaaaagaaagaaaagaaaaaggaaaaaacaaaggagcattaataaattatctgaaatattgatactgtgaaatactactgactaataaggaaatatttgctgcacaaaattgtattagatttytattggtgccataacaaattaccacaaatttcgcagcttgaaacagttctaatttattattatatagttatttaggtcagaagtcccatacaggttatttta

SEQ ID NO: 621853 - DNA, 597 bp, Homo sapiens
gatgcactgttcatctaaaccatggccactgcttgtgaaacttcccagagcagtttcatcctggcagtggatgaatatggtcattatcaaacacacatatggcaaccacattttctgaacaccaaacagacayattggtctaacaataggacaaaatatttgatattggagaaatggtacccatgttactgatgctttttacaatattaactagtccatctttactatcttctccatgtctttcttaacaaattccggatggagaataactttccttgtatatatataatttttcttatcctgaagctttaacccttactcctctaccattaccctttgtctcactgccttacagacaccactgacctctgtgaaaggtgagtgtaagaaagtctaaatgcttcttcgtcaatactacaccattgctgcaaatatgacaccaagtggtacacaatcaaaacaggaaaagagggcaagacacacaccaattccatcaaatttgcttcagcttccttaaaacattagataacaaaactctggattagaggctgggcccaaagctatataagcttccctcagttttctgacatctgagaa

SEQ ID NO: 621854 - DNA, 597 bp, Homo sapiens
gatgcactgttcatctaaaccatggccactgcttgtgaaacttcccagagcagtttcatcctggcagtggatgaatatggtcattatcaaacacacatatggcaaccacattttctgaacaccaaacagacatattggtctaacaataggacaaaatatttgatattggagaaatggtacccatgttactgatgctttttacaatattaactagtccatctttactatcttctccatgtctttcttaacaaattcyggatggagaataactttccttgtatatatataatttttcttatcctgaagctttaacccttactcctctaccattaccctttgtctcactgccttacagacaccactgacctctgtgaaaggtgagtgtaagaaagtctaaatgcttcttcgtcaatactacaccattgctgcaaatatgacaccaagtggtacacaatcaaaacaggaaaagagggcaagacacacaccaattccatcaaatttgcttcagcttccttaaaacattagataacaaaactctggattagaggctgggcccaaagctatataagcttccctcagttttctgacatctgagaa

SEQ ID NO: 621855 - DNA, 597 bp, Homo sapiens
gatgcactgttcatctaaaccatggccactgcttgtgaaacttcccagagcagtttcatcctggcagtggatgaatatggtcattatcaaacacacatatggcaaccacattttctgaacaccaaacagacatattggtctaacaataggacaaaatatttgatattggagaaatggtacccatgttactgatgctttttacaatattaactagtccatctttactatcttctccatgtctttcttaacaaattccggatggagaataactttccttgtatatatataatttttcttatcctgaagctttaacccttactcctctaccattaccctttgtctcactgccttacagacaccactgacctctgtgaaaggtgagtgtaagaaagtctaaatgcttcttcgtcaatactacaccattgctgcaaatatracaccaagtggtacacaatcaaaacaggaaaagagggcaagacacacaccaattccatcaaatttgcttcagcttccttaaaacattagataacaaaactctggattagaggctgggcccaaagctatataagcttccctcagttttctgacatctgagaa

SEQ ID NO: 621856 - DNA, 479 bp, Homo sapiens
cagttttctgacatctgagaaactataagagaatatttctgctttcaagaaatttgtgcaaggatcatagatcactctattaaaataaattataaactkgttacagtttgactttggcatttctgaaaattttgtttctttccagctgtccctatttcccactgtgtccttttctttctcagtaaatctagggtggagtctgagagtctgcatttctaatgaggctccaggtatttcaatgctgcttgtcataaaccacactttgagtagcaagaaactaaacagtcaagatacaagacaggttaagtgtacaaggatatgtacattttcataatttcctgaagagtacccttttaacaaggactgaagaaatggctctctcatgactgaggagtggtgagtggataaaatgtgagatttggagtcagacaacatgagttctcaaagcaggctttggcatttgccaagtgatcttgagt

SEQ ID NO: 621857 - DNA, 572 bp, Homo sapiens
tggtcagaatggtctgagaacacttttcagaaaatattagatttgacaaattcccctccagttcagggcagtacctgtgttcttaatgcctgtgtatctcatgttgcctggctggacctgctatagaaaagaatgactagcattccctttgctttgtgacttaaccagaagtggctcttycttcttaaaaaaaaaaagaaaccttctcggccgggcccggtggctcatgcctgtaatcccagcactttggaaggctgaggtgggcagatcacgaggtcaagagatcaagaccatcccggccaacatggtgaaaccccgctttactaaaaatacaaaaattagctggacgtggtggtgcatgcctgtaatcccagctaccccggaggctgaggcaggagaatcacttgaacccgggaggcagaggttgcagtgagcagagatcacaccattgcactccagcctggtgacagagtgagactctgcctcaaaaacagagaaactttatctttgcatagagaccttcaggcaggaactccttttaaataagagattgtaattaatattatcactgg

SEQ ID NO: 621858 - DNA, 556 bp, Homo sapiens
ctgtgtgagtctgtcggcttcacaggaggaaggggaaaaggcagagtggtctctggtttcatccttcttaacgtctatttttcacctccattgactccccagctccctctgactcccgtgggtgagccctgatttcccccactgtcaatacctgaatccagcctccctctccccagccccttgacttccccactaacacactgaacccttcatgtttcaggaagtttgtgagggcagttggcgaggtgaattgtgctccctgacaagtatgcaaagcattttgtgatatagtggatctggaagcccctattataggagatttactattctgttctaaggttgcactccaggttgaaattggctgacaaggtyttagcttgggtaggatttattccccatatattaaattatttttttaattagttcaatgcccaggtcatttctaaaccgaagaaatgtgaaataaataagtttctgaagtaaaaaagaaataggccagcatttgagtgagttgttaagtttagacaaaaatgtttgtagcccccaagccattata

SEQ ID NO: 621859 - DNA, 622 bp, Homo sapiens
aaactgttttttgttgttgtagttgttgttcttggttttgtctgagatggagttttgctctttcacccaggctggagtgaagcagcrccatcccggctcactgcaacttccgcctcccaggttcaagcgattcccctgcctcagcctcccaagtagatggggtcataggcacccgccatcatgctcggctaatttttttgtatttttagtaggacaaggtttcaccatgttggccaggctggtctggatctcctgacctaaggtgatccacttgcgtctaccttccaaactgctgggattacaggcgtgagccatcgtgcccagccacaaaactggtttttgacccttgtcttccaatcacgaatcaagtcttcttttataacaccaagcacaaataacctaaaagtgttactttctcaggggaataactcttcaaataaaaatggaaaaagaagtctgtgcttcattgatctctctggtttattttctgagagtacagtcacctataatgcaaagacacttttcctattagtgtcaacaacacgacactattatgttgttacaacatatagtggccataacatattccattatatcagcagattttgtataataagaaaca

SEQ ID NO: 621860 - DNA, 486 bp, Homo sapiens
ctgtacaatggttgtcattttatttccttctttcttcttgcaatacacacttacctaatatgactgacagagcctattacattctaaatccataatcctatatctctatatagaatgacctctaatggaatagtggagtatttgaagtttcaaaagccaacacagtaagttgcttgcgatggttttccgtggcctaggaaaaaaatcaatatctcaatgcagctaatataatgaagacattttttgctggtaaggctgaaaagtgtagaaatttgagactcccattaaaactccttaaaaaagaagaaattctgatatagttagtgttgcttcaaagattcctagtacatgctgacttaccaggcttctcagcacaatcagtattttttttwaaaaaaaaatttaaatgtatttaattacttgtttgtattaatctgtgttacagtgttgcatttatatgtactttttctggtcttctcataacta

SEQ ID NO: 621861 - DNA, 561 bp, Homo sapiens
agccttgaatttacccatcagcaygcacagagcatgggagtacataagagaaaagcctgtcttggcacctaacaaaagggcagtatcttgactcaggtgtctttttctcatcttccttcatcttcatctatcttttcgtttattcagtcaacacataattattatgccagtgaccgtcctaggagcttgggacataataatatagcaggcacaatccctacccttacaaatcttacagtctcaaccaaggtgtcgcaaccatagcattattgacatttagggttggataattctttcttgtgggtaggctttgctgtacattatagtgcagggaaggaaaatattttttctctacccatcttagatttactggcaggggcactgtaaatgacactgacaaaagattaacgagatgaaaacaaacaaatgtattaacatgtgcatcaggcatatacatgggagcattcacagatgggtaactcaaaagagggattaggacttgggtttttatagcatcataacaaaagaatctacttcagtacatcaacttgtgctgaagta

SEQ ID NO: 621862 - DNA, 533 bp, Homo sapiens
caagcttccaactgcttattaaagtagttagaaatccattactctgacattcaaggtcctctacagtaaagctttatgcaaccttggtgagcaaactgaactagttgatggtccacaaaaatttcctgcattttttgaaattatgctgtatcttctacctgaatgttctcctagtcctatggatgtctgttgaaattcaatccatcctttaaagctcatttccattgctrctgatttcatgcaggattatctgattacttctcaaaacactttaaaaagaaaagatgtcatgtctccttcttgtgccctttgctactgactctttggaaacttctcatcttcatctattcatcttttgtatatttgtcttaagtgcaccagtagcacaactacttgagggccagaactatcttattttttaatccctcaaaatggtttaacacagtagttccctatacgtagttcacacttcttaaatattttaaataaaaatttaaaactcaacaacaaaagagaaacaaaccagtttttaa

SEQ ID NO: 621863 - DNA, 533 bp, Homo sapiens
caagcttccaactgcttattaaagtagttagaaatccattactctgacattcaaggtcctctacagtaaagctttatgcaaccttggtgagcaaactgaactagttgatggtccacaaaaatttcctgcattttttgaaattatgctgtatcttctacctgaatgttctcctagtcctatggatgtctgttgaaattcaatccatcctttaaagctcatttccattgctactgatttcatgcaggattatctgattacttctcaaaacactttaaaaagaaaagatgtcatgtctccttcttgtgccctttgctactgactctttggaaacttctcatcttcatctattcatcttttgtatatttgtcttaagtgcaccagtagcacaactacttgagggccagaactatcttattttttaatccctcaaaatggtttaacacagtagttccctatacgtagttcacacttcttaaatrttttaaataaaaatttaaaactcaacaacaaaagagaaacaaaccagtttttaa

SEQ ID NO: 621864 - DNA, 514 bp, Homo sapiens
ataaaacttcacttgtcaaccttgataaactccaggaaaaagccgttgcaactttattttccctagaagaaagagaaaaaataaatacaatatttgatcctgaaacattaaatattgctacatggtttcataaaagaactttgtgcagctataaaattaccaactataaaattagactcctcaatcctcagagcaaatggaatatttgtccctcagtgcagcagtgttgatccataatgactgttattagtttcactttaatactacaaaatatttcacttgcactagttattagatctttgcaatgcattctgtctccatagctctttttaactccatgtgatmtttattttatagtcgtcatctgtgatatcaccatgacaagtggcacttaacgaaacacgataagcatgtttgccatccctgcctagtgaccgatttattcagaggtcttttttccaaacttgaatttcttttgaattgctatagaatctgattcgcttcattgcaaata

SEQ ID NO: 621865 - DNA, 526 bp, Homo sapiens
acatcatcccatcctttgaggaccctgatagagcaaagaggggaaggaagagcaaatcctgtatttctcttcttgaactgggacatctgtcttctcatgccctcagacattggagctcctagttctcagacctttgacgttgggctgctagttatatcatttgctcactgtgttctcaggattttgaacttggattgaattgaaccactggctttcctggttcttcagcttacacatggcatatcttgggtcttcttagtctccataatcatatgagctaattcctcataataaacctaatctcatctatctatctacctacctacgtacctacttactattatctatctactatctatctgcttactgttagttttttttctctgcagaaccctgactaacacataggggatggatggtgttatctgaacaaataaaatrtaaacaatctacttcagtgaggacatcaaaaatctgtttgcaagagggaaaattctatccagggtatagttcttcattgattgta

SEQ ID NO: 621866 - DNA, 604 bp, Homo sapiens
tctttgaaatcctggaggtttgtggtgtatattttgcaaattgttgcagggccaacatctaaatttttccagatgagaaagtaaggcacagagaagttaaatgatttgtctaaatttacgaagttattttkcactgggatgaggggcccagctctctgtcttgatcatcacctccctaacattcattacattttggtttttcaaagttcttggtgaaatgaaatagataaaatatgtactgactcacagcatagtagaaatagaacagagttcacgtcccagctccaccattctctgatatgacactgaaaatcaatgcccttctctgagcctcagtgttgtcatttgtaaaaattagggattgatgtgatattacggtggggaaatgaatgtgtaaataaagctctgagatctttatttctatttaaagaggaggaagaaaaaaattatatatatataaacttttagtctgtctctacttttcccctcccttgtttgtgaaactgtctctttaacgacattcaacacaatggtaagtaacttatgttacttaagaaatgctggttgctataacaaacaaactctgaaacctcaagaagcttaa

SEQ ID NO: 621867 - DNA, 546 bp, Homo sapiens
ctatctttattctagtactatgaatttgtgatgagggatgctttatagtaagttttgaagtcagcaaatgtgcgtctttcaactttgttcttaatgaccttaaattataaaatattttcttagatatgacaccaaaagcaaacacaacaacaacaacaacaaaaacatatactgaacatcaaactaaaaacttttgggcttcaagagacagtatcaagaaagtgaaaatagagtgcacagaatgggagaaaggttttgtaaatcacgtagctggttgctatatacagtacatatatataaaaaattacaactcagtaattaaaaagacacacaatccaatttttaagatgggaagacgagccaaaggatctaaatggatatttttccaaagaagatacacaaatggccaccagattacatatacaaatgagcaycaggaaaagatgctcaacataattagccttcaagaaaagccacaaggatttactgcttcaaacccactaggatggctatactgaaaaggagagatagtaagtgttagcaagg

SEQ ID NO: 621868 - DNA, 546 bp, Homo sapiens
ctatctttattctagtactatgaatttgtgatgagggatgctttatagtaagttttgaagtcagcaaatgtgcgtctttcaactttgttcttaatgaccttaaattataaaatattttcttagatatgacaccaaaagcaaacacaacaacaacaacaacaaaaacatatactgaacatcaaactaaaaacttttgggcttcaagagacagtatcaagaaagtgaaaatagagtgcacagaatgggagaaaggttttgtaaatcacgtagctggttgctatatacagtacatatatataaaaaattacaactcagtaattaaaaagacacacaatccaatttttaagatgggaagacgagccaaaggatctaaatggatatttttccaaagaagatacacaaatggccaccagattacatatacaaatgagcaccaggaaaagatgctcaacataattagccttcaasaaaagccacaaggatttactgcttcaaacccactaggatggctatactgaaaaggagagatagtaagtgttagcaagg

SEQ ID NO: 621869 - DNA, 635 bp, Homo sapiens
gtcatactggagtaaactcttaatctaatatgactgttttttttgtaccaacacaatgtgaagacacggggtggtggcagtggcgggggaagccctgtgatgagggaggcagagattgcagttatatagcgcaggccaaggattgatagtgacaccacaaacaaacagaagcacaagaaacagattctcctgctkacatcttgatttcaacttctagcctccagaactgacagaatttattgctcttgtttaagccatccagtttgcagcactttgttaaggcatcactaggaaactaatacaattactgaatttacaaatgataaaaattattcttgcaaagggtgctcttttatcttaatttaattttcagggcaggagtgtgaaagattatcccaactctgtccaggcagttgtgaaccctctatccaccatctttcaaaaacagtaagttctatctctgcactgaggctcaatgtgatattaaaacaatctctaggttacagcaggccctgtacactcagcatgtatcatcctttcacaaaaagaggtcattaactggtgttggccatggagtcaaacctttttaaaaaatgtttaagaggaatacatgatctctatataaatagatttca

SEQ ID NO: 621870 - DNA, 541 bp, Homo sapiens
tttccaaatcctgcaatgtcgagtagctccctggttgtcagcagagtggacatcgatggtcagtgccaccctggctttacaggcaggagtaggagaaatgggctctagccctacaaagttcaatgtggcttctccagttcaagtttcaatagccatcaattaagggttgcagacaaacctactgtttcctttactagttgacctattaaagaaatgtgtgaagacaactgtttttgtttttccttgcagacagaatagccccagtgatcctaaactgtgtacccacaggtcttttagttatgtgcayggtgtttttaaaggtgaagttactgagttttgcgtttagtttggaaacagtgccacccatttaatccctactgcctcacatctggtgctgtcactcctgtatttgaaggccatgctctttgcagtcatttcactttgggtgccttgatctaaacccacaccagagagagaatattttctccattagcaaatggtcatcattatgctgagagtcattagattttgttttttcctg

SEQ ID NO: 621871 - DNA, 325 bp, Homo sapiens
taccattccctggggtgatcagctagctacctggtggcaggagattgagttatggtatagggacatgtgtttgggtgccaagttgacaaggggtggacttaattktatgtgtcaactctactgggttaagagatgcctgggtagctagtaaacattatttctggatgtgtctgtgagggtgtttccagaagacattaggatttgaattagtagattgagcaatgaagatttgccctgagtaaagaaaacttgaggacatcatcccatcctttgaggaccctgatagagcaaagaggggaaggaagagcaaatcctgtatttctct

SEQ ID NO: 621872 - DNA, 526 bp, Homo sapiens
acatcatcccatcctttgaggaccctgatagagcaaagaggggaaggaagagcaaatcctgtatttctcttcttgaactgggacatctgtcttctcatgccctcagacattggagctcctagttctcagacctttgacgttgggctgctagttatatcatttgctcactgtgttctcaggmttttgaacttggattgaattgaaccactggctttcctggttcttcagcttacacatggcatatcttgggtcttcttagtctccataatcatatgagctaattcctcataataaacctaatctcatctatctatctacctacctacgtacctacttactattatctatctactatctatctgcttactgttagttttttttctctgcagaaccctgactaacacataggggatggatggtgttatctgaacaaataaaatataaacaatctacttcagtgaggacatcaaaaatctgtttgcaagagggaaaattctatccagggtatagttcttcattgattgta

SEQ ID NO: 621873 - DNA, 478 bp, Homo sapiens
ttgtggtgctgtttgatagcattttgtccacagtaaaaattctttcaaacttggaggccactctcatatcctgacactgctgcatcaactaaatttacgtagtattctaaatccttattgtcatttcgacaatgttcacagcttcttcaccaggagtagattccatctcaagaaaccatcttctttgctcatctgttaagaagcaactcctcatccattcaagtcttatcataagactgcagtaactcagtcctatcttcaggccccacttctaattctggttctcttgctatttccaycacatctacagttacttcctccacttgagtttgaacccctcaaaatcacccatgaggactggaatcaaattcttccaaactcctgttaatgttcatactttgacctcctcccatgaatcacaaatgttcttaatggtatctagaatagtgactcctttcccgaaggttttccatttact

SEQ ID NO: 621874 - DNA, 610 bp, Homo sapiens
gaactattgataaatgcaacatggattaacctaaaaaatattatgtaaaaaaaaccaaacataaacgttattgtggtgaaagccacgtaacataaaatttaccaccttaaccattttaaagtgtacagttcagtagtgttgagtatattcacattgtttaccttgtaaaactcaaactctataccccttaaacaatgattatcctttacctcctccctaatactgcatgattcaaattatatgaaatttcacaagcagcaacctatagtgacagaaagcagattagagtttgggggtgggtagaactgactgccaaattagaatggaaatattccatgcatcaagtaagrctgatgtttacccaggcttaaacatttgccaaaatgcaataaactgtacacttaacatatttcaataaagctgattttaaaagtttttttaaaaagactaatgaacaaggatggagaagaatagccttattgtgtattgctacattagtaaaatttgggttgtagctccctctactgtagcaaaagaaattggcaagcatatttcaaagattaaatttttgaaactggaaaaatgcttatattaaatagtagaagtgaaa

SEQ ID NO: 621875 - DNA, 499 bp, Homo sapiens
tgtggtgataaatttgatcttaattttatgctatttcyctttcctttaataacaaatttgttaagactatgtttccaacttgtgatttctgagctgcctaatgcctgatatatatgaactcagaaaaaaatggttgaaatgtatcctcaaaatgtatacttttctcagtttatcagatctttaaataaatgtgcaacagaattgaggtaaggtgcaatgaaaatctaattcaaagaaagatctaggtgaatgggtgtagacactaaggtacatatataaaataatacacaccttcaaagtttttgataagaggcttatgacagtaaatggtataaagtgatagaaccatagagaatccacgtgggagatattcattcagcaattcaagtgctgctactagagaaccgctcctaggagtcttggtgttctatctgctaatttcctcgcaattctttcagcttaagagacttttgaccaactgctatttcactgaatccaa

SEQ ID NO: 621876 - DNA, 611 bp, Homo sapiens
cagtatccctttatcttcctttcacttctttcctgtatttatgtcttcttttttggtttatatccagttttcatggagcatatgttccaaaaacttactgagaaagaggattggaagtggatttttgataccttacatggctaaaaacccagaattctaagttggaattaattttctctcatgaatcaactgctccaatgcttctagctttcatgactgttcttgagaggtctgaaggcactctgaatccagatctacgagactttattctattctctctccctgtggaagctgagatctttcctttaccccagtggttttgaaawtccaaggtgctgtgccttgttgtgggtctgttttcatcttctatgctgggatcttgatggtgtctttcaagctggaaacatatccttctatttttggatattttcttaaccttgttatattcatattttaaactttaaaagtcaaagtataacacacatacacaaatatgccaaatcttacatgtttatcgttcaataaacatttctaagtcaatactgtttattaatatttaaaagtaaggcactaacatgctgattagaaactgtagtcaggttggcactgga

SEQ ID NO: 621877 - DNA, 608 bp, Homo sapiens
aagaacctatataggtgagttccttgctaagttccaggtctcttcctagattcctgacagtgccttctatctgaatgtgtagtagtaattatggtctggttgactgccttcctgcattccaccctattctcatctacaccatattcagagtaacttggagtgttaatcatataggtaggatccttctctatttttcacggatgttgtgatggatcaaagttttatgttctgtattgtttgacttgccttagcaagaattgagggggtggggtgatgagttaaaggcatgtgcttaaattttattcccagaatacttttccatttgtattacaaataattacaggagaggaatcctggatacagacagtagacagcaactgtaacacatgcagaaaaggtatttattggaaggatgttagactgtaacacatgcagaaaaggtatttattggaaggttattaggttgcttcagaattgacataaaagtctgaagaactaggtttagtaaataggcattaagtgaagccagatacacagaaccactgtcagtgctgctgattaatgagcattggttatggcrttgctacctctggatactggatgtgtct

SEQ ID NO: 621878 - DNA, 614 bp, Homo sapiens
ctgggctttgtctcaagtcccctccctgtatcatgtcctggaaactctatcaagacagctggggcaattacagggcttacttcatttgtttcctgtttctcagagattactgtccttcattgcctcctgtctggtgtttcaaaaccattatttcacatatattttgtcatttatttcaggcagaagggtaaatctggttccatctttagagtaagcagaagttccactcatccattgtgagagactgtgtcaaacaatttgctgaatgccatgtaattatgttcatggaatcccctactctcaagtctattattaatccaatccaaaaagaacattagatggtccagcaagaacttgttcttagaaatcctttctgattcttcatgatgactagttcctttctgtcttcataccatgacttcctagaattttgtgaaaatggacattaaatacatctatattttcttcaatccaactgcatttgtagtagcaatttaaaataaycagttacttttcttcctttggggttctagtttcatcttagccatatttgtttacctggaatataatctgttattttaaattactgcaagaatccaaataaattatatatc

SEQ ID NO: 621879 - DNA, 563 bp, Homo sapiens
tcctttaacacttattatatattctaggaaaaatacttaaaatccaggaggagagaggaagtaaaaattatgctgtagtgattagaacagaagaaaaaggaccaccagtaaagagtgctattctagaatcatgacccagaattctagaaatgaaggctttcatgaggaagggtaatagttaacagtgttaaatatcctgwtaagttcacagtactgtgtaaggtacataaaaaatggcttgttggtttcaggaattagggagctgtggtgacagcagtagagaagtttcagtaacattaacaaacgagaggagagattgcagttgcatgagaaatgaagatgcagaaagtagaaaaatattttccacagggtgtttgtgaaaaacaaatgaagtattgataatattttgaaaactataaagcattacgtatttgtgaatgttttcaatatgtttttcacagaattcagaggtgtctgtgtttgaagtcaacattcgatttattggaggcctacttgcagcatattacctatcaggagaggaggtgagcaaaatcaagcaatgc

SEQ ID NO: 621880 - DNA, 563 bp, Homo sapiens
tcctttaacacttattatatattctaggaaaaatacttaaaatccaggaggagagaggaagtaaaaattatgctgtagtgattagaacagaagaaaaaggaccaccagtaaagagtgctattctagaatcatgacccagaattctagaaatgaaggctttcatgaggaagggtaatagttaacagtgttaaatatcctgataagttcacagtactgtgtaaggtacataaaaaatggcttgttggtttcaggaattagggagctgtggtgacagcagtagagaagtttcagtaacattaacaaacgagaggagagattgcagttgcatgagaaatgaagatgcagaaartagaaaaatattttccacagggtgtttgtgaaaaacaaatgaagtattgataatattttgaaaactataaagcattacgtatttgtgaatgttttcaatatgtttttcacagaattcagaggtgtctgtgtttgaagtcaacattcgatttattggaggcctacttgcagcatattacctatcaggagaggaggtgagcaaaatcaagcaatgc

SEQ ID NO: 621881 - DNA, 468 bp, Homo sapiens
tatgtgtctgtctttggtactaccacattgtattcattattatggctttatagaaagtcttgaaatcaggttgtgtgagtcctccaactttattccttttcaaaattgttgtggctgttttagttacttttcctttttgtataaattttagaatcaacttgttggtttctataaaatctactgagattttaactgggattataaattttgagtgatttgacatcttcacagtattgtttcagtccatgaataatggtatatctctccatttatttatttttttattggtgtttctactytttagcatacagatcttgtatgtattttgataaatttatacatatttcatgtttttggtagttctgtattttaaattttggtttcccattgttcattgtcagtatatataaatacatttgatttttaaaaaacctttaataaagacttaaattctcagttgtctcagga

SEQ ID NO: 621882 - DNA, 604 bp, Homo sapiens
gttttgatttttagtagagacaaggtcttgctgtgttgcccaggctagtctctaactcctgaactcaagcaatcctcccaccttggcctcccaggattgctggttatgagccacctcacccagccagtatttttaataattttatgcatgaaataaagttttaactgcaacctgtcacatgaggtcaggcatagaattttccaattgtggcatcatgtcagttcgaaaagttttgaattttgaaggatttttgattttgatttttttttttttttgagacagtcttgctctgttgcccaggctggagtacagtggtgtgatcatggctcacagcagcctcagccccctgggctcaagcaatcctcctacctcagcctggaactacagatgtgcgccaccaygcctggctaatatttttgtagagacagggtttcattattttgcccaggctgctcttgaactcccaagctcaagcaatccactcatcttggcctcccaaagtgctgggattaaaggtgtgagccagcaaatctggcccagattttgaatattttgagtagggatgctcagcctggacctgcatctctccagaagcactacagta

SEQ ID NO: 621883 - DNA, 467 bp, Homo sapiens
gctcatgcctgtaatcccagcattttgggaggctgaagcagacagatcacttgagcccaggagttcaaggccagcctaggcaacatggcaaaaccctgtctctaccaaaaaataatttttaaaacattagctgggtgtggtggcaagcacctacagtcccatctcctaragaggctgaagtggaaggatcatttgagcccaggaggttgaggctgcagtgagccatgatcatgccactgtactctagcctgagcaacaaaggtgagaccctgcctcaaaaaaaaaaaaaaatatatatatatatacataatttcagaagtctgtcttgataagaacaaaaaaaagccaacaatttttaaaaaagaattgtccattaatttaaaaaggaagttatttattacattttcctaaaatgaaaacaataacaacgtcaaaactaaagtgctgagctaacagaccactagcta

SEQ ID NO: 621884 - DNA, 467 bp, Homo sapiens
gctcatgcctgtaatcccagcattttgggaggctgaagcagacagatcacttgagcccaggagttcaaggccagcctaggcaacatggcaaaaccctgtctctaccaaaaaataatttttaaaacattagctgggtgtggtggcaagcacctacagtcccatctcctagagaggctgaagtggaaggatcatttgagcccaggaggttgaggctgcagtgagccatgatcatgccactgtactctagcctgagcaacaaaggtgagaccctgcctcaaaaaaaaaaaaaaatatatatatatatayataatttcagaagtctgtcttgataagaacaaaaaaaagccaacaatttttaaaaaagaattgtccattaatttaaaaaggaagttatttattacattttcctaaaatgaaaacaataacaacgtcaaaactaaagtgctgagctaacagaccactagcta

SEQ ID NO: 621885 - DNA, 483 bp, Homo sapiens
tctacaagtgtgtatttgttaaatctcaatgaactgtaccatcaaagggatatattttattgtatgaaaattataccttaataatattttttaagaaaaaagtaaatgcggccatgtcacattcttacctaaactttctggtgtctccaagtggccgtaagggtaatgaaaaactccagagccgagaacccgacaccctccatgaccctgtcacagcctaccttccaggcttacccctcagcacttcttcaaacccaccctgtgccccactgaatgctccttcccatgctcccgatctgggaaacttagactcatccttcrgtttgctgaataagcctcacgtcccccagggagcattcactgaatgttccttccagggaagactaaagcacttccttttccaggttcccgttacgctgtgtactgacctcaactgcaacacttcttgcagtattgtaattactatttacatgtcctcatgcc

SEQ ID NO: 621886 - DNA, 497 bp, Homo sapiens
tcattcactatcacaagaactgcaaaggaaagacccacccccatacttcagtcacctcccactggcttcctcccacaacactagggaattgtgggagttacaattcaagatgagatttgggtgaggacacagtcaaaccatatcaaggttgcattcagtcaagacacctatcatgtcataaacaaccagttggatttgtcaaatgattgactaatcaatacactacttattgtctgctcagmtcgtgtctcatgtaacagcccatggtgagttgagagtagagttgaaactgtaatttgcaccctttattccagtttaaccagttgagtactcacagggtaatgcaccctttattccagtttaaccagttgaatactcacagagtaagccagatggtttgctttacctttgggctaggagaaagggcctgattgggctcagtcattggtggctatgtggatgagcacattactgtttttttttttttcctgcagcag

SEQ ID NO: 621887 - DNA, 497 bp, Homo sapiens
tcattcactatcacaagaactgcaaaggaaagacccacccccatacttcagtcacctcccactggcttcctcccacaacactagggaattgtgggagttacaattcaagatgagatttgggtgaggacacagtcaaaccatatcaaggttgcattcagtcaagacacctatcatgtcataaacaaccagttggatttgtcaaatgattgactaatcaatacackacttattgtctgctcagatcgtgtctcatgtaacagcccatggtgagttgagagtagagttgaaactgtaatttgcaccctttattccagtttaaccagttgagtactcacagggtaatgcaccctttattccagtttaaccagttgaatactcacagagtaagccagatggtttgctttacctttgggctaggagaaagggcctgattgggctcagtcattggtggctatgtggatgagcacattactgtttttttttttttcctgcagcag

SEQ ID NO: 621888 - DNA, 523 bp, Homo sapiens
aatgcaactcagaccctctgacagcaagagtcctggaagcccccaccacaaagatgatctacaggtctcgttgacaccattggctgatgcttgaaaactcaagtgagcagtttccaagtgtcaagtctatgaactcattcctcaaggttttcaaccactgtacctagttaargttgacagggaacttcctttttccatccattctttttccatcaccactgcccccaccacaccatttgccaagcaaaacaataattctctgctcaaagtacaagcactggccaggtttggtggctcaagcctgtaatctcagcactttgggaggcctaggcagggggatcacttgaggttcaggagtttgagatcagcctggctaatatggcgaaacctcatctctactaaaaatgcaaaaattaaccagatgtggtggtatgcacctgtaatcccagctactcaggacgctgaggtgggaggattgcttgaatccaggaggcggaggttgcagtgacccaagatgttgcca

SEQ ID NO: 621889 - DNA, 523 bp, Homo sapiens
aatgcaactcagaccctctgacagcaagagtcctggaagcccccaccacaaagatgatctacaggtctcgttgacaccattggctgatgcttgaaaactcaagtgagcagtttccaagtgtcaagtctatgaactcattcctcaaggttttcaaccactgtacctagttaaggttgacagggaacttcctttttccatccattctttttccatcaccactgcccccaccacaccatttgccaagcaaaacaataattctctgctcaaagtacaagcactggccaggtttggtggctcaagcctgtaatctcagcactttgggaggcctaggcagggggatcacttgaggttcaggagtttgagatcagcctggctaatatggcgaaacctcatctctactaaaaatgcaaaaattaaycagatgtggtggtatgcacctgtaatcccagctactcaggacgctgaggtgggaggattgcttgaatccaggaggcggaggttgcagtgacccaagatgttgcca

SEQ ID NO: 621890 - DNA, 547 bp, Homo sapiens
tggtgctgagtggtaccactccaccacacaggtaataagggcccttccaaccatacatggtgccctggagccatgcagagcccaggaactggtcagtgcactgaggatatcacacttccatgctgatccagccttccagggtcatgcaacccggggatcatgggaagaaaccagacattatgagaatctcactttaaatgctcaggaattaagtcaaggrccaccatgggtttcgcatcacccagtgggtcacgatgtttatccatgcacctgctgtccctctgctggaatgtttcctcctctctcagctctctctagaggtatccctacccaaagggacctttcctgacagccagacctgccaacgttccctctgacattcgcatgtgtaggccccactagctgcatagcactctctgtgcttggttacagatacctaaaccgatagatatacatatattatttcaagtgcattgtaatatgttacaatatgttataccataaacaacgtatttctgaaatatatgtgtatgcatgtgtgtgtgtg

SEQ ID NO: 621891 - DNA, 547 bp, Homo sapiens
tggtgctgagtggtaccactccaccacacaggtaataagggcccttccaaccatacatggtgccctggagccatgcagagcccaggaactggtcagtgcactgaggatatcacacttccatgctgatccagccttccagggtcatgcaacccggggatcatgggaagaaaccagacattatgagaatctcactttaaatgctcaggaattaagtcaaggaccaccatgggtttcgcatcacccagtgggtcasgatgtttatccatgcacctgctgtccctctgctggaatgtttcctcctctctcagctctctctagaggtatccctacccaaagggacctttcctgacagccagacctgccaacgttccctctgacattcgcatgtgtaggccccactagctgcatagcactctctgtgcttggttacagatacctaaaccgatagatatacatatattatttcaagtgcattgtaatatgttacaatatgttataccataaacaacgtatttctgaaatatatgtgtatgcatgtgtgtgtgtg

SEQ ID NO: 621892 - DNA, 547 bp, Homo sapiens
tggtgctgagtggtaccactccaccacacaggtaataagggcccttccaaccatacatggtgccctggagccatgcagagcccaggaactggtcagtgcactgaggatatcacacttccatgctgatccagccttccagggtcatgcaacccggggatcatgggaagaaaccagacattatgagaatctcactttaaatgctcaggaattaagtcaaggaccaccatgggtttcgcatcacccagtgggtcacgatgtttatccatgcacctgctgtccctctgctggaatgtttcctcctctctcagctctctctagaggtrtccctacccaaagggacctttcctgacagccagacctgccaacgttccctctgacattcgcatgtgtaggccccactagctgcatagcactctctgtgcttggttacagatacctaaaccgatagatatacatatattatttcaagtgcattgtaatatgttacaatatgttataccataaacaacgtatttctgaaatatatgtgtatgcatgtgtgtgtgtg

SEQ ID NO: 621893 - DNA, 596 bp, Homo sapiens
agagagtagaaagtaaatggagaaaataaaatattacataattcattgctatggagggacaaaagagttttgcttggacaatcaacaccttagaagctgccgtacccataatcaaatgtgcgccatattttgccaagtatcccgggctgtcacatctgccatcaccacctgtgatcattttcttcctcttttgcgctaaataatcaattacaagattctaggtttttctccctttactcatttattactggctcaagaccttgcttccagtagtgccagagtgaggacgcaggagctttctgcttcggaggacaggacagacgatttgtgaatcattaaytgggctaaggacagatacagtcattgacaaagtgtgtgaatatctgctttgaaaatgcttttaaagtataaaaattcacaaaattccatgctgctgaggttttggggctgagccaggctctctctgggctatcattgggagggttaaattgtcacaaactttctagagagcaatttgacacatgcattgctttaccatttaacccaatattttctattctatgaagccatcctaagaaaatgatcagtgcctaaca

SEQ ID NO: 621894 - DNA, 596 bp, Homo sapiens
agagagtagaaagtaaatggagaaaataaaatattacataattcattgctatggagggacaaaagagttttgcttggacaatcaacaccttagaagctgccgtacccataatcaaatgtgcgccatattttgccaagtatcccgggctgtcacatctgccatcaccacctgtgatcattttcttcctcttttgcgctaaataatcaattacaagattctaggtttttctccctttactcatttattactggctcaagaccttgcttccagtagtgccagagtgaggacgcaggagctttctgcttcggaggacaggacagacgatttgtgaatcattaattgggctaaggacagatacagtcattgacaaagtgtgtgaatatctgctttgaaaatgcttttaaagtataaaaattcacaaaattccatgctgctgargttttggggctgagccaggctctctctgggctatcattgggagggttaaattgtcacaaactttctagagagcaatttgacacatgcattgctttaccatttaacccaatattttctattctatgaagccatcctaagaaaatgatcagtgcctaaca

SEQ ID NO: 621895 - DNA, 465 bp, Homo sapiens
tttttgcctttcttcattatggattggttccagatgtggagcatcatcttatgaccacaaaaacactctgagagaagtattaagaggaatgaagagactttatcaccgacatctacgagctcctgaactaataccagaaagtacttatctctggacatctcacaatgtgagaaaaaacacaacatataatttgtttaggccactgttggcaggggggttgtgttacttggcagcaattcttcactcacatagtaattcagagtagtgcctagaggaaatggttacatcaccataatagaggagtacatgaatmcttcaacctgctgaaatatatttcagcagtcctaccttattcgtggttatgcttccaggtctcagtttcatgcagttaactgcagtccaaaaatattaaatgcaaaattacagaaataaacaattgatacgttttaaattgtgtgttattct

SEQ ID NO: 621896 - DNA, 346 bp, Homo sapiens
  misc_feature 23: n = A,T,C or G
ttctttgctcccagttgatgatnctttataaccatattgcagatatatacatatatatatatacacacacacagatatgtttcttaagatctccacattcttgagaaaatatgactaaaaggcatttagtttatctcattaaggtcttctgaccaacttatttcttattttttgagacagtgtctctctctgtcacctaggctgcagtatagtggtgcagtcatagcttactgcagcctcaaaytcctgggctcaagcaatcctctcccctcagtcctcccccacctgggactacaggcacatgctaccatgcccaggtaattttattttattattagtttttgta

SEQ ID NO: 621897 - DNA, 602 bp, Homo sapiens
aggcaccaaggtccaatccaggagaaacagagctatataacctttgaggcaaaatattcaaaattgctgttttgaggaaactcaaagaaattcaagattatgcagagaaggaattcacaattctgtcggataaatttaacagagattgagatatttaaaaagaatcaagcagaaattatagagtgaaaatatgcaattgacatsatgaagaatgcaacagagtctcttaatagcagaattgatcaagcaattgataaaaaaggagtgagcctgaaggcagtttatttgaaaatacagtcagaggagacaaaagcaaagagaatattaaaaaatgaagcacatctacaagatctagaaaatatcctcaaaagggtaagtctaagagtggccttaattaaagaggaggtagagaaagacatagaagtagaaagtttattcgaagggataatagcagaaaacttcccaaacctagagaaatatattaacattcatgtacaagaagattatagaacagcaagcatacttaacctaaataagactacctcttagatcttgtattagtccattttcacacggctataaagaacagaccatgactgagt

SEQ ID NO: 621898 - DNA, 608 bp, Homo sapiens
ggaattcacaattctgtcggataaatttaacagagattgagatatttaaaaagaatcaagcagaaattatagagtgaaaatatgcaattgacatgatgaagaatgcaacagagtctcttaatagcagaaytgatcaagcaattgataaaaaaggagtgagcctgaaggcagtttatttgaaaatacagtcagaggagacaaaagcaaagagaatattaaaaaatgaagcacatctacaagatctagaaaatatcctcaaaagggtaagtctaagagtggccttaattaaagaggaggtagagaaagacatagaagtagaaagtttattcgaagggataatagcagaaaacttcccaaacctagagaaatatattaacattcatgtacaagaagattatagaacagcaagcatacttaacctaaataagactacctcttagatcttgtattagtccattttcacacggctataaagaacagaccatgactgagtaagtcataaagaaaagacatttaaatgactcatagttgcacatggcggggggaggaaacttacaattatggtggaagaagaagctggcatgtcttacatggcagcaggtgagaga

SEQ ID NO: 621899 - DNA, 540 bp, Homo sapiens
gattaataaccagagtatatatggagttcaaacaatcccaaaggaaaagatctcataatctgattgaaaaatgggcaaaatatttcaatagacagttcccagaagaaggcatacaaatggcaaacaggtatataaaaaatgtttaacatcattgatcatcagagaaatgcaaatcaaaactacaatgagatatccattcacctcagctaaaatgggttttgtccaaagacaggcaataacaaacgctggcragaatgtggagaaaagggaagccttgtatactattggtgggaatgtaaattagtacaactactatggagaacagtttgtaggttcctcaaaaaactaaaaatatagctgtcatacaatccaacaaccccaaagctgagtataaacccaaaagaaaggaaatcagtatattgaatctgcactgtcatgtttgttgcagcactgttcacagtagccaaaatgtaaaagcaacttaagtttccatcaacagatgaataaagaacacatagcacttccacacaatggagtact

SEQ ID NO: 621900 - DNA, 581 bp, Homo sapiens
atacttccaaaattattttataagaactgcattaccctgataccaaacccagacaaggatgctatataaaagaaaactacaggtcaatattcctgataaacacagatgtaaacatcctcaacaaaatattagcaaacctaattcaacaacacattaaaatgatctatcaccatgatcatataggattcaatccagggatacaagaatggttaaacatatrcaaaacagtgaacatgatgcatcacattaacaaaaccgagaacaaacacatttgatcatttcatagatgctgaaaagcattagataaaaattaacaccaacttgtaataaaaactctcaataaactgggtataaaaggaacatacctcgaaataataaatgccatatatgattaggacacaaggactgcaattcctattcaattcctagtgctaggctgagcttagagccagtgaactaaggtcacatatgacctagggagacaccatgggcacagctaagagagggtttgcacaatccttcccccaacttcaggcaacccagctcatagcaatgagagtgattctctccttctgcttaaa

SEQ ID NO: 621901 - DNA, 426 bp, Homo sapiens
attttgtcttttcttttctctagtggttaatcttttctggtcaattgattaggttcctagaaagggggttttaagacaatttcatttctatggaaaggagtttcctggtcagataaggaaattccaaagttcctttcagggcttcaggtggaggtgggcaagaagaacaagagattaaaaagttcttgtatctgaggaagatgtagggacttccaatttaatttaattcraaatgctcatcagaccaaagctctatactttggagaatcgttctctgtgccccaataacctataaaacataatagttatgaagtatgcaacagttacacacaatttcaaacataaggattagagaacctgattaagtgtggcttaaacaaggattcataatctcatatattcatatattctcaagctggatagttg

SEQ ID NO: 621902 - DNA, 408 bp, Homo sapiens
tttttttttttttttttggcagatgcagtactcatttattttttaactgtcataagacaaaatatagacaagtatatgaattcctggactgcaaagcaaagttgaataaaaaggaaacagtacattctgaatctgcaaacagtagtagccctgtaggtgttaggaaacgtttaacatgttaaacagttaaaaattcacctgagcctcctagaaatgtggaaggaaacaatagcaggaaayagaatactggggtcatgctccactgctggagagaaatgtattgtagaaataaagaagtttctgatgtccctaaaagaatacaagtttttcaaagcctggaaaagagggaagaagcactctgagcaggagccactgacagaggtattgggcttagcagaccacctgggg

SEQ ID NO: 621903 - DNA, 556 bp, Homo sapiens
gaacactaatgaggaaatgaaacagccattaatcatcattgygtgactgcagaagggttaagtgggtttctatagattttgcttcacttattaatgacatggttttacaggtataaaagatatgtatacacagatccaaaattggggcgtaggctgtggcaatttatttccccttggatttaaagtaactatctctgaatttttctcaataactatataagtacaaaagataaaatcttgttttaactatctatgtataaactttcctaagagctccagatcagggttactactcaaatatatgtagaattgggttttattaaaaacttactaggataatagtatctcagtatatatagtctttagagtccaaaggatagactgaaatctcagcatcttgattcattaagtatgagactgtagatgaactaattaagctctctgaccattagtctcatctctaaagtgatattaaaatgccctttacaaagtgagactggaagcatgaaatgagaatacacagataaagcacctagcattgcacctgacaaacggt

SEQ ID NO: 621904 - DNA, 620 bp, Homo sapiens
ttacttaaaggcttagttttaaattattcttggctatttgaaataaaacatgattccttgagtgacataaaatgttaaaaggtctttttttttaaccaagcatgtctaatatgatcttatgtgttcaggytgcctttttgttgaacaaggtgtaagtggccacttcaaaatgattcgagtatctggccttcactgcttttaaaattgtgaaaacagttccctagaggtctacataatcctctttaggctacaaagaagccctcactgtcattttcagagcgtgttttggcagtcaaggacatgaatgttgatcatatttacttctaccagcttgggttgctggagtcatataattactataaaattagaatagttggtatgttagaacccgaactaacttaaagtcttaaaaaagatgccactctgattataaatatcaattcgttaaaatgattttttatgtataaaattatacattacataattatatctcacaatgctattttaataacactaggtgaattcttacctttttatgtgctttttcagttttcattgtggattcctattataatgtgattattaaaatctaatactaaaatgcagcatgccaataaatc

SEQ ID NO: 621905 - DNA, 563 bp, Homo sapiens
gaggtgtaataagagcctcagtgagatttgtwtgctttataaactcagaacaggttatagaagggcagcctttgacaaaaggaaaatcccattggagtttaggtgcagagcatttccattcctgttttatactgaaagttacttttttttttttaatcctctttagcttgcttatacctgatacagcatagagaaaagtgggtcagcttaaagctagtagctttactttgtcaagagaggacttatatgcatgaaagcattttcctttctatgaatgtataccgggtactaatgatttaaaaattgcttttatatttgtcactaaaaagacctctaaaatcaaagttgttacatgatggaagtgcctaatatttacttttgatataagatgacttttaaataagtgtctgattcttttttccttctcaaatgcaaataaataaataataaataacagttgagtagctatttataatatctttcttatttaaatacattctaaactcttagtatagaacaaggagattagtgcttggacagttgtcaaaaagctcaactaatcg

SEQ ID NO: 621906 - DNA, 573 bp, Homo sapiens
atgcattatggaggacagcaagaaatgtgagccataattttgtccttgattacaattaatggagaagaaaggaattataaatatttagaaaaatattataacaacagattatgccaagtgcaaactatagggttcaaascataaatgaatattatccaagactatgagagatttttgacattttgagacattatgcaagaagcaaaattgagctggtccttgaaaggatgggtcgatttagaaaaataaatgcagagcttcataaatcaccgtttcaagagatgaggacattatataaactattccattcatgcttttattacagggacagtgggaggaaagagaacagaatattggtagaactaatcttcagcatgatgttggcagatctcaataaaattatggccacttgtctccaatgttacaattcagggctttggagagtcttattttataggcttcctcattaatcatgggatgtctttctccaaacttatgtttctacagtgtaagtgtgagatgctctcaaaagaacttccaggaaggtaggttaccctccttacttgtagacac

SEQ ID NO: 621907 - DNA, 657 bp, Homo sapiens
ggatatgaagtccaacttcaccactgactgggttttgaacyccagaaaaattaatgcaacattagaacctgagttaactcatctctacaatgggaataataatgagaataatgactaccttttataaattgaattatgtcaccctcaaaaaaggtgtgtctgaagtcctaaccaccagtacctcagaatgtgactttctttggaaagagaaactttaacagaggaaatcaaattaaaatgaggtcatgttgaagtgggatggaccacttatccaacataactagcgtccttttaaaaagaataacgtgaagaagagacacacggtacaaacatcatgtgaagatgaagacagagattggaatgatatatctactagtcaaggagtgccaaagattgccagcacaccatcagagctaggagggggcgtgtctcatctccagagctatgaaataatcaatgactgttgtttaagctgctcagtttgtactactttgcaatagcaggctcagaaaactgacacactactcaaaaaggtgattgtgaggtttaaataaagtgatatataaagcatgtcacacaggataagctcttaataaattaatattaaaaatagtaacagtggtgggatattttgaaacataaccatttggtagatta

SEQ ID NO: 621908 - DNA, 657 bp, Homo sapiens
ggatatgaagtccaacttcaccactgactgggttttgaactccagaaaaattaatgcaacattagaacctgagttaactcatctctacaatgggaataataatgagaataatgactaccttttataaaytgaattatgtcaccctcaaaaaaggtgtgtctgaagtcctaaccaccagtacctcagaatgtgactttctttggaaagagaaactttaacagaggaaatcaaattaaaatgaggtcatgttgaagtgggatggaccacttatccaacataactagcgtccttttaaaaagaataacgtgaagaagagacacacggtacaaacatcatgtgaagatgaagacagagattggaatgatatatctactagtcaaggagtgccaaagattgccagcacaccatcagagctaggagggggcgtgtctcatctccagagctatgaaataatcaatgactgttgtttaagctgctcagtttgtactactttgcaatagcaggctcagaaaactgacacactactcaaaaaggtgattgtgaggtttaaataaagtgatatataaagcatgtcacacaggataagctcttaataaattaatattaaaaatagtaacagtggtgggatattttgaaacataaccatttggtagatta

SEQ ID NO: 621909 - DNA, 657 bp, Homo sapiens
ggatatgaagtccaacttcaccactgactgggttttgaactccagaaaaattaatgcaacattagaacctgagttaactcatctctacaatgggaataataatgagaataatgactaccttttataaattgaattatgtcaccctcaaaaaaggtgtgtctgaagtcctaaccaccagtacctcagaatgtgactttctttggaaagagaaactttaacagaggaaatcaaattaaaatgaggtcatgttgaagtgggatggaccacttatccaayataactagcgtccttttaaaaagaataacgtgaagaagagacacacggtacaaacatcatgtgaagatgaagacagagattggaatgatatatctactagtcaaggagtgccaaagattgccagcacaccatcagagctaggagggggcgtgtctcatctccagagctatgaaataatcaatgactgttgtttaagctgctcagtttgtactactttgcaatagcaggctcagaaaactgacacactactcaaaaaggtgattgtgaggtttaaataaagtgatatataaagcatgtcacacaggataagctcttaataaattaatattaaaaatagtaacagtggtgggatattttgaaacataaccatttggtagatta

SEQ ID NO: 621910 - DNA, 657 bp, Homo sapiens
ggatatgaagtccaacttcaccactgactgggttttgaactccagaaaaattaatgcaacattagaacctgagttaactcatctctacaatgggaataataatgagaataatgactaccttttataaattgaattatgtcaccctcaaaaaaggtgtgtctgaagtcctaaccaccagtacctcagaatgtgactttctttggaaagagaaactttaacagaggaaatcaaattaaaatgaggtcatgttgaagtgggatggaccacttatccaacataactagcgtccttttaaaaagaataacgtgaagaagagacacacggtacaaacatcatgtgaagatgaagacagagattggaatgatatatctactagtcaaggagtgccaaagattgccagcacaccatcagagctaggagggggcgtgtctcatctccagagctatgaaataatcaatgactgttgtttaagctgctcagtttgtactactttgcaatagcaggctcagaaaactgacacactactcaaaaaggtgattgtgaggtttaaataaagtgatatataaagcatgtcwcacaggataagctcttaataaattaatattaaaaatagtaacagtggtgggatattttgaaacataaccatttggtagatta

SEQ ID NO: 621911 - DNA, 582 bp, Homo sapiens
aatacatggagaagccggaatttgaacccgtgtttttctgcctgcagaatgtaaacccaatacccttacaccctgctgcctccyccatgtcatgctatctcaaagactgagttctgttctccaaccctctccctcctggatatctttacagtgctcggctctccacggagctactccgtggaagtccctgttcacctgaccagcaggtgagcacctcggcccttagcctgggtttgtgtttccttataatatccctatttgggaccttgtcattcatatctgcattttatttattgttattatttttgagacagagtttcactctgttgcccatgctagagtgcagcggtgcgatcttggctcactgcaacctctgccctccaggttcaagcaattctcctgcctcagcctcctgagtagctgggattacaggcactcaccaccatgcccagctaatttttgtatttttagtacagatggggtttcaccatgttggccaggttggtctcaaactcctggcctcaggtgatccgcctgccttggcttcccaaagtgctgggattacaggtgtgaggcatcacg

SEQ ID NO: 621912 - DNA, 582 bp, Homo sapiens
aatacatggagaagccggaatttgaacccgtgtttttctgcctgcagaatgtaaacccaatacccttacaccctgctgcctcccccatgtcatgctatctcaaagactgagttctgttctccaaccctctccctcctggatatctttacagtgctcggctctccacggagctactccgtggaagtccctgttcacctgaccagcaggtgagcacctcggcccttagcctgggtttgtgtttccttataatatccctatttgggaccttgtcattcatatctgcattttatttattgttattatttttgagacagagtttcactctgttgcccatgctagagtgcagcggtgcgatcttggctcactgcaacytctgccctccaggttcaagcaattctcctgcctcagcctcctgagtagctgggattacaggcactcaccaccatgcccagctaatttttgtatttttagtacagatggggtttcaccatgttggccaggttggtctcaaactcctggcctcaggtgatccgcctgccttggcttcccaaagtgctgggattacaggtgtgaggcatcacg

SEQ ID NO: 621913 - DNA, 582 bp, Homo sapiens
aatacatggagaagccggaatttgaacccgtgtttttctgcctgcagaatgtaaacccaatacccttacaccctgctgcctcccccatgtcatgctatctcaaagactgagttctgttctccaaccctctccctcctggatatctttacagtgctcggctctccacggagctactccgtggaagtccctgttcacctgaccagcaggtgagcacctcggcccttagcctgggtttgtgtttccttataatatccctatttgggaccttgtcattcatatctgcattttatttattgttattatttttgagacagagtttcactctgttgcccatgctagagtgcagcggtgcgatcttggctcactgcaacctctgccctccaggttcaagcaattctcctgcctcagcctcctgagtagctgggattacaggcactcaccaccatgcccagctaatttttgtatttttagtacagatggrgtttcaccatgttggccaggttggtctcaaactcctggcctcaggtgatccgcctgccttggcttcccaaagtgctgggattacaggtgtgaggcatcacg

SEQ ID NO: 621914 - DNA, 541 bp, Homo sapiens
ttgatctgaatgatgggacagaggaaacagaagacttcctgagaggggagtggtcagcaaagcctgggaccatggaattccgtrtgaagatttggctaaaatatggggtgaaggcaagcggcagatgggctgatgcttgtgacttagggcttcaaaggagcccaagctaatcattttctcagcacaatttgtgcttattttttgcttttgtttcagaacacgagccagggggtgggatagaggggtgggagtgagtcttgagtcttattatccagttgactaactgaagtctattttttttttttttggtaatgactatagagttttcttcacatttcacagattgaaaccctttactttgagaatatggctaaacctgtccaaagatactgcccagagctattgatttgctctctccaaaaggacattcttgtcattaaatcatattttcctaaagatgggatgtagcaaacctcattgactgcagcctagtgcatagccagctccttgagcacaggaagggactctcttccacactgga

SEQ ID NO: 621915 - DNA, 541 bp, Homo sapiens
ttgatctgaatgatgggacagaggaaacagaagacttcctgagaggggagtggtcagcaaagcctgggaccatggaattccgtgtgaagatttggctaaaatatggggtgaaggcaagcggcagatgggctgatgcttgtgacttagggcttcaaaggagcccaagctaatcattttctcagcacaatttgtgcttaytttttgcttttgtttcagaacacgagccagggggtgggatagaggggtgggagtgagtcttgagtcttattatccagttgactaactgaagtctattttttttttttttggtaatgactatagagttttcttcacatttcacagattgaaaccctttactttgagaatatggctaaacctgtccaaagatactgcccagagctattgatttgctctctccaaaaggacattcttgtcattaaatcatattttcctaaagatgggatgtagcaaacctcattgactgcagcctagtgcatagccagctccttgagcacaggaagggactctcttccacactgga

SEQ ID NO: 621916 - DNA, 600 bp, Homo sapiens
gcaatcttttctgtaaaatatttcaataaaagacatttattttttaaaaatccaagtttcacttcttattaatggtataatcttggacaagtcacttaagctctccaagcctcagtttcttcatcccacatgatggggccatgataatgcctgcctcacagtgtggtgaggaacacatgagcgaatgcctacaggctctcagtacagggcttagcatattgctcagtaaacactagtgtctgctgtagcttctgttgctcaggatgcactagactactccctgcatgggtctactctgcttccatgacttttygcatctccaggtctctgctcacacactgccctacctgatcttctcctcctggacccccatcaccaaatctcattcagggcacacactgaagactcttttccttaccctgggtttatccttcgctttagcctttgtttatcttgtgtccctgcagcccctggtgaacagtctactggacccttagtttatccctctctttctctctaccatcaggctaggagcacagccctctgtaatgtgtgccttggtattgcagcaagcacctggcaagcccgtgctcagggata

SEQ ID NO: 621917 - DNA, 600 bp, Homo sapiens
gcaatcttttctgtaaaatatttcaataaaagacatttattttttaaaaatccaagtttcacttcttattaatggtataatcttggacaagtcacttaagctctccaagcctcagtttcttcatcccacatgatggggccatgataatgcctgcctcacagtgtggtgaggaacacatgagcgaatgcctacaggctctcagtacagggcttagcatattgctcagtaaacactagtgtctgctgtagcttctgttgctcaggatgcactagactactccctgcatgggtctactctgcttccatgactttttgcatctccaggtctctgctcacacactgccctacctgatcttctcctcctggacccccatcaccaaatctcattcagggcacacactgaagactcttttccttaccctgggtttatccttcgctttagcctttgtktatcttgtgtccctgcagcccctggtgaacagtctactggacccttagtttatccctctctttctctctaccatcaggctaggagcacagccctctgtaatgtgtgccttggtattgcagcaagcacctggcaagcccgtgctcagggata

SEQ ID NO: 621918 - DNA, 600 bp, Homo sapiens
gcaatcttttctgtaaaatatttcaataaaagacatttattttttaaaaatccaagtttcacttcttattaatggtataatcttggacaagtcacttaagctctccaagcctcagtttcttcatcccacatgatggggccatgataatgcctgcctcacagtgtggtgaggaacacatgagcgaatgcctacaggctctcagtacagggcttagcatattgctcagtaaacactagtgtctgctgtagcttctgttgctcaggatgcactagactactccctgcatgggtctactctgcttccatgactttttgcatctccaggtctctgctcacacactgccctacctgatcttctcctcctggacccccatcaccaaatctcattcagggcacacactgaagactcttttccttaccctgggtttatccttcgctttagcctttgtttatcytgtgtccctgcagcccctggtgaacagtctactggacccttagtttatccctctctttctctctaccatcaggctaggagcacagccctctgtaatgtgtgccttggtattgcagcaagcacctggcaagcccgtgctcagggata

SEQ ID NO: 621919 - DNA, 557 bp, Homo sapiens
ccacctcaaaaaaaaaaaaaaaaaaaatttaaaaattagtcgcatgttgtggcatgtgcacctgtagtcccagctacttgggaggttgaagcaggaagatggtttcagcccaggagttcaaggctgcagacagctgtgatcatgccactgcactccagcctgggcaacagagcaagaccttgtctctaagaaaaatttaaaaattaaaaaataaggccgggcayggtggctcatgcctaaaatcccagcactttgggaggccaaggcagatggaacacttgaggtcgagagtttgagaccagcctgaccaacatggagaaaccccatctctactaaaaatacaaaattagccgggcgtggttgggcatgcctgtaatcccagcttctcgggaggctgaggcaggagaatcgcttgaacccaggaggtggaggctgtggtgagccaagatcacaacatgcactccagcctgggtaacaagagcaaaactctgtctcaaaataaataaataaaaataaaaacagttttttaaatgaacaaaggctgtttaattcagtct

SEQ ID NO: 621920 - DNA, 520 bp, Homo sapiens
tgcagtggcaggatctgcattcactgcaacctctgcctccctgggtcaagtgattctcatgcctcagctgcctgagtaactgggattacaggcacccgccaccatgcccagataattttggtatttttagtagagacggtttcgccatgttggccaggctggtcttgaactcctgactcaagtgatccacccgccttgacctcccaaagtgctgtgattacaggyatgagccactgcgcctagcagtaattgtttttaaatgcagaatagtctgtggcatatgctactattgtgtgtgtgtgtgtgtgatatgcatagactatcttaagaaaacatgagaaaccagtaagagtgactgcctttggggaggaacaatggaagccacatgggaaagatttacttttttcctgtatactctttagtattttttttttaccttgtgcacatattacctattctgtctatatgtattttttaattttactttacaatttttctttaccatttctgagacctaaaa

SEQ ID NO: 621921 - DNA, 504 bp, Homo sapiens
ggaataagacaaccaagaaataaaccctcccataggtggccaaataatcttaaacaagggtgccaagaacactcaatggggcaaagactctcttcaaatagtgttgggaaaactgaatcttcacatgtcaaggaattatgttggggtcaggtgctgtgtttcatgcctgtaatcctagctcttcatatggccaaggtaggaggattgcttgaagccaggaattcaagaccagcttgagcaacatagggaaaccccatctctcccaaaataaaaaaaaattagctgggcatggtggcacacacctgtagtctcagctactcgaaaggctgaagtgggaggattgcttgagactgggaggtcaaagcgtcagtaagtggtgatcatgctactgcattccagcctattggatagagtgagaccctgaaaaaaaagacagacaaagagagagaagagaakagaggagaaaaaggaccttatatttaggtccttacatttaaggacctt

SEQ ID NO: 621922 - DNA, 608 bp, Homo sapiens
tttaaggaccttacattaaggatctaaatataagacctaaaattaataaactcctagaagaaaatgtggggggaaagcttcataacattggacttggcaatgatttctaggatataacaccaaaagcacagacaacaaaagcaaaaatagacaaatgggactacatcaaacttaaaaacttttgtgtatcaaaggacacaattaacagagtgaaaaaggcaacctacagaatgggagaaaaaaatttgcaaatcatatatttgataaggtgtgttaaagcaaactaaatatggcctgagaaggactccrtatttctatatttgggtcctggtaacctaacttaataggtggacaagattgaaaacctaacttaggagtatgcacctgtaacaatagctgagtcttggccaatcccagaagccatacttccaccactcatacactgctgaatgttcaaactgtattcaaataaggcaaatgctgaggtgtaaccaatccagttgtttctgtacctcacttctgatttctgtatgtcacttccctttctttgtctataaatttgttctgaccacaaggtatccctgaagtctttctgaatctgctgtgat

SEQ ID NO: 621923 - DNA, 497 bp, Homo sapiens
agtgttcagcgttagaaatgagaacttggttgggtgcagtggctcacgcctgtaatcctgggactttgggaggcccaggtgggtggatcgcttgagcccaggagtttgagaccagcctgggcaacatggcgataccccctctctataaaaaataacaaaaattagctgggtgtggtggcgggtgcctgtagtcccagctactcaggaggctgaggtgggatgatctccccaactcaggaagtcaaggctgcagtgagctgtgatgatgccgctgcactccagcctgggtgacagagtgagacgctgtcttaaaaaaaaaagagagagtgagagagaatttgaataaaagctaaattcttgtaatgtagataaagtggataaaaatccatggtagatagttatcaatcgaattatgaactggttttggattaaccactcagtctggaccattttccctcactgatrcatgaaagtcttcaatccttctttctcatttt

SEQ ID NO: 621924 - DNA, 392 bp, Homo sapiens
ctaaccgctgagctacataatatcccttggtttttaaagataatacaaagtggattttagcaacaatcttgagtcatcacagaagctaatgaakttggggattccatgaagccatccaagcacataaagcccatttcctgggtccctttcccttagctcaaggccacaaaaatcagaacatgaattccagcccatatttgcattatgtctaaataattatgaattataaatgaagctaaaaatagctaaatatgttctattcttctacttcaataactataccgccataataacccacaaggtcaaagtcgagtgtagaattctctgagttcttggtgctctgcacgggaatgtgttagtaaagggagagctgatcctcagccccaggctat

SEQ ID NO: 621925 - DNA, 392 bp, Homo sapiens
ctaaccgctgagctacataatatcccttggtttttaaagataatacaaagtggattttagcaacaatcttgagtcatcacagaagctaatgaatttggggattccatgaagccatccaagcacataaagcccatttcctgggtccctttcccttagctcaaggccacaaaaatcagaacatgaattccagcccatatttgcattatgtctaaataattatgaattataaatgaagctaaaaatagctaaatatgttctattcttctacttcaataamtataccgccataataacccacaaggtcaaagtcgagtgtagaattctctgagttcttggtgctctgcacgggaatgtgttagtaaagggagagctgatcctcagccccaggctat

SEQ ID NO: 621926 - DNA, 289 bp, Homo sapiens
ttcctctgggaatcatgaatgttcttattggcatctamaatagtgaatccatttatagagcacgggtagagtagatttagtgtaattcttaagaggtgccctaggatttatggaatggcaaataagcattggcttgtaataagagagtcagtctgtcctttaaatcttttttttttcttgagataaggtctcactctgttgtccaggctggattgcagtggcaagatcttggcccacttcagacttgacctccttgactcaagcaatcctcccacctcagtctcctgag

SEQ ID NO: 621927 - DNA, 289 bp, Homo sapiens
ttcctctgggaatcatgaatgttcttattggcatctaaaatagtgaatccatttatagagcacgggtagagtagatttagtrtaattcttaagaggtgccctaggatttatggaatggcaaataagcattggcttgtaataagagagtcagtctgtcctttaaatcttttttttttcttgagataaggtctcactctgttgtccaggctggattgcagtggcaagatcttggcccacttcagacttgacctccttgactcaagcaatcctcccacctcagtctcctgag

SEQ ID NO: 621928 - DNA, 289 bp, Homo sapiens
ttcctctgggaatcatgaatgttcttattggcatctaaaatagtgaatccatttatagagcacgggtagagtagatttagtgtaattcttaagaggtgccctaggatttatggaatggcaaatragcattggcttgtaataagagagtcagtctgtcctttaaatcttttttttttcttgagataaggtctcactctgttgtccaggctggattgcagtggcaagatcttggcccacttcagacttgacctccttgactcaagcaatcctcccacctcagtctcctgag

SEQ ID NO: 621929 - DNA, 272 bp, Homo sapiens
tcagaattcttagcaactgtatagtacttatctcctagaacttgttcaataataattgytagatggattcatggactaaagaattaatagatatagattgaaaactaaagtattttattttacaaagatcagaattaatttactaaaatctaaatttctgctagtaatattaaatacacgtggataaactacaagaatgataaaaatattgcatcgtaagagtcattaaaaacttgatatattgttagacaacaacagtatattatgattgt

SEQ ID NO: 621930 - DNA, 272 bp, Homo sapiens
tcagaattcttagcaactgtatagtacttatctcctagaacttgttcaataataattgctagatggattcatggactaaagaattaatagatatagattgaaaactaaagtattttattttacaaagatcagaattaatttactaaaatctaaatttctgctagtaatattaaatacacgtggataaactacaagaatgataaaaatattgcatygtaagagtcattaaaaacttgatatattgttagacaacaacagtatattatgattgt

SEQ ID NO: 621931 - DNA, 566 bp, Homo sapiens
acagagcaagactttgtctcaaaaaaaaaaaaaaaaatctatctatatatagctatatatagatgaatctgccgtggtcatctaaggctggtgaccttcccacagaaaaagcatgagtgtcttaacattcctttttctaacagtttcatttccatttattatggtttgtgttgggagtagtagaagagaaaagagggacttgtgaagatgaaggccataattttaactcttcccctggcaatgaaaacccccaaattagaacaaaataggttagtgctgtgtggtaattaaagagagaggaatacatggcagtagctactctctgcaggtatcctgcacttgttctttatccagtcagtatctctacgcaggtgactggctgtttcttggaaggcagttgtactgttgcctgttagagactcagaacagcgctgggacsgggtatctatagaggccctgttctattccacctacttttgatagcctgtgttctctcatttgtaagtcaagtgagtttggtaatttctaagtgcctttccaaatggtacatttcatattttatataa

SEQ ID NO: 621932 - DNA, 625 bp, Homo sapiens
ccacctcaacctcccaaagtgctgggattacatgcgtgagccactgtgcctggcctgaaatcacttctaaaaattgttacagtaaaaattttatgtttaccagacgtaaattttggttacatatacatttatcccaattgacacattttattcatactgaataaaacattaatgttacttttctattttttatgatgtattttgacatgtgtttagatgtatgttttatatgtatggactgacaaaatcatatatgctattatttggcatcttatgtggttggaggtcataaagaatgtaagtaactgaaacaatacatttgctcaaagaaaggccactcaattctctgccctgtggtatctaatctccctgtaatacacatttcaccatctaggattggagaagttcattctatcaacacgartgctaacaggtaggcttctggaagtacaatgtgatagttcagatctttctctgattcaaaatggtgatttaaaagaaaacatacttggctgaattggcttttgatagactaaaacattaatttgccttaatgtgcattaacgctaaaggatactaaaaaacaaaaatttttttaaacccagaaattctaccaggtctggag

SEQ ID NO: 621933 - DNA, 635 bp, Homo sapiens
attctgctaatcacgaattttaaagtgaaattgctacaaagactgggactaasaaatcccataaagtaaaaattatctaataatactttttttttcagtttttggtagaagaaccaacctcaaaaaaataaaaaagaaagaaaaatatataggcaaattaaacttcctgcttataaaagattcagaaaaggcccttgggctgtccacagcattgagtgatagcaggccacttatattaacagtgacaactacatgtctaaaaggtattcaacttacacacctggttcaacatatgttacaatattttggctctgccaaaaaaaaaatttaccacatcataaattctctccccactgtcctggtatctcaggtgggggactacataggtaagttctaagagtcaaatttttataagcatagagaagtaacaaaacactttcaaaatgctatcttttcatgtttttgaacccaaaaaatggacccacaacaaagatctcagtaatataaacctgaaacactatgaaacataatcttagaaaaccataattctggccaggcttggtggctcatgcctgtaatcccagcactttgggaggccaaggcaggtggatcaccaggtcaggcattcgagacca

SEQ ID NO: 621934 - DNA, 408 bp, Homo sapiens
gcttgccaccatgtaagacatgcctttgcccttccttcatcttttaccaggagtgtgaggcctccccagccatgtggaatggtgactttattaaacttctttccttgtaaattactcagtctccagtatgtctttattagaagcaggagaawggactaatacagttagcctgcaccttcttcctctaagcttctagccagccccagtcatgttaggttctagattccttcctctgggtattctccagagtcaggaatacgcactgcactacgatatgaacaggagccaaggggtgtagtatggatgaaagtgacttatgttctacattacccaattctatgagattttcactttaaaacccagagtgcatttactttttaattataaagttttaaaattacagaattc

SEQ ID NO: 621935 - DNA, 706 bp, Homo sapiens
gaaataagacatgaacagcacaacccaggatgcatgtagtgtggtccttctatcctgttcaccctatactttcaaaactttcacaggcacattatctagacagaaaatcaataagaaaacatcaaacaaactacactttagaccaaatggatttaacaggcatatacagaacactccatccaatagcagcagagtacacattcttctcaaagacacattctccaggatagagcatgttaggccacacaataagccttaacaagtttaagaagactgaaatcatatcaagaatcttttcctactacaatgatatgaaactagaaatcaataacaggagaaattttgaaaaatkgaaaaacacatagaaattaaacaaaatgttcatcaacaatgggtcaaagaagaaatttaaataatctggaaaacatggaaacacacataccaaaacttaggggatgcagcaaagcagttctgagtcataagtttaaggcaatatacttatcacaaaggaagaaagatctcagataaacaacctaaccttacttctcaaggaactagaagaagaagaaaaaactaattccaaagttagtagaaggaaataataaagatcagagcagaaataaatgaaatggagactagaaaaacaaagagaagataaaactaagaattttttttagaagataaacaaaattgacaaacctttagc

SEQ ID NO: 621936 - DNA, 607 bp, Homo sapiens
cacttcctgtctccacaggggcattgaaggaaaggtgacacttacaattctgattggtgcttagtgacattatgcataaataaagaaatatgcagttaacatatatagggtaaaaagttgtggaatacgtaggggtcttaaggtctggagaggggtgattgattctaccctgcatttgtgcttcatctgataggcaaggttacaatcagtcatgccagtgaaatatttgacagactccaccctagcaggcgagacttcagctttagttcataggccttatattagtacctgtttgtccagcctgcagccatcttgggctgtgttttaaaactttttctttcagattttcttttttctaaaaatctttcccttttggttaaattctccaaaagaggactttgaaaaccaaataatatatctgatggatttgaagaggacaggtcccctttgcttggaattatagggcataggggaatcaaattggaatttttaagtgcccttgttctatttttcactcctayatgaagttctgtcatttggtttgtcagtgaggatgcaaaaattcctgtatttcctttcagaatgcgagaggctctcctgtcatgcc

SEQ ID NO: 621937 - DNA, 616 bp, Homo sapiens
aattattttcttaggctgttcctcagatgcgatgatgtgttgcatggtcaaccatattgctgaagagccttgaggagttgggaggaagaataggccatttgatgtgttttataaaccttgggactttaggattraaaaaatttaaaacaaggccgggcgcggtggctcacgcctgtaatcccagcactttgggaggcagaggcgggcagatcacgaggtcaggagtttgagaccagcctggccaacatggagaaatcctgtcgctcctaaaaatacaaaaattagctggccgtggtggtgggcgtctgtaatcccagttactcaggaggctgaggcaggagaatcacttgaacccaggaggcagaggttgcagtgagccaagatcatgccactgcactccagcctgggcaacaagaatgaaactctgtctcaaaaaaaaaaaaagaaaaaatttaaaatagaaagcccttcctcagttgatcagaaatagggaaataatgtgttggacaaatagtcatcagaagactactcttacatacatgctacagctgttagttcagatcaatgaactcacttaatttgggctggagttctattctttcagtgacatttgcaa

SEQ ID NO: 621938 - DNA, 489 bp, Homo sapiens
agcacgtatttataaccctgggctggaggtaattggataaaattcatttgccatatattgaaaggtccagtgggcaaagggaaatgcccttgaaatctgtgaagacactttcctggattaggtttaggacaaattggacatttagcataaagtctatgtgctattgtgggtgagrattcccaataataattgttttccctgggcaatcattttttcaggcccccagtgagtgagctcatagacatgttgtgacatagaaaattgaaatcccaaaggcaaaactagtctgtctttgggtccataccataatttgcaagtggagaaaaagcaccgccatttttgttagctatatctgctttcccctctctgaaggcttttcttgagcctcttggagttccttttcaatggagtgcattttaaatatagccacctctctagttttatttgatatcagtgttaatgcagacttttttgctgttgaatcagcaa

SEQ ID NO: 621939 - DNA, 489 bp, Homo sapiens
agcacgtatttataaccctgggctggaggtaattggataaaattcatttgccatatattgaaaggtccagtgggcaaagggaaatgcccttgaaatctgtgaagacactttcctggattaggtttaggacaaattggacatttagcataaagtctatgtgctattgtgggtgaggattcccaataataattgttttccctgggcaatcattttttcaggcccccagtgagtgagctcatagacatgttgtgacatagaaaattgaaatcccaaaggcaaaactagtctgtckttgggtccataccataatttgcaagtggagaaaaagcaccgccatttttgttagctatatctgctttcccctctctgaaggcttttcttgagcctcttggagttccttttcaatggagtgcattttaaatatagccacctctctagttttatttgatatcagtgttaatgcagacttttttgctgttgaatcagcaa

SEQ ID NO: 621940 - DNA, 481 bp, Homo sapiens
gcagaagttgcagtgagctgaatcgcgccaatacactccagcctgggtgacagagcatgagttcgtctcaaaatttaataaaataaaataaaataaagtggccctccacttctggatatatatccaaaagaaatgaagcagggactcacatatttacacacccatgttcatagcagaattattcacagtagtcataaggtgaaaacaagctaaatgtccattggtggacgagatgaatggataaacaaaatgtggtatatccatatccatacaatagaatattatttgttcttaaaaaggaatgaggccaggtgcggaggctcatgcctgtaacccctgcactttgggaggccaaggcgggcggatcacctgaggtcaggggttcragaccagcctggccaacatggtgaaaccctatctctactaaaaatacaaaaaaattagctgggcatggtggtgtgtgcctatagtcccagctacg

SEQ ID NO: 621941 - DNA, 561 bp, Homo sapiens
catacctctcagtgaagagagccaccaccctcacccccaacccactacctggttccattaggaatgaacatcctcctgattcccccaagcctccaaacaatatgggcctcccttatggcctcacaaacaacccgagcacatgcccaactttcccccgtggtaccatttgagccccacaacagccctgagaagtcgattaattccccacccactcgtttacagatgaggaaaccgagaaacaaagaagtagtgacacgcgaaatgtaaatcaagcgtcgaataaacgttgactgtgatcactgtggttgttgttactrttgctgaaggccacacagctcagaagaaacagagctgaaaggcaacctggcctggctttcaccctgatgtcctactgcttcccttgaaaaagtagaggtgacaatatctagtcttcctatttttctgtccagcaatatttcagtccttccctaacccgaggcctttaggggactgtgagccacccaagaacggtctgctctctggccaccccctctcctacccagagcacagtacagggcctgg

SEQ ID NO: 621942 - DNA, 574 bp, Homo sapiens
agatctgaatagacatttctcagaagatgacatacaaatgacaaacagacatatgaaaagktgctcaacgtctttagtcatcagagaaatgcaaatcaaaactacaatgagatatcctctcaccccagttaaaatggcttatatccaaaagacaggcaataacaaatgctgacaaggatgtagagaaaagagaaccctggtacactgttggtgggaatgtaaattagtgcaactactatgaagaacagtttggaggttcctcaaaaaactaaaaatcgagctatcacatgatccagcaatcccactgcaggatatatacccaaaagaaaggaaatcagtatatggtagagatatctgcactcccatgtttattgcagcattgttcacaacagccaagatttggaaacaacctaagtgtccatcaacagatgaaaggaaaaagaaaatgtggtacatatgcccaatggagtactattcagctgtaaaaaagaatgagatcctgtcatttgcaacaacatagatggaactgaagatcattatgttaagtgaaataagctaggcacaggaagacaaa

SEQ ID NO: 621943 - DNA, 622 bp, Homo sapiens
tatgaagaacagtttggaggttcctcaaaaaactaaaaatcgagctatcacatgatccagcaatcccactgcaggatatatacccaaaagaaaggaaatcagtatatggtagagatatctgcactcccatgtttattgcagcattgttcacaacagccaagatttggaaacaacctaagtgtccatcaacagatgaaaggaaaaagaaaatgtggtacatatgcccaatggagtactattcagctgtaaaaaagaatgagatcctgtcatttgcaacaacatagatggaactgaagatcattatgttaagtgaaataagctaggcacagraagacaaactcctcatgttctcacttatttgtgagatctaaacaaaaatcaaaaacaattgaactcacggacatagagagtaaaaggatggttaccagaggctgacaagggtaatggagggctggtgggggaggtgggtatggttgatgggtgtaaaaaaatagttagacaaacaaccccatcaaaaagtgggcaaaggatatgaacagacacttctcaaaagaagacatctattggccaagaaacatgaaaaaaagctcaacatcattgatcattagagaaatgcaaatca

SEQ ID NO: 621944 - DNA, 622 bp, Homo sapiens
tatgaagaacagtttggaggttcctcaaaaaactaaaaatcgagctatcacatgatccagcaatcccactgcaggatatatacccaaaagaaaggaaatcagtatatggtagagatatctgcactcccatgtttattgcagcattgttcacaacagccaagatttggaaacaacctaagtgtccatcaacagatgaaaggaaaaagaaaatgtggtacatatgcccaatggagtactattcagctgtaaaaaagaatgagatcctgtcatttgcaacaacatagatggaactgaagatcattatgttaagtgaaataagctaggcacaggaagacaaactcctcatgttctcacttatttgtgagatctaaacaaaaatcaaaaacaattgaactcacggacatagagagtaaaaggatggttaccagaggctgacaagggtaatggagggctggtgggggaggtgggtatggttgatgrgtgtaaaaaaatagttagacaaacaaccccatcaaaaagtgggcaaaggatatgaacagacacttctcaaaagaagacatctattggccaagaaacatgaaaaaaagctcaacatcattgatcattagagaaatgcaaatca

SEQ ID NO: 621945 - DNA, 530 bp, Homo sapiens
gaagcagttgacttcactgctcaggtgattatcctgaaccacccaggccatatcagtactgattgtggccctgtgctgaattgtcagacagctcacattgcttgtaagtttgctgrgctgaagaaaaagactgattgctgttctggtaagaagctggaagatttaaattcttaaaatcaggtgatgcttccaccatggatatggtttctagcaaccccatgtgtgttgagagcttttctgacgagctcccctgagtccttttgccgtttgttggtttcatcaaagcagtggacaagaagggtgctggagctggcaaggtcaccaagcctgcccagaaagctcggaaggctaaatgaacattatccctagtacctgccacccaagtcttaatcagtcatggaagaactgtctagaacagtttgcttcaattggccatttaagtttaatagtaaaagactggttaatgataataatacatcataaaagattcagaagggaaggagaatattttatgaatcatatttgttttg

SEQ ID NO: 621946 - DNA, 571 bp, Homo sapiens
gtttttacttcacatatatttggcctctgttgttaagtgcatatatgtttatgattattatatcttcctgacacattgacccttttatgattataaaatgtctctctttaaaagagtatcatctttttgttttcaagtctattctgtaatattagtagagcgacaccagctttcttgtgatttctgtttgcatgatacatttctccgttcttttactttcttcttcttcttcttctcctcttcctcctccttctcttcttcttcttctccttcttcctcttcctcttctcctcctcttcctcttcctccgtcatcgtcactgtcgtcatttcactrtatcacccaggctggtctcaaactcctgggctcaaggaattctcctgcctcggcctctggagtagctgggactgcaagtgcacaccactgcacccggctcaaattacccatccttaattgagcactgattaggcttttggactttttgctattatgaacagggctgaaatgtctccttgtgcacatgggtgagttttgtccccaataaacatctattagtggaattgctgaatca

SEQ ID NO: 621947 - DNA, 443 bp, Homo sapiens
aaatctcacaggacctataaaacaaaaatacaactaaaaaaaagtgtacaggcaacaaatagcaygatgaatggaatagtgcctcacctcgcaatactaacattgaatgtaaatgtcctaaatgctccacttaaaagatacagaattgcagaatgggtaagaatccaccagccaactatctgctgccttcaagagactcccctaacacataaggactcacataaacttaagttaaaggggtggaaaagacattccatgcaaatggacaccaaaagggagcaggagtagctattcttttatcagacaaaacaaactttaagacaacagctatttaaaaagacaaagagggacattatgtaatgataaaacctcttgtccaacaggaaaatattacaatcctaaatatacatgcacctaacactggaggttccaaatttataaaa

SEQ ID NO: 621948 - DNA, 443 bp, Homo sapiens
aaatctcacaggacctataaaacaaaaatacaactaaaaaaaagtgtacaggcaacaaatagcacgatgaatggaatagtgcctcacctcgcaatactaacattgaatgtaaatgtcctaaatgctccacttaaaagatacagaattgcagaatgggtaagaatccaccagccaactatctgctgccttcaagagactcccctaacacataaggactcacataaacttaagttaaaggggtggaaaagacattccatgcaaatggacaccaaaagggagcaggagtagctattcttttatcagacaaaacaaactttaagacaacagctatttaaaaagacaaagagggacattatgtaatgataaaacstcttgtccaacaggaaaatattacaatcctaaatatacatgcacctaacactggaggttccaaatttataaaa

SEQ ID NO: 621949 - DNA, 352 bp, Homo sapiens
aaggacttcacacgagatagagcaatgtaaaaaggatattcagaacttccctttcccctcttctcaggggaagaaagaggcatgatccatagggctgcaatgggagcctaggaaccaygaacaccccgcccccggcttccggccaaaacgttcctacagcggatcaaaaatttcccacccaagacccctggtgggacaataacaatgcagccaaccaagaaaatatgcaagaccttaaggaattgataataaaggggattaaagaatcagtaccccgaacccagaatcttacccaaacatttgatatacagcaagggaaagattaagggcctatagaatttttagacagatt

SEQ ID NO: 621950 - DNA, 550 bp, Homo sapiens
gtaatgaaaggaccaaaaacaagaaaaagcagctgctgtcccagacccttctcctatccctgttgtccctctccttataattctgcctcttgggaatgttcccaagagcccactcacgaccagcctgagtacccttccctaaaaggacttcacacgagatagagcaatgtaaaaaggatattcagaacttccctttcccctcttctcaggggaagaaagaggcatgatccatagggctgcaatgggagcctaggaaccatgaacaccccgcccccggcttccggccaaaacgttcctacagcrgatcaaaaatttcccacccaagacccctggtgggacaataacaatgcagccaaccaagaaaatatgcaagaccttaaggaattgataataaaggggattaaagaatcagtaccccgaacccagaatcttacccaaacatttgatatacagcaagggaaagattaagggcctatagaatttttagacagattaaaggaataaatgagaaaatatactggtccaggtctcgaggatccccttggacagg

SEQ ID NO: 621951 - DNA, 535 bp, Homo sapiens
gagacttaacagggtgcagtgaaaccaagccttttcaagaggttacccatcagtctgcccttgttcatccccgagcagatgtgtagtggtattgcaggggactattgctgggtactctgccaagtaattaaagcagcactcatgctttagtccaattggccatccctttcaccctagcattccgtcaacacgattaaaaaaaaaagaaaatcgtaaaagaagtgcttcacatgggtcctttgattcccatgtttatataaatgctattggagttccaccaggagtaccagataaatttaaagcctgaaatcaaatarctgcaggatgtaagtcaatattttggtgggtaacaattaataaaaatgtagattggataaattacatttattacaaccaacagcagtttattataaactacactagagatgctattaaagaaatagctgagcaattaggggctactagccagatggcttgggaaaatagaatagccttagacataatgttagcagaaaaaggaggagtttgcatcatg

SEQ ID NO: 621952 - DNA, 535 bp, Homo sapiens
gagacttaacagggtgcagtgaaaccaagccttttcaagaggttacccatcagtctgcccttgttcatccccgagcagatgtgtagtggtattgcaggggactattgctgggtactctgccaagtaattaaagcagcactcatgctttagtccaattggccatccctttcaccctagcattccgtcaacacgattaaaaaaaaaagaaaatcgtaaaagaagtgcttcacatgggtcctttgattcccatgtttatataaatgctattggagttccaccaggagtaccagataaatttaaagcctgaaatcaaatagctgcaggatgtaagtcaatattttggtgggtaacaattaataaaaatgtagattggataaattacatttattayaaccaacagcagtttattataaactacactagagatgctattaaagaaatagctgagcaattaggggctactagccagatggcttgggaaaatagaatagccttagacataatgttagcagaaaaaggaggagtttgcatcatg

SEQ ID NO: 621953 - DNA, 635 bp, Homo sapiens
actagtttctgcacagaaaaataaactatcggcacattaaacagacaacctacagagtgggtgaaaatgtccacaaactatgtaaccaacaaatgtctaatatctggaacctataagaaacttaattcaacaaacaaaaaaccaacaaccccattaaaaaatgggcaaaggacatgaacagacacttctaaaaagaagacatacatgcagcgaacaaatatatgaaaaaatgctcatcattactaatcattagagaaatgcagatcaaaaccacaagataccacctcacatcagtcagaatagcaattattaaaagtcaaaaagcaacagatgctggtgaagttgtggagaaaagtgtacacttatacactgttggtgagaatgtaaattagttcagccactgtagaaagcagtttagagatttctcaaagaacttaaaactaccattcagcccagccatcctactactgggtatatacccaaaagagaataaattgttctatcaaaaagacacacacattcgtatgttcatcacagcactatttacmatagcaaagattgaaattaactggcttctatcaatagtggactggataaagaaaaagtggacacatacactataaaaactccacagc

SEQ ID NO: 621954 - DNA, 512 bp, Homo sapiens
agtcaagtttgtaataatgaaatgaaaaataagtgacttcttgaactcctgttacatgtcagtcagagagagcaaatatagctcactgtgacagttactgagttagagctaaagaatttctcagcagttcagtggtgtgaatttgcacattcttaaagctggttgtttcctggatgcactgtctctgcagataaaatgtgaaacgtggtgtggaagcatatttggcattcacaggtgacaatcagattcttctaaacctaattatagcataaaagatgatcagcaaagagctggattcctaaatgyggtgggtggtgaggccgtgtcattaccgcgagacttccctctcacttcctctcagccccagcctcataaacctcaaaaccaccatgatggagaagggacagtatgttatataaaatgaaaattatcagccactggggtcaaaaagaaaatctaagacagacaagaagtgctttttaaaaagcaggggaaataaatgcaaattgttt

SEQ ID NO: 621955 - DNA, 568 bp, Homo sapiens
ctgaccacggataactgaaactgtggataagcagggactacagcacccatttcgaaggctatccatgttgctctgtgaaggtacttctggtgaccaaccttggaccagatttcagaactctgcagcaacaacctctttacacaatgaattctgtatcgaatagatctctgcttaacagccccaagtcactttcccttgcagaagatcatcttcattcaaacagaagtttcagagtagttcacatttctttaaaagagtggaaaatatagttgggtttaaatgctcatgtagaattctattatttgccactccatggtttaatttctaaagctgcctgmcatgtgtgacttgtctctgttgtgtattggttaagtgtgcagggtctccatctaggctaagtcaccctatattctggcttcatcattacttgtgaaacttaggcacattacttaacctctcaaagtcttagcttattccgctgtaaagtgggcatcatgattgcatttacctcatagaattgtgtgaattaaataaaatatatataaagcatttactatagtgcatagca

SEQ ID NO: 621956 - DNA, 599 bp, Homo sapiens
atcatttgagattgagaccagcctgggcaacacggtgaaaccacattctctactgaaaatacaaaaaaaattaaccaggtatggtggttcatgcttgtaatctcagctactagggaggctgaggcaggacaatcgtttgaacctgggagatggaggttgctgtgagctaagatcatgccattgcactctaacttgggcgacagagcaaaattcygtctcaaaaagaaataaaatcaagaaagtaacctcataataggtacaaaaaatataaagtacctaggaatcaatttaaccaaagaagagaatgatctatacatgaaaatctatagaaacactaatgaaagaaattaagaagagcacatgaaaaatggaaagatatttcatgcttgtgaattggaagaattaatattgttaaaatgacaatacaacccaaagcaatttacagattcaatgtaatctctaggaaaatatcaatgacattcttcatagaaataggaaaaaaaattaaaacttttatggaactgccaaagacaccaaatagccaaaataatatggaacacaacaaagctgaaggaatcacactaccttacttcaaaata

SEQ ID NO: 621957 - DNA, 534 bp, Homo sapiens
agcctgggcaacacggtgaaaccacattctctactgaaaatacaaaaaaaattaaccaggtatggtggttcatgcttgtaatctcagctactagggaggctgaggcaggacaatcgtttgaacctgggagatggaggttgctgtgagctaagatcatgccattgcactctaacttgggcgacagagcaaaattctgtctcaaaaagaaataaaatcaagaaagtaacctcataataggtacaaaaaatataaagtacctaggaatcaatttaaccaaagaagagaatgatctatacatgaaaatctataraaacactaatgaaagaaattaagaagagcacatgaaaaatggaaagatatttcatgcttgtgaattggaagaattaatattgttaaaatgacaatacaacccaaagcaatttacagattcaatgtaatctctaggaaaatatcaatgacattcttcatagaaataggaaaaaaaattaaaacttttatggaactgccaaagacaccaaatagccaaaataatat

SEQ ID NO: 621958 - DNA, 582 bp, Homo sapiens
ttgggcgacagagcaaaattctgtctcaaaaagaaataaaatcaagaaagtaacctcataataggtacaaaaaatataaagtacctaggaatcaatttaaccaaagaagagaatgatctatacatgaaaatctatagaaacactaatgaaagaaattaagaagagcacatgaaaaatggaaagatatttcatgcttgtgaattggaagaattaatattgttaaaatgacaatacaacccaaagcaatttacagattcaatgtaatctctaggaaaatatcaatgacattcttcatagaaataggaaaaaaaattaaaacttttatggaactgccaaagacaccaaatagccaaaataatatggaacacaacaaagctgaaggaatcacactaccttacttcaaaatatattataaggctatagtaatgaaatcaacatggtgctggcataaaaacagacacacagacaaatggaacagaaacagagtacccagtaataaatccacatatttatagccaactcgtttttgacaaagtcccaagaacacasacgagaaaaaagacagtctcctcaataaatggt

SEQ ID NO: 621959 - DNA, 362 bp, Homo sapiens
tgtatcccatgttcagtggaagaattatcataaaactaataatgcttaactttcagggcccctcacacccaagggtcactttcaaaacatttagcagagccttaacaatgattttgtgagatttggaaaaataaagtattttgaaattctttttttwaaaaaagagtaccaagaaatctactgagtttcagatcttcatatacatggtatgcttctgccccaaatgcaggcttttaatatgtccatgcattaactgacactgggtaggatacttaatttatgacctagtgaaattgagaacttagaaatcttcaatttccaaaagaatgaatcaacatcacaagattaatttataagaatca

SEQ ID NO: 621960 - DNA, 532 bp, Homo sapiens
tgggtgtgtacttccttgacccatatggggtttgtccatgtgaagtgctttgatcaatgattgtcagggcctgtttacatgccagtttttctgaaactttaatgtgtttacaaattacctgaagatcctgctaaaatgaaattcatattcagtaggtctagattggggcctgagatgcattgcagtatatctaacaagctaccaaataatgttgaagctgctagctatcgggacaactttgagtagcaaggattcatactacaattaaggtttaagaggcatcatgactttcacatatctctcttgctttttccccctgccacaaaaccaacaagtcctaaatctatgcyacttcttcacctgggtcctagaataagatatgtggagcagggccacagctatcaatattaaaataaacaggaaatatacatttggggattatttgttacttcagcaaggctgactaatacaagatccatctctgagcagtctcatagaaggcattcctgaaatgagaatgcatgtggactta

SEQ ID NO: 621961 - DNA, 532 bp, Homo sapiens
tgggtgtgtacttccttgacccatatggggtttgtccatgtgaagtgctttgatcaatgattgtcagggcctgtttacatgccagtttttctgaaactttaatgtgtttacaaattacctgaagatcctgctaaaatgaaattcatattcagtaggtctagattggggcctgagatgcattgcagtatatctaacaagctaccaaataatgttgaagctgctagctatcgggacaactttgagtagcaaggattcatactacaattaaggtttaagaggcatcatgactttcacatatctctcttgctttttccccctgccacaaaaccaacaagtcctaaatctatgctacttcttcacctgggtcctagaataagatatgtggagcagggccacagctatcaatattaaaataaacaggaaatatacrtttggggattatttgttacttcagcaaggctgactaatacaagatccatctctgagcagtctcatagaaggcattcctgaaatgagaatgcatgtggactta

SEQ ID NO: 621962 - DNA, 642 bp, Homo sapiens
agtctcatagaaggcattcctgaaatgagaatgcatgtggacttaattccatgtgtctttagaaatctagaatctacatttgtgaattctggctcatactactggtaaagatagttacacttctgcaaaccgttcatagattacagtttgaacaggtttatgtgcaccaaccatcagaaccttaataaaatattggggctgacatttttcactcccatatatcccatagctgatatatttgaatacttgaaggcctcttagcacttcaaacagaaaatgcacttgggtgaatagtaatcatgaagcctaattttccaacaccatggaaagtgccttagggaaaggaggctggtgtttagttagggggaaatgccccctcacayttttaaataacattttcagccagttactaaaggtttagggtgagagacattcaggatgtagccctgggagagggaggataaaaataaggacttcagatgagataagtcatgttcagagtggtaaaagagtagattttaggtactcttgccacacacaataaaagggtaactatatgagatgatggatatgttaatttgcttaactatctataatgaccatttcactatgtgtatatcaaaacatcatgtggtacacttt

SEQ ID NO: 621963 - DNA, 642 bp, Homo sapiens
agtctcatagaaggcattcctgaaatgagaatgcatgtggacttaattccatgtgtctttagaaatctagaatctacatttgtgaattctggctcatactactggtaaagatagttacacttctgcaaaccgttcatagattacagtttgaacaggtttatgtgcaccaaccatcagaaccttaataaaatattggggctgacatttttcactcccatatatcccatagctgatatatttgaatacttgaaggcctcttagcacttcaaacagaaaatgcacttgggtgaatagtaatcatgaagcctaattttccaacaccatggaaagtgccttagggaaaggaggctggtgtttagttagggggaaatgccccctcacacttttaaataacattttcagccagttactaaaggtttagggtgagagacattcaggatgtagccctgggagagggaggataaaaataaggacttcagatgagataagtcatgttcagagtggtaaaagagtagattttaggtactcttgccacacrcaataaaagggtaactatatgagatgatggatatgttaatttgcttaactatctataatgaccatttcactatgtgtatatcaaaacatcatgtggtacacttt

SEQ ID NO: 621964 - DNA, 633 bp, Homo sapiens
gagccgggacttctaccctcaaaaggctatcaacaagacttctcaacagtcctactaagattttatagagaaggcctactagggagctagaacttttatcctcatcatctggtaacaacccccatttcatggtatccatggagaacacttagcagcttggattccactgcctcccagcagtaatgagggttcatccctcccttctgggaggtatccttgctggggggtgtcacaggaggcttgtaggagagtcaggaacttcagcattgcccactgatagtgcagccaatgccaacatggcatcagtgggaattacgtggaggctggaactcttacccttgtccaacactaatgaggagctcctgcttcaggtgtcagtggagactgaatgggatacctggacttgtgatcacatttggtgacagcattctcctccattcccccaccacccacttcctctgccatagcagcatcaaagaaagccagctcaaatgagattgagagtctcataacttactacgaaaatgtcccagtttcaatgaaaactcacttgtaacaacaaagagaaagatctctagaagacrtaaagaataaccaaatagaaattttagaaatggaaaatataataaccaa

SEQ ID NO: 621965 - DNA, 526 bp, Homo sapiens
gttcctgcctggttttgagtgagggcgaggggtagggagctgagagaatggtggtcctacaacaaagacaaaacgataaagggagattctgtctcaagaataatcccagggagaatgcttcttcctcaacccaggtgtttcttttatgtaggtttcagcaaactttttctgtaaagggtcaaatagcaaatattttaggctttgtgagccatagggtctttgtsataactactcatctcagtcattgtagtgagaaagtagccataaacaatatgtaaacaaatgagtatggctgtgttctcataaaattttatttatgggcactggaatttgaatttcatataatgttcatgtgtcatgaaatcttcttcttttgattgttttcaaccattaaaaaatgtaaaaaccattctaattttgtgggctgtgcaaaaacatggagtgggccaaatttttcataaagtgacccattttatggcctaaagtggaccataatttgcccattcctgctctgtgtgcaagcgat

SEQ ID NO: 621966 - DNA, 600 bp, Homo sapiens
taggattaataagaaatactgagacaactgagaatttaatttgtaccatgaatctctttgtcttacagaaatattgaatttatttgygaaagaagaagcataactaagatatatatatttaacttctgaggagctgtttgagaaaaataaagttaaattccttttaataaaaggtgttctgttgcttgtctcagaaacagagtgagagaagaatccatgaaaaagagatttatttggattcctaattaatgcatgtaaatacaataggaaaatcatcagcaattactgaaagctgccatgtagatttaaaaccaatgctaaaggattttacattgtagctttgtcagcaagttggcatcactttttcatttactccttcttaagatctctcctctgttctagttaaattggtccataaaagaaactgggcctgtatcccaacatgtggtatctatctgtgtgtgttatttcccttatttgctatacactgaaccttgtcaattgccaaatgtcactctttcttcaaccatagccaaaggaccaaggatgtcttcctaccccaactcttattcatttcccccttctccaaacgcttttggc

SEQ ID NO: 621967 - DNA, 557 bp, Homo sapiens
caggtaggttgacttcacctaaactggggctacattcctgcagttttgaaactgcctatcagctgacacgtacagttgtcaatggcttttactcaagctattaggattaataagaaatactgagacaactgagaatttaatttgtaccatgaatctctttgtcttacagaaatattgaatttatttgcraaagaagaagcataactaagatatatatatttaacttctgaggagctgtttgagaaaaataaagttaaattccttttaataaaaggtgttctgttgcttgtctcagaaacagagtgagagaagaatccatgaaaaagagatttatttggattcctaattaatgcatgtaaatacaataggaaaatcatcagcaattactgaaagctgccatgtagatttaaaaccaatgctaaaggattttacattgtagctttgtcagcaagttggcatcactttttcatttactccttcttaagatctctcctctgttctagttaaattggtccataaaagaaactgggcctgtatcccaacatgtggtatctatc

SEQ ID NO: 621968 - DNA, 600 bp, Homo sapiens
taggattaataagaaatactgagacaactgagaatttaatttgtaccatgaatctctttgtcttacagaaatattgaatttatttgcgaaagaagaagcataactaagatatatatatttaacttctgaggagctgtttgagaaaaataaagttaaattccttttaataaaaggtgttctgttgcttgtctcagaaacagagtgagagaagaatccatgaaaaagagatttatttggattcctaattaatgcatgtaaatacaataggaaaatcrtcagcaattactgaaagctgccatgtagatttaaaaccaatgctaaaggattttacattgtagctttgtcagcaagttggcatcactttttcatttactccttcttaagatctctcctctgttctagttaaattggtccataaaagaaactgggcctgtatcccaacatgtggtatctatctgtgtgtgttatttcccttatttgctatacactgaaccttgtcaattgccaaatgtcactctttcttcaaccatagccaaaggaccaaggatgtcttcctaccccaactcttattcatttcccccttctccaaacgcttttggc

SEQ ID NO: 621969 - DNA, 572 bp, Homo sapiens
actttttctggattttttatcctattcaatttggcctattaacctaatctagtaccagtattcactgttttaattataatagttttataagtattgaaatctggtgggrcaaatatatactccatttcctttttttcttcgcctttaagtttgtcttgactgatctttgcccttcactctttcattcttcataagttctaagaaaagcacttttagatttattagaatagtattgaatttattaataaatttgggcaaaatagaaacattttctatgttgtctttctacccacaacactgtatgtatttctctccatttacttaggtttatcttcagtaaagatataagatttcctcaaaaaaaaaagaatgacttttgtgatatttatttctagatatatagatttttttctctattaaatgagtttctaaaatcacatattctaattgattttaatggtatatataaatgatattgatttttgtgtaatgattgtaatattcagcaaagttactgatctaaattctaatagtctgcctgtagattctcttggattttctatgttgtcagt

SEQ ID NO: 621970 - DNA, 558 bp, Homo sapiens
agccctcgtgtggaagcaagtcaagtaaagcttctatttacattttgtttttgtttttttttttaactagatcagctcagacatcaactgatttaatcacccttgtcagcttctaattaaactgacaacttctgaaacttaatttacctatgttttaacagagtagcaggttgctgtggcattggctaattgtacttaatcaaatatatagaaagagaatacttccttttttcttatttatcagtgtctctaaatctctatctaaaggcaactaaagaaagatttcaaaaatggtcacccagaccaaaataaaggaattcgaaattatcaatagacacataaaaatcaacttcattagtaatgaaaaatgaaaaggatttttacccatataaaattgttataggattttggtttgggtgttggttttggtttttttyttgaggagaaaaaaaaataagagtgtgtgtgtgcgtgtgtgtgtgtgtgtgtgtgtgtgtgtgtgtgtgtggtttggatgtaagaaagatgtattttcatagatttccaataagacatata

SEQ ID NO: 621971 - DNA, 546 bp, Homo sapiens
aactctgccataagctaatgtgaatagacagagtacacatcaccatttaagaactgcaggctgggcttatacaaatgatcctatgccttgtagataaacaagatgtaccattccacaggggcaaactgcttggatgtagatttaggaaatgtttgagcactgacattcaaactcttgacaagccactatatttctgtttgcttcatgaactgggacaagtataaacagtatcttactagctttttgaccttagtttaaatttatctaatattctattattacagttaggcaaaaggtatggctggctggcttccagggctacaaaggatctcataaataataaaggagaaaactaaatgtggaattatacccacttactgcaatgaragtgctatggtttgaatgtatgtgtccttccaaattccataccttgcaacctaatacccaatgtgatagtattaagaggtgggtattttggaaagtgattaagtcatgagggctctgccttcataagtgaatcagtactcttatgaaagagatggaagg

SEQ ID NO: 621972 - DNA, 635 bp, Homo sapiens
actagtttctgcacagaaaaataaactatcggcacattaaacagacaacctacagagtgggtgaaaatgtccacaaactatgtaaccaacaaatgtctaatatctggaacctataagaaacttaattcaacaaacaaaaaaccaacaaccccattaaaaaatgggcaaaggacatgaacagacacttctaaaaagaagacatacatgcagcgaacaaatatatgaaaaaatgctcatcatyactaatcattagagaaatgcagatcaaaaccacaagataccacctcacatcagtcagaatagcaattattaaaagtcaaaaagcaacagatgctggtgaagttgtggagaaaagtgtacacttatacactgttggtgagaatgtaaattagttcagccactgtagaaagcagtttagagatttctcaaagaacttaaaactaccattcagcccagccatcctactactgggtatatacccaaaagagaataaattgttctatcaaaaagacacacacattcgtatgttcatcacagcactatttaccatagcaaagattgaaattaactggcttctatcaatagtggactggataaagaaaaagtggacacatacactataaaaactccacagc

SEQ ID NO: 621973 - DNA, 606 bp, Homo sapiens
ttgcttaaaacagtgcccaaccctagggctggagtgctgtctagtgtttctaagcacaagaaggccatgttgtaccttagggagaaaatgcatgtgttaggtaagctttgttcaggcatgagttataagcaccaatgtgagctcaatgtcagtgaatcaccagtacatattaaataaggtggtaacaagcagagcaagtgtagatgttgtccagaaacacatacaaaacaaggttatatattgatcaattctcaaaaatgtgaccagaggctcccaggaaactaactctgtatttctcctaggaacaattattcagtattcactaactcagtgttggtggcaacttcatagaccataactaccrtggataatgagaactgactatacatataaaattacaattaaggtaagtgcttttcagaataagcggttggtattaggtaagtgtatgtttttgtttatggagaaggcagatatagcattgagttaggttgtccgggaacatattcctgaggatatggtgtggtgttagagtataaaagtagaatagggtttaataagattaaaacagagtggatgtgtcatcccagacctatggaacagact

SEQ ID NO: 621974 - DNA, 602 bp, Homo sapiens
gaactcatccttggactataaacttggaaatgagaaaaagatgttaatgaatactatattataaatttactgtgtgagaaactcctgtttatgatcaacaacctcttaagaggatacaaaactctccagattagacccccatccattatatgtattgaaacatcactatgtgcccatgaatatgtagaagtattttaattttaattttatgttttaattttaattttttaaaaataaaatttaaaacatgaaattgataagtacttgtcaattaaaataaaaattaaaacatgaaattaaataattaagatattgatggatgtgtccctttgaagaaataaaagagcatttcataacagtgaaataattcttactaaaaaatagatctctgaacttcctgagaagctaaaattcagagccaaaccttctcagaagatgtggggatctaaaccagtagagtgaagtactgawctgaaagtctaatctcggtgatctaggaagaagagcataagcagcgaccatgaaatgaattgttaaatcaaggtctgaagattaaaaaagcaaattacttgaagtaagcaggatgcagtgggggatggcag

SEQ ID NO: 621975 - DNA, 560 bp, Homo sapiens
tcttctggcttgtagggattcagmtgagaggtcctctgttagcctgattgggttccctttgtaggtgatgtaccctttctctctggctgcctttaacattctttctttcattttgaccttggaaaatctgatgattatttgtcttggggataatttgcaggggctctctgtactccctgaatttgactgtgggcctctctagaaaggttgggaaagttttcacagaatatcctgaaatatgttttccaaattctttgctttcttcccatcccttgcagggatatcaataatggaaagatttggcctcttttcataatcccatacttcttggagattttgttcattcctttttattcttttttcttttttttctgactgccttatttcagagaaccagtcttcaagttccgagattctttcctcagcttggtttattctgctgttaatgcttgttattgcattgtaaaactcttgtgttatttagctctgtcagatctgttgggttctttttgataccggctatttcatccttcagctcctgtattgtattactgtgattg

SEQ ID NO: 621976 - DNA, 440 bp, Homo sapiens
agtttgcaaatttagataatgaaataaacgtactatggttttgcctcatttgtactttgccacagctgattaagccttctgattataatttctgtatttgtctttagcagaacagcagaactatgaaacatattgcctaaattgaatctgtgttacaaaaattttagggataattaacgaaattctctgtagggtataaaacaacaatagttttaacwagattgaatagaatacatatacatctattcgaaattgttgtttcaggtagcaaacttgttaaccatgttgatctgcatttttagtacttagttgctataaataataaagcaaagtcaaaagtattcaaaatgccctcaaatttattttaaatagtataaggtaggcacacaccctgctgagcttcagttatatgaacacaattaaccatatttcactaaagt

SEQ ID NO: 621977 - DNA, 642 bp, Homo sapiens
caccatgtgaggacacaacaagaaggtgtcatctataacccagaaagtgggccctcaccaaacgtcaaatctggctttggtcttagacttcttggcctgcagaactgtgagaaataaatgtatgttgtttaaagycatccagtctttggtgttctgttatagaagttcaaatggactaagatatttgtcttcttctgaagcttacatttaattgatagggacatgcaattgtaaaataagtaatgtattattttgtgaaattatgaaagctctatattctgattttatccccttttacaccacaaaccttatatagcacaccacaaaattctgaattcacagtgctcattggaaacagtttgatattttttctacagagaaagagttaaaaaagattttcatagtgttattagaaacagtaactttaactggcccttttattaataacgttctttgtcacatgtagttcccttttacattgctctttcagatatcggtggaactgctgctgttttgatctttctcttttcttccttctttttaatctttggattaagtgctgccggcgatgaacccttgaggtgaggctattgatttggagatgctaatagaactgcaaactaatacattatcctgtcctaa

SEQ ID NO: 621978 - DNA, 642 bp, Homo sapiens
caccatgtgaggacacaacaagaaggtgtcatctataacccagaaagtgggccctcaccaaacgtcaaatctggctttggtcttagacttcttggcctgcagaactgtgagaaataaatgtatgttgtttaaagtcatccagtctttggtgttctgttatagaagttcaaatggactaagatatttgtcttcttctgaagcttacatttaattgatagggacatgcaattgtaaaataagtaatgtattattttgtgaaattatgaaagytctatattctgattttatccccttttacaccacaaaccttatatagcacaccacaaaattctgaattcacagtgctcattggaaacagtttgatattttttctacagagaaagagttaaaaaagattttcatagtgttattagaaacagtaactttaactggcccttttattaataacgttctttgtcacatgtagttcccttttacattgctctttcagatatcggtggaactgctgctgttttgatctttctcttttcttccttctttttaatctttggattaagtgctgccggcgatgaacccttgaggtgaggctattgatttggagatgctaatagaactgcaaactaatacattatcctgtcctaa

SEQ ID NO: 621979 - DNA, 642 bp, Homo sapiens
caccatgtgaggacacaacaagaaggtgtcatctataacccagaaagtgggccctcaccaaacgtcaaatctggctttggtcttagacttcttggcctgcagaactgtgagaaataaatgtatgttgtttaaagtcatccagtctttggtgttctgttatagaagttcaaatggactaagatatttgtcttcttctgaagcttacatttaattgatagggacatgcaattgtaaaataagtaatgtattattttgtgaaattatgaaagctctatattctgattttatccccttttacaccacaaaccttatatagcacaccwcaaaattctgaattcacagtgctcattggaaacagtttgatattttttctacagagaaagagttaaaaaagattttcatagtgttattagaaacagtaactttaactggcccttttattaataacgttctttgtcacatgtagttcccttttacattgctctttcagatatcggtggaactgctgctgttttgatctttctcttttcttccttctttttaatctttggattaagtgctgccggcgatgaacccttgaggtgaggctattgatttggagatgctaatagaactgcaaactaatacattatcctgtcctaa

SEQ ID NO: 621980 - DNA, 642 bp, Homo sapiens
caccatgtgaggacacaacaagaaggtgtcatctataacccagaaagtgggccctcaccaaacgtcaaatctggctttggtcttagacttcttggcctgcagaactgtgagaaataaatgtatgttgtttaaagtcatccagtctttggtgttctgttatagaagttcaaatggactaagatatttgtcttcttctgaagcttacatttaattgatagggacatgcaattgtaaaataagtaatgtattattttgtgaaattatgaaagctctatattctgattttatccccttttacaccacaaaccttatatagcacaccacaaaattctgaattcacagtgctcattggaaacagtttgatattttttctacagagaaagagttaaaaaagattttcatagtgttattagaaacagtaactttaactggcccttttattaataacgttctttgtcacatgtagttcccttttacattgctctttcagatatcggtggaactgctgctgttttgatctttctcttttcttccttctttttaatctttggattaagtgctgccrgcgatgaacccttgaggtgaggctattgatttggagatgctaatagaactgcaaactaatacattatcctgtcctaa

SEQ ID NO: 621981 - DNA, 570 bp, Homo sapiens
ctgggcgacagagagagactctgtctcaaaaaaacaaacgaacaaaaaaactgattgatgtgaaatggaagtattcaaatgtagataaacttcatgtaaaatagaaaatgtaaataaaatactagctactttatttcccaatgtgaaatagaacttaaataacttgacctatgggtttacaaggaatgtatttacattgtttagcattataccaagatggcagtcttgacaccatgcagtatgacttacgtgttttgtcaaaaagtgcaaagacactgaagacaatgattatttagtggatgtgtatcaagtaaaagccrttccacatgactcacacagacaggtttcactttattatgaaataaggctataagaaaaactgactattattctccctattttaaaaaatataaagatgcttgaaaaggataatactttcatttgtaattattatatttatgtagcacttaatatatatatgtccatatatgtactatgtccatatgtatgaatacttaagtgtatacaattattcatgtatgtacccacacatttaatcctcacaacatc

SEQ ID NO: 621982 - DNA, 570 bp, Homo sapiens
ctgggcgacagagagagactctgtctcaaaaaaacaaacgaacaaaaaaactgattgatgtgaaatggaagtattcaaatgtagataaacttcatgtaaaatagaaaatgtaaataaaatactagctactttatttcccaatgtgaaatagaacttaaataacttgacctatgggtttacaaggaatgtatttacattgtttagcattataccaagatggcagtcttgacaccatgcagtatgacttacgtgttttgtcaaaaagtgcaaagacactgaagacaatgattatttagtggatgtgtatcaagtaaaagccattccacatgamtcacacagacaggtttcactttattatgaaataaggctataagaaaaactgactattattctccctattttaaaaaatataaagatgcttgaaaaggataatactttcatttgtaattattatatttatgtagcacttaatatatatatgtccatatatgtactatgtccatatgtatgaatacttaagtgtatacaattattcatgtatgtacccacacatttaatcctcacaacatc

SEQ ID NO: 621983 - DNA, 532 bp, Homo sapiens
actttccataagctgatatcactgaatgtaaagacaatgacaaaatactttctatgttgaactaaccatgygtggatcttataaaacacttttctctggatatccgtggtgtcttttggccctaagtaagttaaaaagggacttttgatcttctcctttagcctataaactttccacaggtggagactctgcagattactgaattaactcatttacactttaatatttaaaatgttaataaagtattggatgaacatggctaaaagatcaaatagtagagaaaggcatatctgttagtaatgtttacaaatatgagtaacacaaaaccaactaactacaagaggtttaaaccatggagatgttcttttattttcttcttatattgaggactcaagataggtaagtgtgaggttggactggtgactgtacacagccatcaggcccagattctctttctgctgtgacatacccatcatgtcatcatttgtcatcatgtccttcacttattgtaaaaagtgacctttaggctgga

SEQ ID NO: 621984 - DNA, 585 bp, Homo sapiens
ttcatcaagaagttagaaaaatctcaaatcaacaatctaactttggaaaggaagaaattagggcaactaagggaaaggaactggtggggggagaaaatcccaaagctagcaaaagaataataaatcactgaagttagagaagaacttaatgaaattgatgtgtaaaaatccatacaaaagatcgataaaaccaagacttggttttcaaaaaaataaataagatcgataggccactagtttaacaaagaaaaagaaagagaagatccagaaaagcacaatcagaaatgaaaaaggtggtttttatccatatcaccactgatcccacagaaatacaaaatatcctcagaaactattgtgaataactctaagcacacaaattagaaaatctagaggaaatggmtactttcctgtaagcacacaattttccaagattgaatcaggaagggactgttaccctaaatagaccaatatctaaacttctgaaatggaatcagtaatgaaaaacctaccaacaaaaaaacatcctggaccagttggtttcccagctgaactctaccacactgaaagcaatcctgcacaaaacta

SEQ ID NO: 621985 - DNA, 563 bp, Homo sapiens
atggtaaaaaccctcaacagactcggcatcaaaggaacataccacaaaataataagatccatctatgacaaacccatggccagtatcttactcaactgacaaaagctctaacawttttccttgagaactggagtaaaacaaggatgcccactgtcagcactcctgttcaacctagtcctggaagtcctagttcaagcgttcaggaaagagaaagaaataagggcatccaaataggaaaagaagaagtcaaactatctccctttgctgatgatatgattctacacctggaaaatcctgaagactctgccaaatgatacctagaactgataaatgactttagtaaaatttcaggatacaaaatcaatgtacaaaaattagtagaatttctgtacaccaataatgtttaagctgagcatcaaatcgggaacatattcccatttacaatagtcaaaaggaaaataaaatacctaggaatagagctaaccaaggaggtgaaagatctctacaagaagaactacaaaacactactgaaataaatgaaagaaaacacaaatcaatagaaa

SEQ ID NO: 621986 - DNA, 620 bp, Homo sapiens
gaaggcagccagggcagcagtgcagttggaggattttgccagaatctaaataggtgagcaaaggactgtctcaaggagaacatcacctacttcattctcctctcccactatgggcaaaaagataaaattgtagtaccacaatcaaccaggggagggccagacctcctgcttgggattaggtgcccaaaagtgaaactcttyttccttttatattttataagagaagaggaagtctgactgcttcctgtttcatgcccttatttaagccagcgatctatactctgtccagtgcacaaatctcagagagaagaaaaaagacctgtcaatatgaccaacaagagaaaatctttctgcatagctatctataataatcagactagtcttttatgcataaccatgactgattgaccaaggatcactacatatttgatcaattcagatacaaaatgacccagatgtggtttataggctatttttcattatctctttaaggtatacattacatacagtaaaaatcacctttcttaaagcaaagttctgtgaattgtgcaagatacacacagttatgtaaccaccagctcaggatgtggaaggactatattattccccaaaattcccct

SEQ ID NO: 621987 - DNA, 537 bp, Homo sapiens
tttgacttttgctcagaatattgctgatccttgttttgtttttcagagtcaaggaaactttattttgaactatttacagcttttaataattaagcaaggtatactcctgtaatcaaaatttggagtagtttgtttctctctgcctggttcctctagaatttgggaactatttgtgagtattcttaacttatggcaatatagttgtttgcataattgcagtaagaatccatttttcttttgcaacaggacacagttggaaaaaatggttatkttaccaaggccttgactggaaggctatgcttccctttaggaaatcaagctcaacttgcagagccaataaaagcccagtggggagactggcctcatacccttgcctacacagtccctgtacagggtttctgacctatggtgagtaaagaatgtcactttctaacaggtccaggatcttaaagtttatcttgggactttaagaggaaaggatcacccacctcacaggtatttgaggatacaaacccatggccaggcttggctttaaaa

SEQ ID NO: 621988 - DNA, 604 bp, Homo sapiens
gtttgtttggtttttttgagatcgagtctcactctgtcacccaggctggagtataatcaccccatttccgctcactgcaacccctgcatcccaggttcaagccattctcctgcctcaccctcctgattagctgggattacagacgtgtgccaccatgcctggctaatttttgtatttttgtagagatgagtttcaccatgttggccaggctggtctggaactcctgacttcaggtgattcacccacctcggcctcccaaagtgctgagattacaggcatragccactgtgtctggccaagagagtcctttactacaacaatgctcctgctcattcctctcatcaaacaaaggcaattttaagagcattttgatgggaaattgttaggcatttatcttacagtcgtgatgtggctccttgtgacttctttttgtttcctaatcttaaaatagcctgtaagtggcatcaattttacttcagttaaaaatttaaaaggactgcattgacatggtgaaattcccaggaccctcagttccttaggtaaggactacatggctggcatcatcacttacaaattcacacatgtcttgaacttgatgaagctt

SEQ ID NO: 621989 - DNA, 581 bp, Homo sapiens
gagtctcactctgtcacccaggctggagtataatcaccccatttccgctcactgcaacccctgcatcccaggttcaagccattctcctgcctcaccctcctgattagctgggattacagacgtgtgccaccatgcctggctaatttttgtatttttgtagagatgagtttcaccatgttggccaggctggtctggaactcctgacttcaggtgattcacccacctcggcctcccaaagtgctgagattacaggcatgagccactgtgtctggccaagagagtcctttacyacaacaatgctcctgctcattcctctcatcaaacaaaggcaattttaagagcattttgatgggaaattgttaggcatttatcttacagtcgtgatgtggctccttgtgacttctttttgtttcctaatcttaaaatagcctgtaagtggcatcaattttacttcagttaaaaatttaaaaggactgcattgacatggtgaaattcccaggaccctcagttccttaggtaaggactacatggctggcatcatcacttacaaattcacacatgtcttgaacttgatgaagctt

SEQ ID NO: 621990 - DNA, 623 bp, Homo sapiens
tttcctaatcttaaaatagcctgtaagtggcatcaattttacttcagttaaaaatttaaaaggactgcattgacatggtgaaattcccaggaccctcagttccttaggtaaggactacatggctggcatcatcacttacaaattcacacatgtcttgaacttgatgaagcttatgttgagaagtaaagcttatatttttatgttttaattcaatttttccacaaactttttgaagtcctcttgtatttctagcgtgtccccttttccttctcacatctttctctcccatattatagcaactttgagcttcctatcatctctgaattaagagttcttattagggagctatgctatttctgttatttggaggacctttccttaatccctctttgcttagaaaactcttactcatccattcatatagctttacygtgaaaacttttatgattctccagtatggggaattagagaacactgtgcactttgcttccctacaatgctttcttcaaaacatcataattggccttttcctggttttatattacgtattacctgccactttgcttgtctcatttcccatcttataaatgcccttaagacaggactcacatcttttttttttt

SEQ ID NO: 621991 - DNA, 623 bp, Homo sapiens
tttcctaatcttaaaatagcctgtaagtggcatcaattttacttcagttaaaaatttaaaaggactgcattgacatggtgaaattcccaggaccctcagttccttaggtaaggactacatggctggcatcatcacttacaaattcacacatgtcttgaacttgatgaagcttatgttgagaagtaaagcttatatttttatgttttaattcaatttttccacaaactttttgaagtcctcttgtatttctagcgtgtccccttttccttctcacatctttctctcccatattatagcaactttgagcttcctatcatctctgaattaagagttcttattagggagctatgctatttctgttatttggaggacctttccttaatccctctttgcttagaaaactcttactcatccattcatatagctttaccstgaaaacttttatgattctccagtatggggaattagagaacactgtgcactttgcttccctacaatgctttcttcaaaacatcataattggccttttcctggttttatattacgtattacctgccactttgcttgtctcatttcccatcttataaatgcccttaagacaggactcacatcttttttttttt

SEQ ID NO: 621992 - DNA, 583 bp, Homo sapiens
aagcttatatttttatgttttaattcaatttttccacaaactttttgaagtcctcttgtatttctagcgtgtccccttttccttctcacatctttctctcccatattatagcaactttgagcttcctatcatctctgaattaagagttcttattagggagctatgctatttctgttatttggaggacctttccttaatccctctttgcttagaaaactcttactcatccattcatatagctttaccgtgaaaacttttatgattctccagtatggggaattagagaacactgtgcactttgcttccctacaatgctttcttcaaaacatcataattggycttttcctggttttatattacgtattacctgccactttgcttgtctcatttcccatcttataaatgcccttaagacaggactcacatctttttttttttttgagaaggactcacatgttaattacattttctagcatactcttcagcacacactagcaacacaatgcatgcttgatgactgaattataatcattgattacttcaccccataaaataacagatgaagaaatatagaaagacagct

SEQ ID NO: 621993 - DNA, 583 bp, Homo sapiens
aagcttatatttttatgttttaattcaatttttccacaaactttttgaagtcctcttgtatttctagcgtgtccccttttccttctcacatctttctctcccatattatagcaactttgagcttcctatcatctctgaattaagagttcttattagggagctatgctatttctgttatttggaggacctttccttaatccctctttgcttagaaaactcttactcatccattcatatagctttaccgtgaaaacttttatgattctccagtatggggaattagagaacactgtgcactttgcttccctacaatgctttcttcaaaacatcataattggccttttcctggttttatattacgtattacctgccactttgcttgtctcatttcccatcttataaatgcccttaagacaggwctcacatctttttttttttttgagaaggactcacatgttaattacattttctagcatactcttcagcacacactagcaacacaatgcatgcttgatgactgaattataatcattgattacttcaccccataaaataacagatgaagaaatatagaaagacagct

SEQ ID NO: 621994 - DNA, 660 bp, Homo sapiens
gcctgacagtgttaatttctgctgaaagcaaactttatgctatttaacactcctactctctggagtttctgattgggcttcttcaaatattaactgacatttgcagccaaacaccacaccatttatccagaagtattattaaaataaaccatttcacaaacaaaataaggacattttttattatcactattttaaccctgtgttattctcctatccatctgcacctcactttaattcatgaacaaaaagaatctttggtatcaaggataatattaaaattagaaagaaagccacttggtctttgtccttaygttgtttacagaatgctccacgttggggtactattttgaaaacctggcattttttgattacatgtaatctgacttgttgaggatctagagtgcagaaatattgtatgcatgtaaatggtgaaaggaagaggtttttgtctccttggcaattcatccccattatcagtctacctaaaaattgtctcccgccattacatagaagcactttgtactttgtaaaataaactattgcagatgttattaaaataaactgttatgcagaccatatgaggatattatttgctgcattatcaagttctcaacttggaattagtgactgaaatcatcaaagttgtttattgcatctctt

SEQ ID NO: 621995 - DNA, 615 bp, Homo sapiens
cttctgttaacaaaacaaacagattaaatgtccatattgctargcaaagtatgtctgttaaataaaggtgttgaagtaatctgttaaatgttaaatttaactctgaaagattaaatagtaggttgcttaggtcagaaattcaataaaaaattctctaagcattctcttgctatcaaattgctttatttatgtcatggaggtttaatctttagagctatgacatttccaaaaaatatatactttgctttgtttgagaaaaaattgcattgtgccataacatgattttcataaaagtttaaacaatgtcttgaaaaagtaaagctaaaagtttattaagcccaaatataaccatgtattttatttatactttgacagatgcctacagaattcaaagtctaaataggtaataggtacagcaggactttgaataagattgtttcatccagggttttttcactagaatgtgaattagattaaaaaaacaaacaaaaaaaacccatcactttccagccagggcctctgtctgtgtggggtctgcatgctttccccaggcctgcctgggtttgctccaggtcctctgatttcctcccacatccagatgtgcctgttaggttc

SEQ ID NO: 621996 - DNA, 615 bp, Homo sapiens
cttctgttaacaaaacaaacagattaaatgtccatattgctaggcaaagtatgtctgttaaataaaggtgttgaagtaatctgttaaatgttaaatttaactctgaaagattaaatagtaggttgcttaggtcagaaattcaataaaaaattctctaagcattctcttrctatcaaattgctttatttatgtcatggaggtttaatctttagagctatgacatttccaaaaaatatatactttgctttgtttgagaaaaaattgcattgtgccataacatgattttcataaaagtttaaacaatgtcttgaaaaagtaaagctaaaagtttattaagcccaaatataaccatgtattttatttatactttgacagatgcctacagaattcaaagtctaaataggtaataggtacagcaggactttgaataagattgtttcatccagggttttttcactagaatgtgaattagattaaaaaaacaaacaaaaaaaacccatcactttccagccagggcctctgtctgtgtggggtctgcatgctttccccaggcctgcctgggtttgctccaggtcctctgatttcctcccacatccagatgtgcctgttaggttc

SEQ ID NO: 621997 - DNA, 641 bp, Homo sapiens
aggtacagcaggactttgaataagattgtttcatccagggttttttcactagaatgtgaattagattaaaaaaacaaacaaaaaaaacccatcactttccagccagggcctctgtctgtgtggggtctgcatgctttccccaggcctgcctgggtttgctccaggtcctctgatttcctcccacatccagatgtgcctgttaggttcatcagcacatctacacagtcccagtgtgagtgagagtggtgtgggtgtgagtgcgccctgtgatgggatggcatcctgtccggggcattttcctgcctggcatcctgagctgcagggataggctctggccacctgcaaccctgaactggaataattgggtaaatcatgatcttacttgtttttattaatcattcttaaatgtatgtatagttcacatttgtttcaatgtyagaagtgttttgggtctttatttagaagtttggtgatgtttttgcaaccagaaatatgccataggaatttcacttttgtttggatcaaatagcctgtggtcaaattggtttccttatagttattttgcttaaaggaacagtttccaagaacctgtagacaacattcagtgaggacatactgtagttggtacagtgtatcagatg

SEQ ID NO: 621998 - DNA, 633 bp, Homo sapiens
ttttcagtggtcatgggaacacgaagttaatagtgtcaatgaggacactcagggaatgggtacagaacgagtggagaaaagtgtctaaaagggaaccctgagaagcaaacacwcctagggtggctaggcaaggaagaggaacacaaaaagtgatctaggaaagagaaagatgaggagccagtggcggagacaacccatgcagtggccactgaaacggttctgaatctgctcttctgctgcttcagggacccaggggagcttagcaagagaacctttgtctgtgtccaggcaagggacacaaagttaggtcacaatggtaaaaaggataactctccttcattcattccatacccattcctcatgcagcctcatcaatcccaatggcttcaagttcctatgactatggaaaatgcatttccagtttctaccaagcttcagattcatatttctaaatgcttcctgtacatccttgcataagaatacctctaatgatattcattatttaaagggaaagatagatttagaagggaaaaatgtctaaatactattagaggtattcttatacaaagatgtattattttctaatatttcaaaatggagccctagactggtctataattttatataccaggt

SEQ ID NO: 621999 - DNA, 509 bp, Homo sapiens
ttgattgaattactattagttaccatttattaaatgcttgtcatgtgtcaggcattgttctaattagtttaactcatacgttcctcacaatagctctatgagataggwggcattcttatggaaactgatggtagacaggtggaataactcacccaaggtcccacttactactagtaagtggtaaatacaggaagtaaaggcagctctccatagctccatggccctgtgtacttaccaccaagtactcttgggaagctgaaaggtacttttatcatggctcagcttcctcccatttctgtacctcactttcatttattcagttctttaccatttacaaaccaaaggcctaaaacaattctaaaggtacatatttcacagatggaagaaattgattcttggagaaatgacttgctgaaggctacttcagctattgcagttgactgtgagttcctgattcttagcaagcactcaccttcatccctatcaagataggttgggcttgttgccaa

SEQ ID NO: 622000 - DNA, 499 bp, Homo sapiens
agctcacgtggtatctcccatcgaatatgggagcctgaagtgttagttttaacctcctttactgctaaatttaaggatgaaagactttcttaaaaagttagtagtgttcccattttcttttggcctgtgttgggaactgttgttaacaattacatttttttagtttttagaaaagatcctaaatttttgaattgacattttgtacatagaaaacctagatttttttttttttttttttttttttgcacattgaatgtatagctttattacctcattttgaaaactagtactgctttttaatgaatggggaccattctttrcaggaacagtatttctagtagaatttttgaaggtatttttggaattctcagacttgtccaatatgtagcaggatcagaattttagagcagggaaacccacagagatgatttcatccccgcccctctttttactgacaaggaatgtgtgggtcagggagggaaagggactccaccgtgat

SEQ ID NO: 622001 - DNA, 633 bp, Homo sapiens
aaccttttctaaataaaaactacaaaggaaataaaaacaggtttggaaaagaggaaaaagtctgataatagcgttatggtactcatcattaaagaaaacaaacttgtaagctcccaaactacaccttaggaaaacagtacattctcagtgtggcttaaagatatggtagaggctgggcgcggtggctcatgcttgtaattccagcccttgagaggccgaggtgggtggatcacaaggtcaagagattgagaccatctggaccaaaatggtgaaacctsgtatctactataaacacaacaattagctgggtgtggtggcgcacgcctgtagtcccagctacttgggaggctgaggcaggtgaattgcttgaacccgggaggtggcggttgcagtgagccaagattgcgtaattgcactccagcctgggtgacagagtgagactcagtctcaaaagatatagtagagaactgacctaaaagattccaaaaaggaaagagtttggccctcagagcagttaacaaagaaagttaaagttgttctctaaccttagaaattggcaggtgccacagatactctttgaagggttaataaaacctcacataacctctttaatccagtaggtggttgaaactt

SEQ ID NO: 622002 - DNA, 631 bp, Homo sapiens
atgtttaagtgttaagaacagcagaacataaaatagatctatttacgtcacataaatgttatcttcgcaaattggtgttaagcagtgatattagcagtatataagtcagaaagtaagaaagtagtatataagtcagaaagtagcagtatatgagtcagaaagaaaaagaaaaggaatcaagcggtataaccagaggctatcacatgagagcatagattgctgtttattgttcactgtagtatccccaggacctagtaagttctgaataaatatttgttgaatgaatgaatgtatgaataaaggaacagagctcatcaaaacaaaaacgcaatttgtgttgtagaattataggcccatgcatacttgctttaacaagtcagaaaagagacttcccaaaaataacatgtttgctactgactataatttaaaattgggcgttaaaatttatgtatggatcctacattaaaatatggccaagatttttttttttttttttttttttttttttgagacagagtctcactttgtcgcccagsctggaatgcagtggctcgctcgactcactgcaacctccgcctcccgggttcaagcgattctcctgcctcaggctcccaaatagctgagaatacag

SEQ ID NO: 622003 - DNA, 588 bp, Homo sapiens
aatatacattttaaattgctacataatagatatacatacttttggggtacatgatattttgatacattcatatgatgtgcaatagtcaaatcaggataattgagatatccatcaccttgaacatttatgatttctttatgctgggaatattcaaattattctttactagctattttgaaataacaatggattgttgtttgctatagttactctgttaatttattgaacagtaggtcttatttcttctacctacctgtatatttgtacccattaatcaacctgtcttcatccttcccacctccctacccttcctggcctctgataaccaccaaactactctctatcttcaaataaagaaaatgtggtgcgtgtatatatatatatatagtatatatatagtatgtatatagtactatatatatactatatatagtacatatatatagtgtatatatatagtacatatacagtatatytatatagtatatatagtatatatacactatatcgatatagtatatatataatggaatattattcagccaccaaaataatgaaatcttgtcatttgcagcaatatggatggaa

SEQ ID NO: 622004 - DNA, 588 bp, Homo sapiens
aatatacattttaaattgctacataatagatatacatacttttggggtacatgatattttgatacattcatatgatgtgcaatagtcaaatcaggataattgagatatccatcaccttgaacatttatgatttctttatgctgggaatattcaaattattctttactagctattttgaaataacaatggattgttgtttgctatagttactctgttaatttattgaacagtaggtcttatttcttctacctacctgtatatttgtacccattaatcaacctgtcttcatccttcccacctccctacccttcctggcctctgataaccaccaaactactctctatcttcaaataaagaaaatgtggtgcgtgtatatatatatatatagtatatatatagtatgtatatagtactatatatatactatatatagtacatatatatagtgtatatatatagtacatatacagtatattkatatagtatatatagtatatatacactatatcgatatagtatatatataatggaatattattcagccaccaaaataatgaaatcttgtcatttgcagcaatatggatggaa

SEQ ID NO: 622005 - DNA, 531 bp, Homo sapiens
caaggtaaggttgccagcatagttgaattctggtgagggctcttttcctggcttgcacatgaccgccacccactccctgtgtcctcgcataagggtgagggagaatggtgaagaaagctttatagagcaaactctctggtctctttctataaggacacaaattccattatcacgagggcccctaattasctcccaaagacgctatttccaaatagcatcacactagaggttagggttcaacatgtgaaatatgaggggacataaacatttgagcggacatcaatccacgatatcttgtaaagtgggaagcacacagtttctgtaactgaaggccctcaataaatggtagttttataaaaagaagcggctgtatcctgggcctcactgttttgatgttactatataattctactttttcatgttgcagattaagtaagttgaatctggtattagcacatatggctttgttattgtctttgtttccttggcggtgtgcacctgctcagcatagaagatgtgcagattgactgt

SEQ ID NO: 622006 - DNA, 556 bp, Homo sapiens
gttttaaccaccatggtatggtatccttcctaaaatttaagtaacactctgcaaggaattttcttcttgggtttagtctactagcatatactgtatcttcctatggttaatatctaaatactgtgaggagtggtgggggtggggggcaagactgaagatgagaattgagaagtggcttcctctggaaaagcgatttactcaggtaagagagagacagtgtctttaagaaggtagcacagcctcaccaggacagggtagagagggctgatccatttgtctgaggaggttcatagggagttggagtcttggtgtagtccaaatcttctaaattctgtcccactcctttgtgaccaatgctataactgtcatgtaagaaatcatgaaactgtgacctcagaccttggaagaaattcratctccaattatcttagctttagtgctaaataataaaagaaagcctttagttcatcatggttcagagaatttaagcatttgagcttttgtctgtttaactttctggttttgttagaagttgctactccgcaatattgaattc

SEQ ID NO: 622007 - DNA, 388 bp, Homo sapiens
tcatttccacctatgttcatttcctaggactgctgaaccaaattactacaaactgagtggcttaaaacagtagaaatttattttctcawagttctggaggctagaagctctaaatcaaggtgctggcagggccatgtacactttgaaggctccttgagctttcagagactcaaagcctccttcctttgcctcttcctagcttctggtaactcccagcattccttggtgttctttggttgatatggtttggctgtgttcccgcccaaatctcatcttgaattgcagttcccataatccccatgtgtcatgggaggaaccaggtggagataactgaatcaggtttccccatcctgttctcgtgatagtgagttagttctcatgagatctc

SEQ ID NO: 622008 - DNA, 360 bp, Homo sapiens
aaatcaaattatacagtcacatagattaaagtgccaaatcattctgaaattcttttttcaaagcacctgtatgccctttatcccatttcttttcttgcagaaaagtatttgctcacagaaaaactgaattttaaaaattttagcttttgtttcctgagcacagctacctgtatttcagcttcttcctcaatcttgccctcttttacttgagttgctggttgaacataaatttttgtgggacacaatttatcatcattgcccacaattggtgattatagttcctgttatcattttktgcatgtctggtaccttcaggactcttacattcctgctaaatgtctcctaagacttctgaattag

SEQ ID NO: 622009 - DNA, 566 bp, Homo sapiens
ttattataaacagtttgagaacaccataatacttgaagaaatacacttcagttatttgcagatttgttatgtggaagcttctaatatgttatctgctatttatggcttcatctcaaatggrtaatatcatatttcaaaaactcagatccttgagcacttttttgaaagcaaggtctctacaaaagctatatggaaaaaagtaaaaattagcctggaaaagctacatagcacatatttgtgtagtaactgagcacaggtctgattaatcctcctacttaagattaggcaaatttacttagagctagaaactagaaattagggataaacacactgacatgtttggataaggccagagtgctagatgttgccatttttcaaagaagatttactaattttattatccccaagaaatatattcaaaaccaattattacatatgcaaatgtacatattattaccaataataacagggtaaaaacttaatagtatcccctctggggaaaaaatgaatgggaagttcatgggaaagggacattataaataggcattcctcctaagacttttcac

SEQ ID NO: 622010 - DNA, 566 bp, Homo sapiens
ttattataaacagtttgagaacaccataatacttgaagaaatacacttcagttatttgcagatttgttatgtggaagcttctaatatgttatctgctatttatggcttcatctcaaatggataatatcatatttcaaaaactcagatccttgagcacttttttgaaagcaaggtctctacaaaagctatatggaaaaaagtaaaaattagcctggaaaagctacatagcacatatttgtgtagtaactgagcacaggtctgattaatcctcctacttaagattaggcaaatttacttagagctagaaactagaaattagggataaacacactgacatgtttggataaggccagagtgctagatgttgccatttttcaaagaagatttactaattttattatccccaagaaayatattcaaaaccaattattacatatgcaaatgtacatattattaccaataataacagggtaaaaacttaatagtatcccctctggggaaaaaatgaatgggaagttcatgggaaagggacattataaataggcattcctcctaagacttttcac

SEQ ID NO: 622011 - DNA, 590 bp, Homo sapiens
aagtgattctcgtgcctcagcctcctgcgtagctgggattacaggtgtgcccagctaatttttgtatttttagtagagacggggtttcaccatgatggccaggctggtctcgaactcctgacctcaagtgatccactgcctcagcctcccaaagtacygggattacaggcatgagccaccgtgcccagcctgattataatttatattggaagttattgtataagcagaaaattcagagagatccagaaaagaggtgggagctctttgggttttaatagttggaaaacactgcatggaaaaaatccagcatgacctggatctttataatagtatacataaggaagagacctgtaaggaaacacctgtcatacttgtctgttcaatggcagtaacacaaataaacaaataggctcactctcaatgtttgaatacagcccaaacaatagaagcagagctcagtgtgacatggaattccatgacaaccttccttctaagcaaattccattcaattttcatccccacttaatcacttgcaccatcagtttaaactagattttataagaacctgcctgctaatgaatactattatt

SEQ ID NO: 622012 - DNA, 590 bp, Homo sapiens
aagtgattctcgtgcctcagcctcctgcgtagctgggattacaggtgtgcccagctaatttttgtatttttagtagagacggggtttcaccatgatggccaggctggtctcgaactcctgacctcaagtgatccactgcctcagcctcccaaagtactgggattacaggcatgagccaccgtgcccagcctgattataatttatattggaagttattgtataagcagaaaattcagagagatccagaaaagaggtgggagctctttgggttttaatagttggaaaacactgcatggaaaaaatccagcatgacctggatctttataatagtatacataaggaagagacctgtaaggaaacacctgtcatacttgtctgttcaatggcastaacacaaataaacaaataggctcactctcaatgtttgaatacagcccaaacaatagaagcagagctcagtgtgacatggaattccatgacaaccttccttctaagcaaattccattcaattttcatccccacttaatcacttgcaccatcagtttaaactagattttataagaacctgcctgctaatgaatactattatt

SEQ ID NO: 622013 - DNA, 427 bp, Homo sapiens
aaagaatacataagaagacctaagtaaatgaagaacacagtgtatacaaaaattgtaagaactgtcatcataatgatgtcagtttctccccaaattaatctttacacttaatgtaattacaatatgaaatctctacaaggcttttcatacacatttacaggctgatcttaaaattcatatgaaagaataaagaaaggcaacataattttcaaggcaaataagaaagggacgcttatcttacaaggaaggcaaagctcattataaagccagaataattgaaacagcatactgcaatatgacacaaaaataccagtgaaaaagaatagcgagttcgtaacagttccacataaatatgaacagtagcaagacaattgtctaaycatatggaaaaagataagatcagataactctgtcattccatacaaaa

SEQ ID NO: 622014 - DNA, 465 bp, Homo sapiens
ttatggagaaaagtatacaattttagtaaagaatacataagaagacctaagtaaatgaagaacacagtgtatacaaaaattgtaagaactgtcatcataatgatgtcagtttctccccaaattaatctttacacttaatgtaattacaatatgaaatctctacaaggcttttcatacacatttacaggctgatcttaaaattcatatgaaagaataaagaaaggcaacataattttcaaggcaaataagaaagggacgcttatcttacaaggaaggcaaagctcattataaagccagaataattgaaacagcatactgcaatatgacacaaaaataccagtgaaaaagaatagcgagttcgtaacagttccacataaatatgaacagtagcaagacaattgtctaatcatatggaaaaagataagatcagataactctrtcattccatacaaaaacacatttcag

SEQ ID NO: 622015 - DNA, 603 bp, Homo sapiens
tgaacactttctttattctgtgctatcccagttcatgagtatattttctcccttgggcagaaaattaaagtgctcacaagacttatttttaaaggcatttttttctcttcagtgtatgggaattaaataaatgcctttgattctggctttgccatggatgcttttcttgagccgaatataagcctaattctgtgttttaagttctacctgattctttttgcagtatactaatgcatttcctgaagagtaaaattgagcagtggaggatgggaccattcattcattcaatacgtgtttattgaggacgtacaggacacagcctttgcaccaaggacactcacagacaggtaaacaagtcattaaaatgctttgcgatgagagctgcagccgaggaaagcaccgtaagtgagtagtgaagatggagcagctgattcagccttgatggggcagtacgaaatttgtgggagaggccggacgcggtggctcacgcctgtaatcccagcagtttgggagrccaaggcgggtggatcacgtgaggtcaggagttcgagacaagcctggccaacatgcgaaaccctatctctactaaaaatacaaaaatga

SEQ ID NO: 622016 - DNA, 587 bp, Homo sapiens
atgaaccacattttctatatccagtctactgttgatgggcatttaggttgattctatgtttttgctattgtgaatagcgctgcagtgaacatatgtgtgcatatgtctttattgtagaacagtttatattccagaaggagaatactgaatgttcacaacaaaaagaaatgataaatgatagaattgatggatatgctaattactgtgatgtgatctgtatacattagatgtatggaaacattgctatgtatgctataaatatatataattatcatgtattatttaaaaaataaaaactaaaaaataggtaatcaatattaatcaataaatccaagagatcaagtattaaaaggtattcttatgaaataaagtttacatcatttccacatttctccaaggcttgcctgaatcgtttcactcccaacatcctgagacatgactcagaagagttcaggtagcacagcacactgctcactcacgagcttcggttatgtttttaatctatatggcaatgatcatattyacatgaccaggtccctgtggctgctagcctgccaattgtaccaatagacttaacaatgcagcaa

SEQ ID NO: 622017 - DNA, 277 bp, Homo sapiens
tatgagcattagaggtatccttgcaaggaaagacttgtcttatctcaatacgtctttttttttgcacacaagaaagtcaatgtytgagtcttctaaaatcttcctatttccaaattgcagattatgattgattcctaaacaaagacctaatttttgactcagagacgtggcaagctagtgaatcaccattataatttaacaatcttcaagataaaattatctctgatatttagattttgccccattattaagatatttgggtgtttagttaagaatg

SEQ ID NO: 622018 - DNA, 277 bp, Homo sapiens
tatgagcattagaggtatccttgcaaggaaagacttgtcttatctcaatacgtctttttttttgcacacaagaaagtcaatgtctgagtcttctaaaatcttcctatttccaarttgcagattatgattgattcctaaacaaagacctaatttttgactcagagacgtggcaagctagtgaatcaccattataatttaacaatcttcaagataaaattatctctgatatttagattttgccccattattaagatatttgggtgtttagttaagaatg

SEQ ID NO: 622019 - DNA, 277 bp, Homo sapiens
tatgagcattagaggtatccttgcaaggaaagacttgtcttatctcaatacgtctttttttttgcacacaagaaagtcaatgtctgagtcttctaaaatcttcctatttccaaattgcagattatgattgattcctaaacaaagacctaatttttgactcagagacgtggcaagstagtgaatcaccattataatttaacaatcttcaagataaaattatctctgatatttagattttgccccattattaagatatttgggtgtttagttaagaatg

SEQ ID NO: 622020 - DNA, 525 bp, Homo sapiens
gccagattgaaatgattctacagcatgcttgactgtgtcactttttgaaagctctaagtcttagtaatgtcatctgtaaatgaggataataacactactagctaagatttttgtaaggattagatgatacctataaaatgtttagcaaataatcattctttaactaacaactgtcagccatttctcagagggaagcacgtagaattgatgtttacagctggaatgaagcccagtgagccacttccgccttctcattgtaaagagtaaactcaagagagagtgtagactttccccaaggatgtgaaaaatggaaacaggtgcaaasccaggtctcctgagtttcttaggttaaattttttttttcataattactagataactctcttctaggtcaaaaaaagtcttaatactattagaccctctgacagaaagtgatgctttttgcctgtttccttcaaagtttacattctctgagttcatagaaatgacattgtaagtgtattttccataccattggtcaagttg

SEQ ID NO: 622021 - DNA, 596 bp, Homo sapiens
gggtttccaatgtgaagaatgtagaaagcctgtgtgtgatatgtctgacattctcatacacgtgcgcttacacacacacacacacacacacacacacacacaccaggctccttttgtttgcagtaactgaggccagtgaaataaaaagcaagctgagcctaataacctaagtgagagcttaactaataaaatcttgaatgaattcagtgcaaaacacccattgcttgaatttgttttctgttccaaatagtactttggtcattattatcctgatttttgtttattgaatgcagaggtttctaatgcaaatcagactcttcaacatccagagaacataaaacaatgacgccagaccaattcttgtgctccatcggcttggtgcgttataccagaagcgtattgtgacrcctaagtgcttgctcttttcattattttttgaacttctcaccactgatcatctcaggactgagactcccttagtgtgattcaccagccaaagacgactattcagactctgctgatagaggttcctggatgaaaattttttatctgtatgtgtcaatagagataaacctttggccccttggcagggaaag

SEQ ID NO: 622022 - DNA, 570 bp, Homo sapiens
agggcaaataatacatgcaatttttattgccatttcctcactccctaagagtcaagttatacraatttcttttgatatcctcactcatggtccctacatactcatcaattgtcagatgcgtaaaaatctcaactcagcatgaaatatggatgttgacacaatatgacaggtctccacatttaattaggcacaaaatcccattaacaatcatagagaagctcacacactttaaacagttaacacttcatgtttaatgcagtgtgaggtcttaagcttgccatggcttatttatataacgaacacttctgagaccaattgaaatgaaacatacatggagaaatataatgaaatcctgtgcatgcatgtataaataatccaaagcagaattcatattcctcaatggataacatctgaactcttatctttacagactttggttatcttaattctcctcataaagttccatggaaaatactccacacttcttatggagaatgagaatctgatttagaatacacagaccaagaataaaaaagtgaaggtgaaaagtaaatcctaggtatgtatgaa

SEQ ID NO: 622023 - DNA, 603 bp, Homo sapiens
acatctgaactcttatctttacagactttggttatcttaattctcctcataaagttccatggaaaatactccacacttcttatggagaatgagaatctgatttagaatacacagaccaagaataaaaaagtgaaggtgaaaagtaaatcctaggtatgtatgaatgaaatctctagtcaagagtgagcaatcagctgtgagtggttgaggggcttgttggcattctgtgacctcagcaaagcctctagcttctggggttgcttggatcatcaactccggacttggatgctacctgcattagggtattgccttccactctgcatcattctgttttcctcttttattatttatttattagtaaagacraggtctctaggccagttgtggtggctcacacctgtaatcccagcactttgggaggccgaggcaggcagatcacctgagctcaggagttagagaccagcctggccaacatggtgaagccccatctctactaaaaatacaaaaattagccgggtgtggtagcgggagccggtaatcccagctactcgggaggctgaggcacgagaatagcttgaacctgggaggtagaggttgcagtga

SEQ ID NO: 622024 - DNA, 574 bp, Homo sapiens
accaggaagtgaaaggagctcaattctcatcttccacgtggggagtgagtagatagcatgctaacgattggaaaattaagacttcataacataagtgtgttatggaaagagatagaggaagataacygaagaatcagctggaaactttgatagtaattgcctttgggggctgaaaatttgagggtggtttggcagctgagagagatccaatttctttgtcaagttctgtagaaaatttgcctcaaaactatgcgaaaacaattttgatgaattttttttaaatattgaaaagaaaaaagcctgcaaagcatatatgacattgaaattaattaattaaattaatggaaaaatgaaattaaataaatagaatggaaagggaaatacatgacataaaaatggcagacggaggaagcttagcaagttctgagtaatagctgcaccctgataattagtgagcttcactgatttctattaatcagagggtaaaaggagcacctgaaatgtgggaaaagccttccctggacgccctgtgattggttagaccagcagttctcaaacttgttggtgtcagaat

SEQ ID NO: 622025 - DNA, 450 bp, Homo sapiens
ctcacgcctgtaatcccagcactttggcaagtggaggtgggtgaatcacttgagctcaggagtttgagaccagcctgggcaacatagtgagacctttgtctctccaaaaaaaaawaataataataatacaaaaattaaccaggcatggtggtgtgtgcctatagtcccagcgacttgggagactgaggtgggaggatcacttgagttcaggaggcggaggttgcagtgagccaagatcgtgccactcactaccctccagcctgggcgacatagccagatactgtcaaaaacaaacaaacaaacaacaaaaaactttttagaaccatgtttggtaaactgtatgtactcgactaataccaattatttacaaaatattaaattgagtgaaatactacgtgtgggtgtctctcccaaaatgaatcagaaacttggcacattggctacaaatgc

SEQ ID NO: 622026 - DNA, 542 bp, Homo sapiens
acccaaactggactacttttcaaattgaaagagggtgcgattaacactgggatagcaagcagaaggtaggccattgcagagcaaagaaacggcaaggagaaagagtgaagtctggccactaaggtcgtgtcagcccttttaggtaacatagtccttgtcatttaatagacactgagaacaatcacgcctattcatttacaaacactaggaaagtactatgcaccaggactaggctaggccctgtgaaggattccgccatgaagctcagagtctactgcaacacacaaaggtgacttacatgagtaacagtaatggtactaaccaacttttattgagaactttccatatgacacatacgttgctgattaccttttgttcaygatctcatttaatcttcacctaatcttgtaaactaggtagactcattgtgctgggttttaaaatctggatactgagactcagagaggtaagttatatgttggtcttccactggtctcccaactcataactggtggaaacagaattcaggactcagtgtgtgg

SEQ ID NO: 622027 - DNA, 508 bp, Homo sapiens
gagagagatggcactcatcaatcagtttgtcgccttccagcattctggaccagaagtytcctgtgtttgttctgcttttgtggcaccttcctagtttggctttccagattgaaagaatctggaataccctgtggaataccctgccttctctttggctcacaccaatggtgaatacaaagagaaatttaatatcttggccataaacccttttgaaacttccctgggataaaagggtgggatccgtatgaataactgcaggttgccttttcaccgttcttaaaagtctgagtcgaaatgaaggttgatgcttccagattgcatggcctcagaactagggagaggagccccacagggtccatggattgacccagtggattgaaagaccactgggcaaggctggtccatcctgggctggagctgcccttcagttcaacatgccaaagccttgggaacaatgggactggccaggggccctagaaaaagggccaagagtcctttgcttgcagga

SEQ ID NO: 622028 - DNA, 566 bp, Homo sapiens
aggaatgtgacacagggatggccaatcaaaatgcccctttcccatcgtcatgtgattcaactagggtggtctgtgactgaagccacagaaatcagakctccacccttgtattttttcttttttttttttgagacaaagttttgctcttgttgcccaggctggagtgcaatgccacaatcttggctcactgcaacctctgcctcccatgttcaagcgattctcctgcctcagcctcccgagtagctgggattacaggcatgtgccaccacgcctggctaattttgtatttttagtgagacagggtttctccatgttggtcaggctgttctcgaactcccgacctcaggtgatccacccgcctcagtctcccaaagtgctgggattacaggcgtgagccaccgcacccggcctgcccttgtattttttgtttggagctgtacaagaggcaatttcgcctctgaaatcacaataacagaggactataaagttggggctgtctggtgagttgacttatagttacagcactttagggggccaaggtgggaggatcgcttgagctcaggagt

SEQ ID NO: 622029 - DNA, 594 bp, Homo sapiens
gtcaggagtttgaggccagcctggctaacatggcgaaacccgatatctactaaaaacacaaaattagcctggtgtggtggtgcacgcctgtagtcccagctacttgggaggctgaggcaggagaattgcttgaatccaggaggtggaggttccagtgagccaagatcatgccactccacttcagccggggcaacagagtgagactgtgtctcaaaaaaaaaaaaaaaatacaacaacagtaagtgagggctgtgtctactatttattgggaagtctatcatcccaggtggctgcctggttctgtgcatgtgtggttccagacataaaaaagggatggggtgagcagaggaagtgttgtgccaatatgatctggctaaagaagaacaggatgttttcctccagggagtgacyttcctctgacaaacagaaggggaaaagctctggatggacacactcatttctttccctgaatccggtccagaggctgcatttgttggttgaaagtctaagcatgaccaaataaaccagtccaaatggggtatttggaatagaggaaacgcaagtttggggaagggaaaaaaccttcgcagagaa

SEQ ID NO: 622030 - DNA, 549 bp, Homo sapiens
cttgcccccctgcctacttttcctttcagcaaaagcaataccttccaaaactagttccataaccttatggatatgaaggatacacttgtaggaatatcttggcatcctttaatacagagaagttctcagcttaggtaccaaataaaacactttgcctccctagaaattttcagagcttgcccaggccccyaaaagctattttctgtcaacacttccactaagctgaacaggaagagaggttgcttgtcttatcattaacagaattcttttctgaggtttttatttgggtacttagtgggccagaatttaacattatcactccatcccatgatacttcagctgagtaaagtcagaagtattctttcttatatgttttttccttaatttatttttttttaaatggggccattggttctgtaacaatagtgacctctacagggacatttattcatttattcaccaaacactaagcattgtgattctctgtaacatataagataaaaatagttataattccttaaagagctcacatcgtagcagaagagaaaa

SEQ ID NO: 622031 - DNA, 550 bp, Homo sapiens
atcatataattgtatatttgcatttctcacagaatgttcacagtgagaaacaccaacaaatcaaaaagagtcatttgcaaatgaaccataaataaagttatcagtaacatcaatttaaagatatatacttatcagtaaaaagatactgatgcaaactttggaatagtctcattacttggagayatagacttatagaatgttagatgttgcatgtgaaaactgatgttctgggagatgggaatcaatttttccactctcctctgggttccaccaggaaacattttccttacactctcctggcatctgtctgttttctcacctactaattctgatgacttaacccagttggtgaatttaggagcatgaaatgagcaagtgtaattcactctccttcctctccattttctttggagccagttgctcattggaagtgtgcattcttgtctgctcctttatgctttaagttttacagggagagactttcccatgaggatacctatggttatatagcattacctgtggtgcaatattagggaagccacattctcca

SEQ ID NO: 622032 - DNA, 609 bp, Homo sapiens
atgttcctcaaacaagagcttcacataattatgagaaatgtccaaaaaagaaaagcagtaatttttttcaagtcatattaataaagcattgccatatattgaacatctactatgtgccatatgtttgacatacatattatttaatccttacaaagccctccaaaagaaacatttaatattagtttttcatgaaaaacaagtgggggccgggtgcaatggctcacgcctgtaatcccaacactttgggaggccaagacgggaagatcacttgaggtcaggagtttgagaccagcctggccaacacgatgaaaccccatctctactaaaaaatacaaaaactagccaggtgtggtgccatgtgcctgtagtcccaaatactagggaggctgaggcaggagaactgcttcaacccaggaggcaaaggttgcagtgacccaagaccatgcaactgtactccagcctgggcgacagaatgagactccatctcaaaaaaaataaaacaaaataaaagaagtggatgattggsgagggaaagggtgaacagcaggcacagagaggttaaggaacttgcacttgtcacacagccagtagattgcagagccagaattc

SEQ ID NO: 622033 - DNA, 530 bp, Homo sapiens
acttaattctagattatgggaatccatggaacatgtttkggcagaaaagagtgattgggtcagagacaaatgtttgtggttaaagattccatgtcagaatatgatgcttaggagcaacagtaccatttatcttcctcgtggtttaaatgttttaaaatattcaaggtcaagagtccacttattcatattccccctttatacagaaagaagaaaggggagagtgacatacaaagagaccaaccagtaccatgaatgtctgggacatttactattacattcagtggcggggcggggggggagcggggaagggagaagtacttttgcataaagcactgagagctggagtagaagtgaaggaaagaaaggaagaaaggaaggtagacataggctaggctcttctcccagcaggcaagaaagaacaccattgcctggtgcaggctgcatccagcccaggcctcagttgttgagttgttaatacaattttttattaattaattatttttcatttaaatgataatgcacgcatacac

SEQ ID NO: 622034 - DNA, 530 bp, Homo sapiens
acttaattctagattatgggaatccatggaacatgttttggcagaaaagagtgattgggtcagagacaaatgtttgtggttaaagattccatgtcagaatatgatgcttaggagcaacagtaccatttatcttcctcgtggtttaaatgttttaaaatattcaaggtcaagagtccacttattcatattccccctttatacagaaagaagaaaggggagagtgacatacaaagagaccaaccagtaccatgaatgwctgggacatttactattacattcagtggcggggcggggggggagcggggaagggagaagtacttttgcataaagcactgagagctggagtagaagtgaaggaaagaaaggaagaaaggaaggtagacataggctaggctcttctcccagcaggcaagaaagaacaccattgcctggtgcaggctgcatccagcccaggcctcagttgttgagttgttaatacaattttttattaattaattatttttcatttaaatgataatgcacgcatacac

SEQ ID NO: 622035 - DNA, 582 bp, Homo sapiens
cacttacttcaagcattcacatgtagctttttaacagtaatttaccacttaagggaaataattcttcttggagagatgacagactccaggtctggggcaggaaatgttcaggatgagtgtagagtatcttgttgcaccagatacttaagaatccagagactgctgaggtcatgtcgaaaggactcagagccaacttgaaaggactttcactagtgaccagtggcacatttcgaaaatcagaaagaatattcacaattaattgaaacatattaagtgtgttaaaattccatggatttataataataatacaagaaaattggtaacttttacagaatgctaggggcagagcacaacccaacattctgaaaactgtyaaataaaagaatcaagcattttttttctgcttttcctttgcaagctgtacttcaggctgtaccaagtaattgaagaaggaaatgttatcctttttgaagaagtccagtgaataactgatgataacatttattatataatcagatacatgttataagtgcgcattgagaatttttcttattttttaagttgggatactggtatagtgat

SEQ ID NO: 622036 - DNA, 500 bp, Homo sapiens
gtcaacaatttttaaatgtcctgatctaggaaagggttactcactaatgatctgtaagaggggagtgcatacttgggtctgctgtaccaccgaaaggttgtaggtattctcagcatcttctaagtaaccaacacaaaccaaagctttttacattgttcrtcgaatagcacattctagtctaagttgactttatagctatatttatcagctgcaattaataaaataccctattattaatgacttaagtaactgtttacttatctcaaatatgaagaggtctggaagaaggtagttgctgctattgaattaactacttaaccctggcattaagagaacagcctctttccatctttacttttgctatttcttactatgttgggtttcattcccattctcattgctttgtataacagttgcaaggtgtctactgcactaccagaaatcacagccacattccaggcaggaatgaaagtaaaggagcaaaagactttcttttcttt

SEQ ID NO: 622037 - DNA, 608 bp, Homo sapiens
cctttaatcccaacacttcgggaggccgaggcaggtggatcacttgaggccgggagtttgagaccagcctggccarcatggcaaaaccgcgtctctactaaaaatacaaaaaattagccaggcatggtggcacaagcctgtcatcccagctacttgggtggctgagccacaagaattgcttgaacctgggaggtgaaggttgcagtaagctgagattgtgtcactgtactccagacttggcaacagagcaagacactgtctcaaaaaaagaaaaaaagaatagtgtcacctaaaaatcctctgtgctctacttattcattcctccctgcaccctaacctctggcagccactgatctttttactgtctccatatatttgccttttccaaagtgtcatatacttgtaatcatgtagtatgtagccttttcacattgccttttttcccttagtaacatgcatttaaagtgccttcatgtcagttcatgtcttgatagtgtctgtctttgtagctttgaataatattccattgtactgcagtttatttattcattcacctactggaggacatcttggttgctttcaagttttagcaattatgaataaagttg

SEQ ID NO: 622038 - DNA, 565 bp, Homo sapiens
cagtggtgagcggggacatccttgccttgtacatgatattagtgggaaagctactagtttctcattattaagtatgatattagttgtgaaatttttgtagatattccttaaaaattaaggatatttccctctcttctttgtttactgggacttttatcatgaatacgtgttgggttttgtcaaatcctatttctgyatttattgatataatcaagttgtttttcatcttaccatattgatattatggattacattaatgaattttcaaatgttgaaccagccttgcatatttgggataaatttcacttggtcgtattgtatattccttttatgtattgttggatttggtttgctaatattttgttgaggacttttgcatctatgttcttaagcaatactggtctatagttttcttttcctgtaatgtatttgtctagttttggtattaggataatgttagcctcatagagtgtattagtattttatctgcttctatctgctgaaagtgatcatagagaattggtgtaatttttctttaaatatttggtagcatttaccagtgaac

SEQ ID NO: 622039 - DNA, 565 bp, Homo sapiens
cagtggtgagcggggacatccttgccttgtacatgatattagtgggaaagctactagtttctcattattaagtatgatattagttgtgaaatttttgtagatattccttaaaaattaaggatatttccctctcttctttgtttactgggacttttatcatgaatacgtgttgggttttgtcaaatcctatttctgcatttattgatataatcaagttgtttttcatcttaccatattgatattatggattacattaatgaattttcaaatgttgaaccagccttgcatatttgggataaatttcacttggtcgtattgtatattccttttatgtattgttggatttggtttgctaatattttgttgaggacttttgcatctatgttcttaagcratactggtctatagttttcttttcctgtaatgtatttgtctagttttggtattaggataatgttagcctcatagagtgtattagtattttatctgcttctatctgctgaaagtgatcatagagaattggtgtaatttttctttaaatatttggtagcatttaccagtgaac

SEQ ID NO: 622040 - DNA, 565 bp, Homo sapiens
cagtggtgagcggggacatccttgccttgtacatgatattagtgggaaagctactagtttctcattattaagtatgatattagttgtgaaatttttgtagatattccttaaaaattaaggatatttccctctcttctttgtttactgggacttttatcatgaatacgtgttgggttttgtcaaatcctatttctgcatttattgatataatcaagttgtttttcatcttaccatattgatattatggattacattaatgaattttcaaatgttgaaccagccttgcatatttgggataaatttcacttggtcgtattgtatattccttttatgtattgttggatttggtttgctaatattttgttgaggacttttgcatctatgttcttaagcaatactggtctatagttttcttttcctgtaatgtatttgtctagttttggtattaggataatgttagcctcatagagtgtattagtattttmtctgcttctatctgctgaaagtgatcatagagaattggtgtaatttttctttaaatatttggtagcatttaccagtgaac

SEQ ID NO: 622041 - DNA, 674 bp, Homo sapiens
aattgtggaaacctaggcagagaatcacaaagctgttagcagatctaaaatttgaagaaaagctccctgacctcttttacagaatattagttcctaaacctcattaacttcctggagcacaaatgtgatagagcaaggactgtgcttgggcctcaaaatatagctttgtggacatcagagtcaatggcaggataaagtctcatctactccataatgtaaaacatgtataagtttgtgaaaagtactgttaaaatgaaaaagcatgataaaatttatycacagaaaaacaagagagattttattttgttttttgtttttttctggtaaaatatcaccaaaaaataggaaaatatctgtaggagtcgctcctggagaaaaaaaaaaaaaaacacacaaaactagcatgtcccacagcttttctttatttttgtttattcatttatttttgagacagggtctctcactgttgcccatgctggagtgctgtgatgcagtctcggctcactgcaacctctgcctcccaggttcaagcaattctcctgcctcaggcacctgagtagctgggattacaggcatgcaccaccacatccaactgatttttgtatttttagtagagacagggtttcaccatgttggccagccttgtctcgaactcctggcttcaagcaatccaa

SEQ ID NO: 622042 - DNA, 624 bp, Homo sapiens
ctagtcacacatccactatcaggatattcccagaaattctctgatgtacattctgattgcccctctttccagtgggacatacaccactcagtgctggctgggaaataggaaccaagtggcaggggccccaggggcaccagtctcccagccactaggatgagaaatgaaccctcaccatgcacgtcaacacacartcccttttgggatagaaagtgatcacatttgaaactactttattgaagtttaaatttagctggaacagaatttctaaattccagaatcagaatacagttttctaaaactgtacttggaacacttggaaactgatatggtttggctgtgtccccacccaaatctcatcttgaattgtaatccgcataatccccacacatcaagggcaggaccaggtggaggtaactggatcatggggtcagtttcctccatgccatcctcgtgatagtgagtgagtctcacaagatctgatggtttaataactgtccagcatttcccctgcctgcactcactacgtcctgccaccctgtgaggaaggtgcctgcttctcctttgccttccaccatgattgtaagtttcctgaggcctccccagccatgtggaactgagtca

SEQ ID NO: 622043 - DNA, 424 bp, Homo sapiens
gcacctgtaatcccagctactggggaagctgaggcaggagaatcgtttgaacctgggaggtggagattgcagtgagccaagatcgcaccattgccctccagcctgggtgacagggtgagactccatctcaataaataaataaataaataaataaataaataaataaataaatcagaacacttagaataatctttgaaaatccctacaggaagacaaagctttggcacacgtgctatgctgacactcttctaagatgaaaayatgattacagaatgctttcttaggattgaattttacagataaaaagtggcttaatgattacagagtggatgtcaaaaaatgccatcatcatcatcatcatcaatgacaattgctaaggtgacctccacactcatggaaaatataaatagttgagtatataggg

SEQ ID NO: 622044 - DNA, 552 bp, Homo sapiens
ttagtctcctatattagcttctagcttggattttcacatgataaacaagaaatacttgttgaatgaaagcatcgaaatattaccctagtacataatcctgtcacaccggaaactatcattttggagcgagcaccatgtgaagggtggccccagatgaaagtatgccagcccatgcagataagaggttccacatgctatgacaacagcacctgtttctaattagcattggcattttctttgtggtttgtggtgcygatggtgacccatgctgtgatgtagaaaaccatttcatcttagctgacacaactaaggtgggatacaataacgtagatgtcacctcatatcatcagcccgaaacatttttttttcttcaggaagataaataagctggcatttaagtgtctaagacacacaactaagcatgttcttgtcagcagaatgaaatgttgtcacaaactcgtaggttcctgctgctccgtaaatgccacagtcttgattttcgctgatctcatagtgagattgttttccctcatataaggctgttgatacaga

SEQ ID NO: 622045 - DNA, 548 bp, Homo sapiens
ctgtcttcttctgagccctccaaactgttccagcttctgcctattacccagttccaaagttgcttccacattttcaggtatctttatagcagcgccccactaccctagtaataatttgctgtattagtccattttcacgttgctataaagaactgcytgagactggtcaatttataaaggaaagatgtttaattgactcacagttgtacattgatggagaggcctcaggaaacttacaatcatggcagaaggggaagcaaacatgtccttcttcacaggagaaagaagtgcagagcagtgggggggatgttggggggtggaaatcccttttaaaaccatcagatctcaagagaacttattcactttcatgagaacaacatggagggaaaccacccccatgattcaattacttcccacccggtcttgcccataaacataggggttatgggaactacagttgaagatgagaaatgggtggggacacagccaaaggatatcaagtactcaatgtgtggtcttactctgagacaatgtggctgtgcaaatgc

SEQ ID NO: 622046 - DNA, 457 bp, Homo sapiens
agtttatgcatctggtatcaaataaaaattggaaagagagttatagggagtaaatggcctataaagtacattgataytaacgctgttctcaagagctagttatcttttagtctaattgcccttttagcaaaagaagagaaagtatacagccaatttcagaccctataaagaaaactaaaccccatagttaagtgcagaatctttggccatatccatgtaaagatgctagaagaaatagccacttcacactcctctacctactatagagtaaaagtctccaaattgccttaggtcagatctttctaactacaaatccagagaaaaatgggagtcacataatgaggcattatgttattatggtaaaactttgtagttaattatcaagactactttatatattctttattagatatgcatcaatgacgatgtatattgctgatagaccttcaaatgaatt

SEQ ID NO: 622047 - DNA, 457 bp, Homo sapiens
agtttatgcatctggtatcaaataaaaattggaaagagagttatagggagtaaatggcctataaagtacattgatattaacgctgttctcaagagctagttatcttttagtctaattgcccttttagcaaaagaagagaaagtatacagccaatttcagaccctataaagaaaactaaaccccatagttaagtgcagaatctttggccatatccatgtaaagatgctagaakaaatagccacttcacactcctctacctactatagagtaaaagtctccaaattgccttaggtcagatctttctaactacaaatccagagaaaaatgggagtcacataatgaggcattatgttattatggtaaaactttgtagttaattatcaagactactttatatattctttattagatatgcatcaatgacgatgtatattgctgatagaccttcaaatgaatt

SEQ ID NO: 622048 - DNA, 622 bp, Homo sapiens
tgtttaggtaactgtatccttactgattttatgccggctaggtctgtcaattactgttagatgagtgttgaagacaccaactataatagtggatttatctatttcttcttgtagttctatcagtttctgcctcctgtattttgattgtttttatgcatatacacttttaagattgttagttttcttggagaattgacrcttttttattatgaaatttccttctttatccctgataatttcttttgctctaaagtctacattgtctgaaattaatgttggctaccttagctttcttttgatttctgctaaaatgatatgtctttatacatatcattcctataatctgtctttatcattacatttaaagcgtatctcctttagacaacatataattgggccttgtttttctctttaatcaacttttaatatcttagcattttaattgatgtatttataccattaatatacagtgattattgatacaaatgatttaaatttaccatgttgataactgttttatattagttgttcactttttctaccttttttctgctttctccagttttaaattagtattttttatggttctattttctttcctttcttagtccatataaattat

SEQ ID NO: 622049 - DNA, 586 bp, Homo sapiens
taaagaatagatttgaggtgctcttggcaacatgcatgatgtatgttactacggccttgatgccaggagtatatttgtagaacttaatttatgtgggggtaggacatatatgttctcatactcacagatctgtaagaaaatagaaaccataagaattgcatctataattattgtgtaattyattattatagttgtaactccagagagattggtattcaataaagtaaaatctactggaagaattataactctagagctactgatgttataatgtggatgtgtgaaaaacaaaaatcacctgggttgcggaatttctgcattagtacccatgagggacttggttgactgaagcagagcatgcctgactactgtgattcaaagaagtactttagagtaactcctgttttctatgacttaaatcacatcatgatatataacactgaataatataacaccaggtctcaaatgttatactgtaaacattgatagatggcaactttagggtagataaaccctatataccatgtaatctttggagaaataacatattttcctagcatatttctcttcaaaatagagtgaaaca

SEQ ID NO: 622050 - DNA, 582 bp, Homo sapiens
atatcttgtgcttgaggatttattcaccatcatacactactagcaagatggtaaattgacacaaactttctgaaagcaattggcccatattatcaacagcttcaaaaatgtgtattttyatagattaatttcaaatttaagaatctaaggaaataactaacccatgtaatttttttctatgaagatatttattgcattgtttctattactataaatatataataaaaggaaataaattatgtacatttttatatatcacaaaaatgaagccttaattcagaaataactctaagaattataaatgttattttcacatggaaagctagaaacaatatattttcaattaaaacaatcactttacagtgcagtaacttttagttagaaaacatctatctagtctcatagaaaaagagtgaagataatatacctctatatcaaaaaattcttgaccaggcacagtgactcacacctgtaatcccaacactttgagaggctgaggcgggctaatcacctgaggtcaggagttcgagactagcctggccatcatggtgaaaccccatgtctactaaaaatacaaaaaac

SEQ ID NO: 622051 - DNA, 513 bp, Homo sapiens
aggtgggaccatcaagctcatggctcccactgattctctttaatggtgagttgtgtaagtattccatttacaatgcaacaataaaagaaataaagtgcacaataaatgtaatgctcttgaatcatcccaaaaccatccctggaccccagtccatggaataactgtctttcacaaaatgggtcctggtgccaaaaatgttggggactgctgctttaaaggcatctggtactattctaagtatttcataaayattaacttttttaattttcctaacaaccccaaggggcaggtatgattattattgctacattaccaacagagaactgaagctcagagcaggtgagtatcactggagatcgcacagcaagttaataataaggtgagttaggactccaggcagtctggcccagagtttatatttctgcaccaatacatcatagtgtctggcatcttgcagacactctgcaagttaatactctgtggttaaggggtagtgaaaagatgccctggagc

SEQ ID NO: 622052 - DNA, 537 bp, Homo sapiens
tcgagatcagcctggccaacatggcaaaacactatctctactaaaaatacaaaaattagcctgatgtagtggcaggtgcctgttaacccatctacttgggaggctgaggcaggagaattgcttgaaccaggagatggaagttgcagtgagccgagattgtgccactgcactccagcctgggggacacagtgagactccatctcaaaaataaaataaaataataaaataaaatwaaattaaattaaattaaaataaaataaaataaaataaataaaataaaataaaataaaaaatataatatcaaataaaataaaatataaaaaataaaaacagaactaccacatatttcagcaatcctttttggtacttatccaaaataattaaaatctagatcttgaaaaaatacctgcactttttttgttcattgcagcattattcacagtagccaacatatgaaacagcctaaatgtgtccatcaacagatgaatggacaaagaaaatgtggcatatacatataatggaccattcagcctgaaa

SEQ ID NO: 622053 - DNA, 579 bp, Homo sapiens
gtttgaaaacaattgatcaggcgttttctaatccataactttcaaagaaatagtattccagaagtttgtctgttgagcagttgtttacatttgggaatacattttttcaaatgaacaatgttatacatggtgtttaattccccaggcctttccataaaagcttaattaagctcaatgtatctgaagcttagtactctgctaatggaattatagaacttaatcaccatgtataacaatgtttctgcaaaagcagactcagaattctaatggggaaggggaagaatagaaaaagtaccactgcmtacagcccagccagaaattgctgctctcctgttccctctattgtccccgtgccaccaccaccacacacgtgactctcctcatagtcatctagggggtttgagggtcccaaatagcgtgctcctgatgcctctgcttttccctcaccaagtaaaaattaacctgccagctttcattccactgctgcaactattgctactggacaggagtcccttccttctctggatgcagacatagcacctaattcccttgatgtgtacgggggatgggtggtggggg

SEQ ID NO: 622054 - DNA, 596 bp, Homo sapiens
gtatgcctaggtgggtgttgatyaatggtgctaagaacactttgtgtgggattttatgctaattaccctttataccctaacccatgtcaattttaacaatctaaattagcattttctcctaggactcaagaatgtgagaattgtgaaattggctcagtaagctgagttagcagtgagaaaattgagatgttctatatttccatattaacatctgctgcttgttcaaagcgtgatccttccaaaatgatgaagatattgaaagaaaaatgaacggggataggagcgttactatacactttatattttttaaaaagtgcaatatttgacattgtcatcaacagttccagctaataatgcctggaataatggagttttagtacacaatgtttgagaaattgaacatattattgttgacaaatattttagcttctctgctatttgtggcacttacataacagaacaaactgtcaaagacaatcggttatgaaaaatatcaggttaaatcacaataataattaacttttattttgtttgtttttgaaatagcttaagtaagtagcacaggcattttcagatgatgctttataaaataaaat

SEQ ID NO: 622055 - DNA, 596 bp, Homo sapiens
gtatgcctaggtgggtgttgatcaatggtgctaagaacactttgtgtgggattttatgctaattaccctttataccctaacccatgtcaattttaacaatctaaattagcattttctcctaggactcaagaatgtgagaattgtgaaattggctcagtamgctgagttagcagtgagaaaattgagatgttctatatttccatattaacatctgctgcttgttcaaagcgtgatccttccaaaatgatgaagatattgaaagaaaaatgaacggggataggagcgttactatacactttatattttttaaaaagtgcaatatttgacattgtcatcaacagttccagctaataatgcctggaataatggagttttagtacacaatgtttgagaaattgaacatattattgttgacaaatattttagcttctctgctatttgtggcacttacataacagaacaaactgtcaaagacaatcggttatgaaaaatatcaggttaaatcacaataataattaacttttattttgtttgtttttgaaatagcttaagtaagtagcacaggcattttcagatgatgctttataaaataaaat

SEQ ID NO: 622056 - DNA, 532 bp, Homo sapiens
ggggtgtagtttagtatattctatctagacgtctartaaacattaaataattataacatttattcccataaccttacaaattatgaaatacagctataagatatgacaataggcctagagacgggtttttcaagtgcaaagggaaagccctcgtggcattcccttcaaaattgacattgctaatgctcaagaccttttgggaaactctttaaagagaagtctcttccttttatagatccaaccaaaggtcttgcagtgcccccaagagctcaatttttctccttttctgctatgatatctttcaacaagtcattcttcacaaagatattcaaaagctattctggtacagcagctccaaaagggtggataatttctaccctttatttcagaattacaaaaatctggtctgtgttaactatgccagtgtctcagagtgcagttgtctctcaccataatatctgaaatattccataaggataatgggtgtgaataaataaaggggggaaaaaatctaagatttcctccaaaaaag

SEQ ID NO: 622057 - DNA, 532 bp, Homo sapiens
ggggtgtagtttagtatattctatctagacgtctaataaacattaaataattataacatttattcccataaccttacaaattatgaaatacagctataagatatgacaataggcctagagacgggtttttcaagtgcaaagggaaagccctcgtggcattcccttcaaaattgacattgctaatgctcaagaccttttgggaaactctttaaagagaagtctcttccttttatagatccaaccaaaggtcttgcagtrcccccaagagctcaatttttctccttttctgctatgatatctttcaacaagtcattcttcacaaagatattcaaaagctattctggtacagcagctccaaaagggtggataatttctaccctttatttcagaattacaaaaatctggtctgtgttaactatgccagtgtctcagagtgcagttgtctctcaccataatatctgaaatattccataaggataatgggtgtgaataaataaaggggggaaaaaatctaagatttcctccaaaaaag

SEQ ID NO: 622058 - DNA, 247 bp, Homo sapiens
agtcataattttgcaaaggctgtttcaagtttacagtcaggctgtagccagttttccacctgtagtctagatacctgtggttactaagagtgtagttcttcagcccaggtggaaagccttattccctaaaatttaatgcagggactggttataggcmctcttgctctgtgaaagtgtggatattctagagtactgaagtactctataggattatgtggtcataggactttgtgcacttttggcagcc

SEQ ID NO: 622059 - DNA, 362 bp, Homo sapiens
atttctcgctgggccttaggtgccttcccgcggggcagggctcgggacctgcagcccgccatgcctgagcctcccatccactccatgggctcctgtgcggcccgagcctccccgacgagcgccaccccccgctccacagcgctcagtcccatsgaccacccaagggctgaggaatgcgagcgcacggcgcaggactggcaggcagctccacctgcagccccggtgcgggatccactaggtgaagccagctgggctcctgagtctggtggggacgtggagagtctttatatctagctcagggattgtaaatacaccaatcagcaccctgtgtttagctcaaggtttgtgagtgcaccaatcga

SEQ ID NO: 622060 - DNA, 362 bp, Homo sapiens
atttctcgctgggccttaggtgccttcccgcggggcagggctcgggacctgcagcccgccatgcctgagcctcccatccactccatgggctcctgtgcggcccgagcctccccgacgagcgccaccccccgctccacagcgctcagtcccatcgaccacccaagggctgaggaatgygagcgcacggcgcaggactggcaggcagctccacctgcagccccggtgcgggatccactaggtgaagccagctgggctcctgagtctggtggggacgtggagagtctttatatctagctcagggattgtaaatacaccaatcagcaccctgtgtttagctcaaggtttgtgagtgcaccaatcga

SEQ ID NO: 622061 - DNA, 362 bp, Homo sapiens
atttctcgctgggccttaggtgccttcccgcggggcagggctcgggacctgcagcccgccatgcctgagcctcccatccactccatgggctcctgtgcggcccgagcctccccgacgagcgccaccccccgctccacagcgctcagtcccatcgaccacccaagggctgaggaatgcgagcgcacggcgcaggactggcaggcagctccacctgcagccccggtgcgggatccactaggtgaagccagctgggctcctgagtctggtggggacrtggagagtctttatatctagctcagggattgtaaatacaccaatcagcaccctgtgtttagctcaaggtttgtgagtgcaccaatcga

SEQ ID NO: 622062 - DNA, 362 bp, Homo sapiens
atttctcgctgggccttaggtgccttcccgcggggcagggctcgggacctgcagcccgccatgcctgagcctcccatccactccatgggctcctgtgcggcccgagcctccccgacgagcgccaccccccgctccacagcgctcagtcccatcgaccacccaagggctgaggaatgcgagcgcacggcgcaggactggcaggcagctccacctgcagccccggtgcgggatccactaggtgaagccagctgggctcctgagtctggtggggacgtggagagtctttatatstagctcagggattgtaaatacaccaatcagcaccctgtgtttagctcaaggtttgtgagtgcaccaatcga

SEQ ID NO: 622063 - DNA, 581 bp, Homo sapiens
tctcttccttctaaccgcatcatagatgaaacatacaagttcttgctaagatattcaataccacctctgaagaaatggctatagataagctacgaaaaactgaaatttagacactcctacaattattactcattgttacaaagtactcaccaatctgctatttactatgttcttaagtcaaagaccattaatatcctcctaaagaagttacagacttcaacaatgctctgcaatttcatgtaggacaggaccctatgagtccgtggcctgttatgaacccagccacacagagcagcaggcgagcgagcattaccacatgagttctgcctcctgtcagatcagcagcggcattagattctcataggggtgcaaaccctactctgaactgtgcatgtkaggggtctaagttgcgctcattatgagaatctaactaataatgcctgatggtctgaggtggaacagtttcatcctgaaaccatcccccaaccaacccaattctgtggaaacattgtcttccacgaaaccagtccctagtgctaaaaaagtttgggagttgctgctgtagagtatcttaaggatct

SEQ ID NO: 622064 - DNA, 418 bp, Homo sapiens
tagctgggtgtggtggcacatgcctgtaatcccagctacttgggaggctgaggcatgagaattgcttgaacccagtggatggaggctgtagtgagctgagatcatggcactgcactccagcctgggtgacagagagagacyccatctcaaacaacaaccaccacaaagaacacaattcttaatttctatggagcaaagtttatcaatcttttatttgtgaattttgttttttgtgtcttgtttatgaaatcctttcctatcttgagattataaaaagatattttgtattttcttccaaattttgaaacgtggctttttcattgatccatctggaattgagtttgtgtacagtttgaggtatggatccagaatcagttttttatacacaaataactaatggttccaacactgtcttaaa

SEQ ID NO: 622065 - DNA, 519 bp, Homo sapiens
ttatgttttaaatttgtggaatgacatagcagatattttgagcatcattataggatccaattaaaattatgcatactgctattttcacttttttttttcgagatgagatcttgcttctgctgcctaggctgaagtgcagtggcacgatcatagctcattgcaacatcaaattcctgggctgaagcgatcctcccatctcagccttcagagtagctaggactacaggcacatgccaccatgcccagctaatttttttttttttttggtagaggctgaatctcactatgttgcccaggctggtctccaactcctggccccaagcaatcctcatgccttggcttcccacagtgctgggattacaggtgtgagccactctgcctggcctatttacactttttttttttctttttaacccaactactcaacgtggcatattttcacttttaatataatttatatrtacctggggaagctctttttgatattatcagtagaggccactaaaaataatgccagaat

SEQ ID NO: 622066 - DNA, 642 bp, Homo sapiens
tggaaagaaaatgggaggataaagaaattgggtagtaataagaaacaggatttttaaggttttctcactagttaactaatgccacaaaattgcgtattttggctcaatgtcagtgggctgctggaagggaccaggaaatgagtgcaatatcctaaccatcccaggtagattcttaactaacccatgatttggatggctcacttgtgaagggagtgctttggcctcctcgcttcctttcttccttttcctttttttattttttttttttgagactgagtctagctcttgtttccgagcaatttttgagaaatctcaactttaaaatatccctcaagttgccccctttyattagtcttgtaaataatattgtttaagactcacacattggtgagagtcaggaattattaggattattttaatagcagacattgagttcatttacttggaaagaaaaattttattccgaggtgactttcagagatttaagtgctctattttaccattgaatgagaatttttctcaaagcaaatattctctaagatgctagagtattcagcttattgggatagtaccctttaacttattaaaagttacaaagtctaagaaaaagcatgcaagtcttgagaatcactgctgtgaatt

SEQ ID NO: 622067 - DNA, 533 bp, Homo sapiens
ctgctgaatgaaggctgcagaaggttttgcagacctgccagaggacagggctttacctcgtcccccgcctctggagggcagcctggtgggggttgggcaggtgcggagggcagcagtcagtcatcggctgggctctgaggacagtccagagtgggccctgctttgtgctcgggagggccccgtcatgactttcgagggccccagctgtgtccactgtacctcacaggttccrtcagccctggcgcccaggcgcatctgactcggcaccccctgcaggcaccatggcccagagccgggtgctgctgctcctgctgctgctgccgccacagctgcacctgggacctgtgcttgccgtgagggccccaggatttggccgaagtggcggccacagcctgagccccgaagagaacgaatttgcggaggaggagccggtgctggtactgagccctgaggagcccgggcctggcccagccgcggtcagctgcccccgagactgtgcctgttcccaggagggcgtcgtggactgtggcggt

SEQ ID NO: 622068 - DNA, 534 bp, Homo sapiens
taataattgcctgtttatgttattgataagactcctggttaacagcaggctattagtagctaagtttggaggagtcaaaagttatatatggattttcaactgcgtggggttcagcacccctgatatggtttagctgtgtccccacccaaatctcattttgaattgtasttcccataatccccagtgtcatgggagggacctggtgggaggtaattgaatcatgggggccggtgctgttctcgtgatagtgaatacgtctcaggagatctgatggttttataagggcagtttccctgcacatgctctcttgcctgtggccatgtaagacaggcctttgctcttcctttgccttcttccacgattgtgaggcctccctagccatgtggaactgaatctgttaaaccccttttcctttatagattacctagtctcaggtatttcttcacagcagtgtgaaaatgaactaatacagcccctgacaaaggtcagctctaataccaaggggtgtagagggagcttagtccttctttcttc

SEQ ID NO: 622069 - DNA, 534 bp, Homo sapiens
taataattgcctgtttatgttattgataagactcctggttaacagcaggctattagtagctaagtttggaggagtcaaaagttatatatggattttcaactgcgtggggttcagcacccctgatatggtttagctgtgtccccacccaaatctcattttgaattgtacttcccataatccccagtgtcatgggagggacctggtgggaggtaattgaatcatgggggcmggtgctgttctcgtgatagtgaatacgtctcaggagatctgatggttttataagggcagtttccctgcacatgctctcttgcctgtggccatgtaagacaggcctttgctcttcctttgccttcttccacgattgtgaggcctccctagccatgtggaactgaatctgttaaaccccttttcctttatagattacctagtctcaggtatttcttcacagcagtgtgaaaatgaactaatacagcccctgacaaaggtcagctctaataccaaggggtgtagagggagcttagtccttctttcttc

SEQ ID NO: 622070 - DNA, 427 bp, Homo sapiens
gcctagggagagagaacagaggagtgcgggttgtaagatttgaatctcacgccactccagcatttagaggctggaaaagaaggagaaaccagtaaggagtctaaggaacagccatttgggaaggaagagaagcaagaaagaaaatgaaatcctggtaggcaagataaggaactttaaggagaagaaagttatcagctgtgtcaaatgctgctgacaagtggagatgaagactgagaaataaaaatcagacttgaaaacatggatgctacagatgatcttgaacaggtccagaagtgtrggaatgaagtctgtgggttcgagagagaagtaaagataaagtatttctgtaaaggagagcagatcagacttttgataatgtggttttatttagagacagtgtctcactgtcacccagactggagtgcag

SEQ ID NO: 622071 - DNA, 423 bp, Homo sapiens
gatgtttgtttgtttgtgtttaccgagtcttatgtttaaaactgtgatggaaggttttgagsacatggatgctatgttgagctgatgaagcattagtgtctgtaaagagagagtgttgaggaaatatgataattccactcatataaatgtccagtatttcctaattaatcaaaccttgttatcactttgggataatgtgacttctgtgagagtattctttcaagcccacctttggcctgcattatgtgcctttaggccactgcattaaaagcacgtagcagggagcacacttggcacatataggcaggtgcttgtcctagcagcccagcccagcaggggcatatgactccatcggcagggttccaaattcatattagtgttgtctgcttgccaggtggtataaaactgtgcggtagtactgaa

SEQ ID NO: 622072 - DNA, 423 bp, Homo sapiens
gatgtttgtttgtttgtgtttaccgagtcttatgtttaaaactgtgatggaaggttttgaggacatggatgctatgttgagctgatgaagcattagtgtctgtaaagagagagtgttgaggaaatatgataattccactcatataaatgtccagtatttcctaattaatcaaaccttgttatcactttgggataatgtgacttctgtgagagtattctttcaagcccacctttggcctgcattatgtgcctttaggccactgcattaaaagcacgtagcagggagcacacttggcacatataggcaggtgcttgtcctagcagcccrgcccagcaggggcatatgactccatcggcagggttccaaattcatattagtgttgtctgcttgccaggtggtataaaactgtgcggtagtactgaa

SEQ ID NO: 622073 - DNA, 473 bp, Homo sapiens
tgggtcaagcgattctgctgcctcagcctcccaagtagctgggattacaggcatgcaccaccatgcccagctaatttttatatttttagtagakatggggtttcaccatgttggccaggatggtccctatctcctgaccttgtaatctgcctgccttggcctcccaaagcgctgggattacaggcatgagccactgcacccagccacaatataacatttcttagttcacatttgattttttaaaacagctgtattgaaatatgattcacaacacatttgacctttacaattttcttaaggcctcctcttaaccaccatgtgatcttatttgattttgattattggaaagcatctgtatgggttttcttctgtccagtaggtaacctctctaactgtcagcagctttacttgtgatacagttttccaacatcactttcatcaacttcaaaaaatttctcttttgcaaaatctag

SEQ ID NO: 622074 - DNA, 473 bp, Homo sapiens
tgggtcaagcgattctgctgcctcagcctcccaagtagctgggattacaggcatgcaccaccatgcccagctaatttttatatttttagtagatatggggtttcaccatgttggccaggatggtcyctatctcctgaccttgtaatctgcctgccttggcctcccaaagcgctgggattacaggcatgagccactgcacccagccacaatataacatttcttagttcacatttgattttttaaaacagctgtattgaaatatgattcacaacacatttgacctttacaattttcttaaggcctcctcttaaccaccatgtgatcttatttgattttgattattggaaagcatctgtatgggttttcttctgtccagtaggtaacctctctaactgtcagcagctttacttgtgatacagttttccaacatcactttcatcaacttcaaaaaatttctcttttgcaaaatctag

SEQ ID NO: 622075 - DNA, 570 bp, Homo sapiens
agttgtcacctgaaatgttctgtaaatattgattagattcattcaatctatagtgcagattaagtacaatgttcctttcttgactttctgttggcacgacctgtccaatcctgaatatggggtgttgaagtctccagctttcattgtaytggagtctttaactttagcactaatacttgctttatatatctgggtgatctagtgttgcgtgcatatatatttacaattgttatatcatcttgctgaattgacccctttatcattatctaatgatattctttatatctttttatagtttttgtcttagaaactattttatctgatataagtatagctactcctgctcttgtttaatttccatttgcatagaatacctttttccatccctttattttcagtctatgtgtgtctttataggtgaagtgtgtttcttgtaggcaacagataatttggtctcgttttttcatccattcagccaatgtttgtcttttaattggagagtttaatacatttacattcaatgttatgattgataagtaaggacttactcctgtcattttgttatttgtt

SEQ ID NO: 622076 - DNA, 564 bp, Homo sapiens
ggtatgttttaatttcttgctatttattttttgggtatctgttgtatgtattatgatttgaggttaccgtaagacttccaaataatatcttataactgattattttaaactgatggcaacttaacactgattgcataaacaggctagcaaacaagcaaagaaaaaaatgaataaacactctacactttaactttatcccctgcttttaactcatttttgtttctrtttatatcttattgtactgtctgtgtcttcagacgttattgtagttattgtttttgattggttcatcttttatcctttctactcaaaatgtgaataatttacccaccacaattgcagtgttataatattctgtgtttttctgtgcactttctattatcaatgagttttgcaccttcagatgatttgttattgttcattaatgtccctttcttttagattgaaaaactctctttagcatttcttacagggcaggtctggtgttgataaaaatccctcagtttttgtttgttggggaaagtctttatttctccttcatgtctgaagtatatttttgctgga

SEQ ID NO: 622077 - DNA, 591 bp, Homo sapiens
cctttgccaatctaattgcctggccattaaagaggatgagaaaattatgtagacacccagacacatccatctcaggatatatggccgatcagctgctggtggctaaaataatgcagatgcctaataccattttgaatattaatatccaccccaactttcggcaacattataatttggcagtgctcagtggcacttctgcctttccagccaaatgacatttgtcacactcaagtaggaacaattattaataattttcatttcattagaagcactacaataaaatgtcaacagccttaaaagtgcatcagaagtgtacaaattaattttgattttctgaagtgtaattacttttgtaagtaccagactgtgtaatcacgttaggcgttattacttgtgcaatcaattatacttaaatgcacttatctgttttcaaacacgattttcagaggtcacctgttggtggggttttttttttgagattataataggaagagcctrtcattcatattggacatgcagtgactaaaagataggtaaggcagtgataagttaaaatataatagcaaacgttgttttaaaagagaccactcc

SEQ ID NO: 622078 - DNA, 521 bp, Homo sapiens
tgtccactgttttcctgccagcagcagcccctcctgattctggaggggagcaggaagggcgtaattacactctggctgatagctaagatyacgctgggaattccacggagagagaccctggcactccttctttggacagtggccccaggccaaccgtgtcctaataagggcctgactacagcagcttacctaaagtcaaagagagagcaactgggagaggtttgcaaaggtggctgtttaaatgggggaaggcagaaggggagcaaggctagctggcaattcatgaacacttcccatttgttatctcatctaattcggccaggcctgtggataatgaagtggtatcattgttattcccttttacctaaatacacaaaatctgaagctcagaagaagttgaatgaattgtgctaggttatatggctaacacggggtttctcaggcctggcatgatggacatttgaggcagaatgttctttgtggtgtgcactgccccgggcatcacgggacgtttagcacag

SEQ ID NO: 622079 - DNA, 521 bp, Homo sapiens
tgtccactgttttcctgccagcagcagcccctcctgattctggaggggagcaggaagggcgtaattacactctggctgatagctaagattacgctgggaattccacggagagagaccctggcactccttctttggacagtggccccaggccaaccgtgtcctaataagggcctgactacagcagcttacctaaagtcaaagagagagcaactgggagaggtttgcaaaggtggctgtttaaatgggggaaggcagaaggggagcaaggctagctggcaattcatgaacacttcccatttgttatctcatctaattcggccaggcctgtggataatgaagtggtatcattgttattcccttttacctaaatacacaaaatctgaagctcagaagaagttgaatgaattgtgctaggttatatggctaacacggggtttctcaggcctggcatgatggacatttgaggsagaatgttctttgtggtgtgcactgccccgggcatcacgggacgtttagcacag

SEQ ID NO: 622080 - DNA, 580 bp, Homo sapiens
tcttggaatatgaggcctcacatgactagaggagctattttaaatatcacaggagctgttcagaaaatggccttgcccaactcaggaccaaggacagctctcaaacccttagaaccaaggacagcgttaaaggcctccccaggtgttcagcatcacaaacaaaacacatttccgtattatatrcattttgcatattaaagagagaaatagcagaggcaaatacgctctaaggccaaaggcaattctgtttctcacataaggaaattcagggtactagcaaactatatttgcctctaatttgatggacagaagcagagaaatactggccaggtgaagttttaactttcaatggtctccttgggccagccactgcaatctttcctcctactgttaggaacatctccatactcctgagctccagggcctgcaaatctccaacaccactgacccctctcaaatggcaaagcctttcccagggtggaacccctggaatggtgtttgtggtttactttaaaaggtgtgaacaaatgtccttgataaattatgtgttacttgaagttaaattcatcttgtttttgca

SEQ ID NO: 622081 - DNA, 592 bp, Homo sapiens
tttgaatgttccccatgcagatgtgcaggattcttgcacacatctgcatatcagaagggcagtggaagttgcttggcaagaggccctggctcagcaggagtgctccattggtaacccccgagttgtgaaaggatctctccctgtattgttctgggccaaggaactcagccagagactgggctgggcagggcttttaggggtagagaaaactgcawcatcttaatctcctctggacacagaaaatcagtgggcacatcttggggcagagcactggtatctgaggcaatgacacaaagggaagagaaggaaaattcattcattaatatattcgtttaggagcagcccataaccctatttgtagagggactgctttgtgccaagcagtataagtcagtgagtcattaaataccaggatctgcttcatatttgagatctgccattctcaaggtctgggacccggggtaagtcttttaacctatttgatatcagtttccacatctataaaatggaatggtaatggtattggctgcttaccagatacattgaagggaagattattcttttatagcactttgtttactgtacatttact

SEQ ID NO: 622082 - DNA, 488 bp, Homo sapiens
aaggtctgggacccggggtaagtcttttaacctatttgatatcagtttccacatctataaaatggaatggtaatggtattggctgcttaccagatacattgaagggaagattattcttttatagcactttgtttactgtacatttactgtgttaggcattattagaggcaccttaaacattctgtcttattatttcccacaataaacctgcaagatagatattagtactcctgctttttytgtcaactaaactgaggcacagagatgttaagattcttcccaaggtcatgtagtatataaagaagctgtcagacctaacttccagggccctggtaagtcaggctcagttaaatgtccctgatgaggcagggccaaatttggagagtcccaagggaaaggaggcctaagctgcatatgagccagcagagaagagaaaaccaattttttttgcccagagaggctgagatcacagttggaaagatatgctg

SEQ ID NO: 622083 - DNA, 569 bp, Homo sapiens
aggagttgcaggtagaagttatttccaaaaagaccacagagctgtgaatacaaagtgagggagatgaacatttgtcccatttatagatcggaaaaaggtgtgactttggttgtgatagtatttcttgttctgacagcttgataatataaacaggcagcacccttggctagatcaagggatttctcctggtggacagtgagagccctgagtaggatggggcactctcaaatgcaagaaacaggaagcctcacaggatgggccgaacaagaaagaagcamcatggtagacatcatgtagaagtggatagcaccctttctgagcttacatacaatgccacttggagacatctagaaaaaactgaatgagacttggaggaagactggattcctgccttaacaggtagaggaatgaggcagcaaaccacatgtgattattataaatagaacctcatttgtgcctgcaggctgttcaatttctccaggtctggggaaacatcagttacacactctgcttaaactctaaattactcttaggggtctgaggtaatttccaaagacgggtatccctat

SEQ ID NO: 622084 - DNA, 569 bp, Homo sapiens
aggagttgcaggtagaagttatttccaaaaagaccacagagctgtgaatacaaagtgagggagatgaacatttgtcccatttatagatcggaaaaaggtgtgactttggttgtgatagtatttcttgttctgacagcttgataatataaacaggcagcacccttggctagatcaagggatttctcctggtggacagtgagagccctgagtaggatggggcactctcaaatgcaagaaacaggaagcctcacaggatgggccgaacaagaaagaagcaacatggtagacatcatgtagaagtggatagcaccctttctgagcttacatacaatgccacttggagacatctagaaamaactgaatgagacttggaggaagactggattcctgccttaacaggtagaggaatgaggcagcaaaccacatgtgattattataaatagaacctcatttgtgcctgcaggctgttcaatttctccaggtctggggaaacatcagttacacactctgcttaaactctaaattactcttaggggtctgaggtaatttccaaagacgggtatccctat

SEQ ID NO: 622085 - DNA, 437 bp, Homo sapiens
tagtagctctatttgtacttttttgaggaaaytccatactgttctccacagtggctgtactagtttacattcccatcaacggtgtataagagttcccttttctccacatcctttccagcatttattatttttgtcttctcaataatagccaccctcatgggtgagatgatacctcattgtggttttcattggaatttccttaatgattaatgacattcagcattttccatatattttttggtcatttgtatgtcttttgagaaatgtctgttcagatcatttgctcatcttttgttgggactccagggactgattattccaacaataatggtgaatttttcaaacaaacaggtagggtacttgacctcatgcttagttacattttccctttcatgttttccttcactgttaaacagaacagtgagttgaataccaga

SEQ ID NO: 622086 - DNA, 539 bp, Homo sapiens
aaggcagttctaattacaacgctaatgttattagctgttaattatctgcatgttgctatcaacttagctcagtcagatgtggtstctctttctgaaagcaaatcttggttctctaaaatatctctaatgtaattaatatatttcattacctttgttctggcattagctgctcaaactaaacaaaacatgggcagattttggccacttattgaggaactgttttgtgtgtgtgtgtgtgtgtgtgtgtgtgtgtgtgtgtgtgtgtgtgtagagagaaagagagagagacagacagacacagacagacagagacagagagctagacagagatgtcgccagctctgttgattatggattttgctatatagaattacagttaaatgcttatgtcagattagcagtggttagctggggagaaggttgtatacaagttgaggactaaaggtaacctttgaaatagttgcactgttgctttttggatgggcagatacgatttgaagtcccttgatcatatctgagatcatccttttatggcagaa

SEQ ID NO: 622087 - DNA, 539 bp, Homo sapiens
aaggcagttctaattacaacgctaatgttattagctgttaattatctgcatgttgctatcaacttagctcagtcagatgtggtctctctttctgaaagcaaatcttggttctctaaaatatctctaatgtaattaatatatttcattacctttgttctggcattagctgctcaaactaaacaaaacatgggcagattttggccacttattgaggaactgttttgtgtgtgtgtgtgtgtgtgtgtgtgtgtgtgtgtgtgtgtgtgtgtagagagaaagagagagagacagacagacacagacagacagagacagagagctagacagagatgtcgccagytctgttgattatggattttgctatatagaattacagttaaatgcttatgtcagattagcagtggttagctggggagaaggttgtatacaagttgaggactaaaggtaacctttgaaatagttgcactgttgctttttggatgggcagatacgatttgaagtcccttgatcatatctgagatcatccttttatggcagaa

SEQ ID NO: 622088 - DNA, 649 bp, Homo sapiens
attaatcctgtgggtatctggacccctgttccatttatgcatgtgtccagatcaagttgtctaacttgccacactgatgagcttgagttctcccaacagctttggtcaactagaatcccagctgaccatacaggctggctctttgctgcccccacctgtctggagccagcttccacagtagcaacaggactggaagcccagcctggtgctgcagctttggcctccctcccacacatcctgatatgtcaggaatagaaagtgcagcacctaggactaacctcagctcataccccttcccagtgtgtgtttttgtgtgcttgcagatgcacctgggagatgcagatccattttgggtgaatggtggaggctgtgtagtcagtaggcaaaaagctaatacgttcctgtttgtccagagcctcagtgacttcttaagcacctgagagtctgcagtcttaccggaaacattcccgagattaggtcaaattcatatctgatagtcaaatttggaaaggccaccattctccttcagaagcaaatgatttcwccagctccatcttccagccggaaacattcccgagattaggtcaaattcatatctgatagtcaaatttggaaaggccaccattctccttcagaagcaaatgatttc

SEQ ID NO: 622089 - DNA, 604 bp, Homo sapiens
aatggcaaccccacaaagtcactatattccacatcctggagtgaggaagctagcctgcatcatggaaatatattttccttcaattaggaagcaagtattaaaaatatatacaatggactggatgcttgtctttgccctcaaagcttcatgaaatattgaagaaggacaactctgctgctgtgtgaaagaggctcgtacagacagttttctcctaaatcagcctgggtggtcagtgaaggcttcctagagatgacgatattgaaaatagattttgaaggataaggaggcagataaggagataaagcattctggaaaaataaaacaggacaaaaaggtatggaagtgtgaaagaatctgttatgttttggggaataaccagtgcttagttgtggctaaaatgctgggtgcatgaaaaggagtgataaaaggggtcattaggccagattctgaagrgccttgaatgccagtgtaaagcagcccttctctgagaaaggctagagaggttggcatttatcctgagggcaataaggaagcatcaaaagtgttaagcagggtcaggaagtggccagagtcatatgccaagaaggtctctccggctgcagca

SEQ ID NO: 622090 - DNA, 598 bp, Homo sapiens
ctgcatcaggacaagtggtggtcatttttggctgtaccacataaccagtgggttggtttaaaaaaatttgtactgacctacacatttggatatgagagctatatgttgatgggattcacttatataacgcactgtctatttcacagtgaaataaatatctgcctcattgtcagtgcagctgatgtgaaatatgagcacagtgctttgattttataatgtttgatgttttctgatgataaagtaataaaacattgtggaaaatagttacatacacacacacacayacaatgaatacaaggaaaaacaaaatcatctaccactactaagaagctaaaaaaatcactattaacattttggtgcacttattctgtttttttcttacagctaaagtttattaagatgaatttttaaaaatataacatttaattgagtccaacacctccattaagcattcctctatgacaatacttttctcattatactgtcattacttgcttatacttctttaatactcctagactagattgtaaaggttgtgaggatgggaaaggtatgttattcatacagttacctaattttggcacaggaacccaaaact

SEQ ID NO: 622091 - DNA, 526 bp, Homo sapiens
tcttcccaaagttgatgagttcaacatgggcacaccagtgcagactatatgctgggcactgaggatgcaggcacaaggaagccaggcccctgtcctagaggagttccctgtcaggcaggaagagaggcacattcatgactaataaaaacaagacataaaatgctacaatccataagcaaggcaaaaccaaagtgaaaagagagttctgaggagggagagagtctctcttgggcgcagagggaggaatagggamtaccactgaagcaaggtctccaaatgtactttgtccactcctttatcacaggtggaggggggctggaccacaaacttctgtcacatgtctaccttccccacctgtaggtgagctccttgcaggcagaggccccatatcagacaatgattaatccaccttggctggctcaaaggagtgcgagagagtgtgttcacagaagagtaaaaaataccataggtctcagggaaaggggaagagagagtgaggctggagaagtaaggtggggctgggata

SEQ ID NO: 622092 - DNA, 526 bp, Homo sapiens
tcttcccaaagttgatgagttcaacatgggcacaccagtgcagactatatgctgggcactgaggatgcaggcacaaggaagccaggcccctgtcctagaggagttccctgtcaggcaggaagagaggcacattcatgactaataaaaacaagacataaaatgctacaatccataagcaaggcaaaaccaaagtgaaaagagagttctgaggagggagagagtctctcttgggcgcagagggaggaatagggactaccactgaagcaaggtctccaaatgtactttgtccactcctttatcacaggtggaggggggctggaccacaaacttctgtcacatgtctaccttccccacctgtaggtgagctccttgcaggcagaggccccatatcagacaatgattaatccaccytggctggctcaaaggagtgcgagagagtgtgttcacagaagagtaaaaaataccataggtctcagggaaaggggaagagagagtgaggctggagaagtaaggtggggctgggata

SEQ ID NO: 622093 - DNA, 581 bp, Homo sapiens
ggttcatcttttaggctaaatgtgaggaagcaaaggaacttgaaaaaaatagagaaggtctcaaaattacaaaacatcttcattcagtcactaacccttcgtgttctttctggtagaaggcaggaacactatttgcccactttaaggttcattctccttaccagcaggagctaaaaaggctgctccccaaaacggagatgatacttcccccttccttgcttgtctagactcaaactttctggaactagctgggaaagagggccagctgtcttctctttacaaaggaaaaggtgtctcagcatggcaggaagaactggagcataggaggataaagggctggtttctttccctatcaccractgaacctcagtaccctcatctacgaaatggagatgagactagctgccttagcccatctctcagggccctggcagggcagggatgagaggtccagtgttattctgacccagaaactctctcctggccctcaactctctcattcagggagccttctgggagattcagaaaggggtgtggaggctgagggatgccttagggcctctacctccttacctctgcca

SEQ ID NO: 622094 - DNA, 581 bp, Homo sapiens
ggttcatcttttaggctaaatgtgaggaagcaaaggaacttgaaaaaaatagagaaggtctcaaaattacaaaacatcttcattcagtcactaacccttcgtgttctttctggtagaaggcaggaacactatttgcccactttaaggttcattctccttaccagcaggagctaaaaaggctgctccccaaaacggagatgatacttcccccttccttgcttgtctagactcaaactttctggaactagctgggaaagagggccagctgtcttctctttacaaaggaaaaggtgtctcagcatggcaggaagaactggagcataggaggataaagggctggtttctttccctatcaccaactgaacctcagtaccctcatctacgaaatggagatgagactagctgccttagcccatctctcagggccctggcagggcagggatgagaggtccagtgttattctgacccagaaactctctcctggccctcaactctctcattcagggagccttctgggagattcagaaaggggtrtggaggctgagggatgccttagggcctctacctccttacctctgcca

SEQ ID NO: 622095 - DNA, 678 bp, Homo sapiens
gactttccattcgagtttcttatgattatggctgccccagttctcctgtggatgctyaagtcttcccatggattattgaccctctaaagaaagctatgagcagtcacaaatctgatttgtcaaaggacataagagagagaagagaaaatgggatcatattccctttcacagggaagaaaagagaaccataaagcaaagtggaatggtggttcctcagaaaattaaaacgaactgctgtatgatccggcaatcctacttctgactatttagtcaaaaagactgaaagcaaggtctaaaagagatattttgcacatccaggttcttagcagcattctttacaataatcaagggtagaaacaacataaatttccatcgagggatgaatagataagcaaaatttggtgtacagatataatgaaatattattcagctttaaaaaggaagaaaatctcgttgcatgctacaacatcaatgaaccatgagggcattatgctaagtgaaataagctagccacaaaaaagaaaatatggtatgaattccactcacatgagatatttacagtagtcaaattcatagacacagaaagtagaatggtggttaccaggagctgggggaaggggaaaaaggggagctgttgtttaatgagtgtatgtagaatttcgattttgcaaggtgaaa

SEQ ID NO: 622096 - DNA, 460 bp, Homo sapiens
caaaatatagacaaaaacatacatgcagaggttgagaaattattcataaggtagagaaacaagaatcaagttaaatatccaacattattgacatgggaaaatatttctgctgtaatattaagtgaaaaatcaatagaaaattttatattctatatgatctcaactatgtaaaacaaaattatacatgcagagaaaaaaagcaaagaagtaaatgtgctaaaatattaaatagtcattgcctctgggagataactgatattttcatcaytataaattttctgtgtttctcaaaatttgtacaatgagcatgtgcaattttttaatagagaaagtgatgataaaaagatggtgtgtaaactacatagcaacatggagattgtttatgaaataatgttaagtgaaaaaagatgtatataaaacttactgtgattgcaattatgtaaatatgtttctgcatata

SEQ ID NO: 622097 - DNA, 518 bp, Homo sapiens
gaattcgattttgtattgtgctaaggttgtgggattaggagtaatttatttttcttctctaaagatgattttaaagctgttttaatgatgtgtatgcagtttttgaaacagcccctcggctgttagaccactatactgctagactggctctgcaggtctcatattggctctgaaaatggccataaggcagtatctagtttggcctctcttgttcccttagtctcagaagggctgagttcaaatcataggagactttaattagagaaaaagcccagagttgtcaygtactgggaagcaggatcagtccatcaccatctaaaataggtattgctttaacaaggttaagaggggataaagaactttgtgaatatttgcagtacggaataaacctagctgtgatttttttctggaagtttctatcatattttaggaaatcaattgtatcttcagaacacagcctcattagtgaaaaaaacccagtgactatcatgtccctgacattctaggctttctttatg

SEQ ID NO: 622098 - DNA, 520 bp, Homo sapiens
gttgtgggattaggagtaatttatttttcttctctaaagatgattttaaagctgttttaatgatgtgtatgcagtttttgaaacagcccctcggctgttagaccactatactgctagactggctctgcaggtctcatattggctctgaaaatggccataaggcagtatctagtttggcctctcttgttcccttagtctcagaagggctgagttcaaatcataggagactttaattagagaaaaagcccagagttgtcatgtactgggaagcaggatcagtccatcaccatctaaaataggtattgctttaacaaggttaagaggggataaagaactttgtgaatatttgcagtacggaataaacctagctgtgatttttttctggaagtttctatcatattttaggaaatcaattgtatcttcagaayacagcctcattagtgaaaaaaacccagtgactatcatgtccctgacattctaggctttctttatgcctagaaaagtgggtcagcttgaattc

SEQ ID NO: 622099 - DNA, 638 bp, Homo sapiens
ctaccttacataatataaacacattaactcaaaatggatctaatacctaaatttaagagataaagctataaaattcttagaagagagcataggtatgggccgggtgmggtggctcgtgcctgtaatcccagcatttgggaggctgaggcaggcagatcacaaggtcaggagatcgagaacatcctggctaacacagtgaaaccccatctctgctaaaaatacaaaaaattagccgggtgtggtggcaggcgcctgcagtcccagctactcaggaggctgaggcaggagaatggtgtgaacccggaaggtggagctttcagtgagccaagatcgcaccgctgcactccagcctgggtgacaaagtgagactctgtctaaaaaaaaaagagaagagagcataggagtacattttgaaccttgggttaaacagtggtttcttagatatgatataaaaatcataaacagcaaaaggaaaaatggataaacttcatcagaattaaactttttgcttcaaagaacaacaataaagaagtgaaaagacagcacataaaaatgtaagaaaatatttacaaatcatacatctgataaaatagtatccagaatatatattctgaaaacctcttaaatgcaataaaaag

SEQ ID NO: 622100 - DNA, 520 bp, Homo sapiens
aattgtggtgtatctaatgtaatactatttggcaagaaaaaggaatgaagtatgctgatacatgctacaacatgggtgaaccttgaaaacactgtggtaagtgaaaaaagccagtcacaataggccatatatggtatgatttgatttatataaaatgtccacaataggcaaatccatagagacagaaagttataacagyggttgccaggggtcaggaaaaggagaaattgagaatgactgccagtcggtatggagtttatgtttggggtgatggcagtgttctggaactaggtagtggtaatggttgcacaactgtgtaaatatgctgaaaaccactaaattatcactttaatgaggattttatggcatgtgaattatatctcaataaagctgttattaaaaaaaggtatgaccagcacttttaacttggtgggaatataaaaatctttctaaaagtatgataaagtatattagtcattgaaaaatattcatgtcatcctcattgcagtgcacttcccta

SEQ ID NO: 622101 - DNA, 530 bp, Homo sapiens
gcacatatctacccatttgaatttatggtcatatgaccataaattcaaatccttgctttkatcaaggatatttaggcagaagtgacgccttctaagagtttttaaggggagagtcgtggctcctcatccctcccttttccctctgtcacaatgactaacatggcaaatgctaggcctccccacaatccaacctattttcccagcttattatttctggatgtgttgaataacttccaactggcaacacctgcaaatccatcccgaaggttttctctgacccattggaatctggtcattgcatacattgagcagatcagaagtgtcagggaatcaacacctccaccctctctcctgctcctttgtccctgagaagtataactatgtagcttattttccacactggttccatgggctctccagtgggattaagtcccagttgccctctgtggtagcttgcttgataatgaatctttctcggctttttttcttttcctgtctcacttcctcactcctctaccaatgtctctggg

SEQ ID NO: 622102 - DNA, 650 bp, Homo sapiens
gtgtcacaactagtgaatgatgtatacctctcctcagtaattcttattctaggaatttttcctaaagaaatagttagagatatagaccaaaatttttatataagaatgctcaccgtggtgttatttgtaatgaaataattggagacaacaacagtaataatatacaacaataggggaattaaaaatagaatagaatgctttttagccatataagattccctcttagagaatattaaataatattggaagatgttcacactacattcgaataacaatagtttatatggtatcattcaaatttcattttaaaaattatatctacaactgtgtatacwtggacaaaaaataagtctctctcctcagtctgctggtaaggattttacctggacaggaaaagaatacggtacttcctcatattgcctcccttctactgacgaggttataggaaaatcaactttctaaaaagtaaagaagaaactgtagttgaacttctgggccaaacgactaaataagttcatatttcaataagcccatttattcccatcaaatagtaatattggataatatgtgaaaaaagaaatgaaactatattgttgggctccattgtgggagacatcaccacaaagctcaaatgtacagaaatgcaaaag

SEQ ID NO: 622103 - DNA, 650 bp, Homo sapiens
gtgtcacaactagtgaatgatgtatacctctcctcagtaattcttattctaggaatttttcctaaagaaatagttagagatatagaccaaaatttttatataagaatgctcaccgtggtgttatttgtaatgaaataattggagacaacaacagtaataatatacaacaataggggaattaaaaatagaatagaatgctttttagccatataagattccctcttagagaatattaaataatattggaagatgttcacactacattcgaataacaatagtttatatggtatcattcaaatttcattttaaaaattatatctacaactgtgtatacttggacaaaaaataagtctctctcctcagtctgctggtaaggattttacctggacaggaaaagaatacggtacttcctcatattgcctcccttctactgacgaggttataggaaaatcaactttctaaaaagtaaagaagaaactrtagttgaacttctgggccaaacgactaaataagttcatatttcaataagcccatttattcccatcaaatagtaatattggataatatgtgaaaaaagaaatgaaactatattgttgggctccattgtgggagacatcaccacaaagctcaaatgtacagaaatgcaaaag

SEQ ID NO: 622104 - DNA, 552 bp, Homo sapiens
aagcagtcaccagctcaactgcccggttgataaggcaccagagctagcacatggacctccccaacctgctcactttctcccctgcgtgccattctcctttaaaagtgccggcttcttcccctaagatagttttgggattaaaagtcactttaaaaawttttttatatttttttgacaggacttactttgtcattcaggctgggtgatctccgctcactgcaagctctgcctcccaggttcacgccattctcctgcctcagcctcccgagtagatgggactacaggcgcccgccaccacgctcggctaattttttgtatttttagtagagacagggcttcaccgtgttagccaggatggtctctatttcctgacctcgtgatctgcctgcctcagcctcccagtgtgctgggattacaggtgtgagccactgtgcccagactaaaagtcactttctttataccagacttcatttttgttaactggactctgcaaatggcaagtgactgaacctgcattttggttacatcactacacatatacatcactactgc

SEQ ID NO: 622105 - DNA, 552 bp, Homo sapiens
aagcagtcaccagctcaactgcccggttgataaggcaccagagctagcacatggacctccccaacctgctcactttctcccctgcgtgccattctcctttaaaagtgccggcttcttcccctaagatagttttgggattaaaagtcactttaaaaaattttttatatttttttgacaggacttactttgtcattcaggctgggtgatctccgctcactgcaagctctgcctcccaggttcacgccattctcctgcctcagcctcccgagtagatgggactacaggcgcccgccaccacgctcggctaattttttgtatttttagtagagacagggcttcaccgtgttagccaggatggtctctatttcctgacctcgtgatctgcctgcctcagcctcccagtgtgctgggattacaggygtgagccactgtgcccagactaaaagtcactttctttataccagacttcatttttgttaactggactctgcaaatggcaagtgactgaacctgcattttggttacatcactacacatatacatcactactgc

SEQ ID NO: 622106 - DNA, 625 bp, Homo sapiens
tatacccagccaagttatcattccagacagaagtcaaaacaagaatatatacagattaagagggttaccatggactctcactaaaatagctattaaagaatgcactttggtaaggtaatataggaaaggcttgatatacaataaacaaaagaatgcaaaaattcataaactatgtaggaaaagtcaatgagctaataataataatacattgttttcctttttccaaaaagtttaacttagtctaaacaagaataactaggtgacagtgttcaataggtggttaaagcatgtaaggcctttatgtggctgaaagaatgctagaaagtcgcartaactgtagactttgttgtaagaaaatgtatagctaagtacatacccacatataaccagttaaggttagaaataaaatagatagcatccaaatccacagagaatgcaataaaaaaggtaacatataaaaatgtttaaaaggcagaaaagaaataaagtgaatgataaacagaaaacacaaatatggtggtagaaatatgtctaaatatattagttattataataaatgaaaatacattaaattcacctgtcacaatataaggattattatactgtattttaaaaatttaattgt

SEQ ID NO: 622107 - DNA, 423 bp, Homo sapiens
aaaggcaaatatttttaactaggcatctatcagcacaccatggcacaaaaaatttgctagcttatttttgtccattgaactacacttaaacccagactcgaaaataatgtgaggtatgaatgtcacaasggaaaaggtggaaaactggaagacaagagtggactagactctaatcaagtttgaatgaagagcactcttccagggtgtcattgtctaaatggaaaggcagggattcaacttcctgcataggaaagaggttctgttacgcctgggttggaggagaaggggtgggaattactgaaatatgcaaatcgtgtatttgccaaaatcctcacctcagtatcttacagtggagaaggccgtaacagaagaagggagcttaggaaagtgtgggcaaaaatgttaaggcctccccctccccaa

SEQ ID NO: 622108 - DNA, 562 bp, Homo sapiens
tggaagaatcttctagctcatctactgttaccctacattacacagctgagaaagagacctggaagtccctgtgactggccagcggtcacatagctggatggatctgttaaggttttctactgtagtcttcatgttttacagaaaagaaaatcaagagaggactaatcaccaaacaagttaatgagagaggcaggcctcgatttggtgtctsctgatgtctttctgcaacaccacagcagggcactcttttttttgtagtcttggctgggtacaatccttgaaacttgagaattttgtctgccttggattttataaaaacaaacaccatcggccagagaatgcactgtgtttgtattttctgtggcatatctgtttttaatgcaaacataaaactgcacaggatttttgtatagatgaaaaactttaaacttatatatagatatttataagacctttacaaagcattttatgtgtagcctttcagaatttcatcctggctaacaaactcataccaaattaggctctctgacattggattattttaattgcccagcctgattat

SEQ ID NO: 622109 - DNA, 640 bp, Homo sapiens
ttataaaaacaaacaccatcggccagagaatgcactgtgtttgtattttctgtggcatatctgtttttaatgcaaacataaaactgcacaggatttttgtatagatgaaaaactttaaacttatatatagatatttataagacctttacaaagcattttatgtgtagcctttcagaatttcatcctggctaacaaactcatascaaattaggctctctgacattggattattttaattgcccagcctgattatatgtcaaatggaagttaagacaaaatttctcccattttaataatactgtaaattcttcatgggtaaattcacttttgaatacagacttgcattgggtttcctgtcacctgcttgttttttctaaaacaccatttgcctattaccagcatgcttccttttttccccagtagtaagtttaatggaatgtttatcctcctcagattaataacaccaagttcttctatatttttgaatagcagtttttaccattttttttacaagaaagctctttgtggctttgagtagagaccctatttgggcattatttagagctttgtggcttccataagccttgtagttcaggagtttggcaacaggtcatatttatatagtgtttacttcaacttg

SEQ ID NO: 622110 - DNA, 601 bp, Homo sapiens
atctctggactgtccccttgtggtaaaatactttgtgttcagggcttaaactgacactttagagattgctgtttctcatagtcctcaaaggttcccactggtgtatcccaaatgcgttttgtagcatgttgcccaatgttggatgtagcatatggccaggtagttagttaaatccagtctttaagggttktgtgtgtgtgtgtgtgtgtgtgtgtgtgtgtgtgtgtgtgtgtgtatgtatttgcatgtgttaaacatgctcttacactgttcccaggccaggcttctctcctacaacttgttagtaaagctgagaatgcagcttataagcacataactattccagaatgtactcaaatgctgaatcttctcaaatgctcttagggatgaaggcccagctggtcagaggtaggagtctagtatcagagacttaagtgtgaacctcagcttttctatgacaggatgaggacaggtaggtaagggccttaatctctctgaactcaagtctctcctcataatggaggttgtgaggatgagagcaataattcacgcaacccaccgaacagtgcctgctacacactgaacattcaatggatggcac

SEQ ID NO: 622111 - DNA, 601 bp, Homo sapiens
atctctggactgtccccttgtggtaaaatactttgtgttcagggcttaaactgacactttagagattgctgtttctcatagtcctcaaaggttcccactggtgtatcccaaatgcgttttgtagcatgttgcccaatgttggatgtagcatatggccaggtagttagttaaatccagtctttaagggttttgtgtgtgtgtgtgtgtgtgtgtgtgtgtgtgtgtgtgtgtrtgtatgtatttgcatgtgttaaacatgctcttacactgttcccaggccaggcttctctcctacaacttgttagtaaagctgagaatgcagcttataagcacataactattccagaatgtactcaaatgctgaatcttctcaaatgctcttagggatgaaggcccagctggtcagaggtaggagtctagtatcagagacttaagtgtgaacctcagcttttctatgacaggatgaggacaggtaggtaagggccttaatctctctgaactcaagtctctcctcataatggaggttgtgaggatgagagcaataattcacgcaacccaccgaacagtgcctgctacacactgaacattcaatggatggcac

SEQ ID NO: 622112 - DNA, 547 bp, Homo sapiens
atctgcagcacatgtttctattcagacttgaacctcacttcatctcaccagacaattctgaaagcacttcagcattctttccagtaccatctttgctagtctgtccctccagacccctagagcccctacccctccaggaatgattccccagctcaatagcccaccatgatatctcccttctagctcctctttcttaccrgatgcaccatttctttcttgtttatcagatgctgcctcttatttgtcagttatggatggtcagtgttgggggagagaggcagtgtgggccagtgaagagatcataggctctgggctcagagagacttgtgtataaatcccaacttgaccagcgaataactgcaaaaccttggaacatttctttgaccactcccagacagtaaaatagagagtaaaacttcactctcagaattgttgggaggtatgcagggaccttgataactgagggcattttctctgaagctagggagctcatgctttatctacagacaaccctgtaatgggataccttttagaaataatgctttgg

SEQ ID NO: 622113 - DNA, 628 bp, Homo sapiens
gggttcaaatctctcccacctcatgccaaaacatcagacagtagaagagagaagtcggattactcccctcctaccaccatagaggtgtctctggcagcagctgagtctcctccattgctctagcacttgctggatagagccatggaggttgcgaaggctctatcttttgctaggtaaccatggctcctaggatccagtgccacctgttctccctttgacccttatgcccagggtgagagtatcttcctattgttgctaatctctgagtttctttaccatttcctgtttggctttctcaactggtgccagttscctgcattgaatcctctttgtttcaaatatttggagtgattttttttcttggttatgtactgactgatacattcagatttagatgaaactaaaaaatatcatggaaataatacatgataacaactcagtcaaaactattaactgtgcaacagtaatgcttgttcacaacaggttgtgttaaggataattctaggctgccagttctgccagttaaaatccattacttagctctagttataactcaactccctttttttcctctcatatttgaattgtaagaaaatgaagagtgacattatcattatcatagaagtaa

SEQ ID NO: 622114 - DNA, 597 bp, Homo sapiens
ttgccatatgccaggcattgtggtcttagtgtggacataagagcttggtggaccatcataaaccatcagagctactttatcaggaaactgagtcacagagaaattaaagaactataccaggatcgcatagatagtaaaaggacagtgttgagatgtgatcctagtcagtctggctccagagttacagcctatgccgttggccacaatgctttaatgcctctctatagagcagtcttgtctgcctggtggcccactaggaccctcattcagtgtaccatgacctctgtttctcccctttcagyctcctttccaaaggcatcatatatccccccattactgagataggaatgtgcacattttataatcatgccattggaaaagtataagttctgccctatggggtgaaggaggggatcaaaaaggttctgtctcatattattcctcctcacccttgaatataaccagtcagagagaggctgaaacatctctcaggggaagagactgaagaacagaaaatagggtagttggaagaatttgtttttccaggagttaaaccactttggaatggaaagcgcgaaaaaaaaaacccacaaaaat

SEQ ID NO: 622115 - DNA, 567 bp, Homo sapiens
tgttctgttgatttctaaattccaccagcttaattatcaaaatacattttttttcataaaactattaacatgtggggttgcagttagggggctgtcagcatagtgcaaaggaaaaagagagagtaggggagcaagggttggatgagcaccaggaggcctagagactcaactcaaggcttggtacccatgttccaaagtctgggagaaggtagcagccrcaggaaaagaggtcttaatgatgcaggcagaatcacaatgcagggagtgcctgggaatgaagttgggagatctggattcaaattccatctatactacttaccttagacaaacagttgaatttttgctgcgcctcagtcgtttctataaaatgaggctagaaataatgttaattaacatttgtagaactcttgctatatgccaggcagtatcccaagtgtttctatgtgcattcacatgccattcttctccacagccctgtgaaataggcattgcaactctactttacagatgagaaaacacaagttcagaggggtcatacaaattgcctgaggttatacatgttaagaa

SEQ ID NO: 622116 - DNA, 608 bp, Homo sapiens
ctcaactcaaggcttggtacccatgttccaaagtctgggagaaggtagcagccacaggaaaagaggtcttaatgatgcaggcagaatcacaatgcagggagtgcctgggaatgaagttgggagatctggattcaaattccatctatactacttaccttagacaaacagttgaatttttgctgcgcctcagtcgtttctataaaatgaggctagaaataatgttaattaacatttgtagaactcttgctatatgccaggcagtatcccaagtgtttctatgtgcattcacatgccattcttctccacagccctgtgaaataggcattgcaactctactttacagatgagaaaacacaagttcagaggggtcatacaaattgcctgaggttatacatgttaagaaccaagtagccaggatcactggtaagagaaaatgagtttctagcttagtgccaaactattgcctaacctgtctgtcttcctcattagactgagagcctcttgaggtcaggggaccaattcccccgattttgtatccacaatgtaggtaatgtctgakaagttaataaatgaatgaacaaatggtttagatgctcaattagatactg

SEQ ID NO: 622117 - DNA, 544 bp, Homo sapiens
ttcagtcacttggtagatgttaatcaaatatctgctgtatgccagtcactgagctaatcaataaataactttgggcacctagcaattttgcttttgggaatagatcataagaaaatatttggataattgtataaaaatggaagaataaagctgttcatcacaacattatttcattttttttaaacgtaaaagttcattcatctaacaaatattgctgagggcctgctacataccaagcattgttctagacattcccattgaacaagacaaacaaggtccctgyccccatcaactcacaatcttgtggggaagatagagaaaacccaaatggttatataatgtcaggtagcaatgagacctgtgaagtaaaagggagcattttcgggtaaggaaatgaactgtgaaaggaattaatttttggattggggctcagtaaaagtctctctgaggagaggccatttgagtcattcttaatgacatgagggagtgaaccatatgaacatctgggaagattagtgtagagggcagaagtatagtctataag

SEQ ID NO: 622118 - DNA, 604 bp, Homo sapiens
acaatgtatcctttgtttctgaatcatagccactaactcartgcttggcacatggtagtacttaatatgggatagctgaattaacttgaaagggcatttgtggattgagcaagattttgacatgagttgggtgaggtttttagttacattgaaatctattctctcatacataatcggtacacaataaaaactcactgaatgaataaacacatgttgtgaaaagcagtttctttttgctgagtgaggattacctcatctctgcaaggaaatccatgttttgacagtaatcagacctggcaatacagggatatagagtggggacaagtggagggatgtgagaaagattcaccttcattacagatctactttagcaggcaatgtgttaggtagaacactgaatcattatcccagttgatcctcagaacaaccctgagggtactttttaattatccccattttataagtgaagaaaaatgagtcagagagattaaggcattactttcatacacaaagtagaaggggtgcagtaggatcaagaagtcaggagtgtctggcataatgtccttgctccccagagcccttggcactgaaggtggttggggaa

SEQ ID NO: 622119 - DNA, 604 bp, Homo sapiens
acaatgtatcctttgtttctgaatcatagccactaactcagtgcttggcacatggtagtacttaatatgggatagctgaattaacttgaaagggcatttgtggattgagcaagattttgacatgagttgggtgaggtttttagttacattgaaatctattctctcatacataatcggtacacaataaaaactcactgaatgaataaacacatgttgtgaaaagcagtttcttwttgctgagtgaggattacctcatctctgcaaggaaatccatgttttgacagtaatcagacctggcaatacagggatatagagtggggacaagtggagggatgtgagaaagattcaccttcattacagatctactttagcaggcaatgtgttaggtagaacactgaatcattatcccagttgatcctcagaacaaccctgagggtactttttaattatccccattttataagtgaagaaaaatgagtcagagagattaaggcattactttcatacacaaagtagaaggggtgcagtaggatcaagaagtcaggagtgtctggcataatgtccttgctccccagagcccttggcactgaaggtggttggggaa

SEQ ID NO: 622120 - DNA, 558 bp, Homo sapiens
ttctgacacagagtgggggtgtccaatatatttttactgaatcaaattgaatataacagactgaacaatgctratgataatccaacaagcatcctagaatgattcccgccaaatgctgtccccttcaataaaactctgtggtcatgggtcacagtcactaaagaagctctctaatttcaaatgttcaagagcctctgaggccacagggcttgcccaaacctgcagcaaatacttctgaaatactgtgtttggggccattcattctttcaaactgactttgttgagtatttttttaagagaagaaataaaaacttctatgcattatataaaatgtaaagtgtagaagcgtttacagcaatctgaagccttgtggatgtgcacattggcttgaagttcagttcaggcaaactgcagtcaaattcaaccattcagatctcagctatcttatgagctcatgtgggtcacaaatggaaatcattggtcaaacaaatgatctgaatcccagcattttactagtagtataatatactctgcataagcaacaaaaagtaaatagat

SEQ ID NO: 622121 - DNA, 332 bp, Homo sapiens
cattccctaaaccagaatgatcatgctcaaatgcaaatttgatcaygttactcctcagaaaagactttccaaaagcttctcatctatctttggataaagtcccacctgattttaatcctatacaatctctaccccctaccaactctctgggctcaactcatgctacgtattcccttattctctttgcttcagtcaaactggctgccaccttgttcttctctttttcctccccctcccccttttcctcaaccccttcttttcctttttcttttttctttaactttttatttttagataattagagatttacatatagtggtaagaataatcga

SEQ ID NO: 622122 - DNA, 332 bp, Homo sapiens
cattccctaaaccagaatgatcatgctcaaatgcaaatttgatcacgttactcctcagaaaagactttccaaaagcttctcatctatctttggataaagtcccacctgattttaatcctatacaatctctaccccctaccaactctctgggctcaactcatgctacgtattcccttattctctttgcttcagtcaaactggctgccaccttgttcttctctttttcctccccctcccccttttcctcaaccccttcttttcctttttcttttttctttaactttttatttttagataattagagattyacatatagtggtaagaataatcga

SEQ ID NO: 622123 - DNA, 608 bp, Homo sapiens
cacgttactcctcagaaaagactttccaaaagcttctcatctatctttggataaagtcccacctgattttaatcctatacaatctctaccccctaccaactctctgggctcaactcatgctacgtattcccttattctctttgcttcagtcaaactggctgccaccttgttcttctctttttcctccccctcccccttttcctcaaccccttcttttcctttttcttttttctttaactttttatttttagataattagagatttacatatagtkgtaagaataatcgagagttatcctgtatacccagtttcctccaatggtaacatcttgcatactagagtacagtatcacacccagaaagttgacattgttataatccattgacattattcatatttcaccagttctacatatattcatttgtgtatatgtatatgtatttagttctatgcaatgttttttttgagatggagtcttgctccattgtccaggctggagtgcagtggcacaatctcagctcactgcagcctccgcctcctgggttcaagcgattctcctgcctcagcctcccaagtagctgggattataggcatctgccatcacatc

SEQ ID NO: 622124 - DNA, 618 bp, Homo sapiens
tcataggctggactttgtccactccccaactctaccattgccttggccattgtcccaaatcatagtctacagaggttcacagtgacacgaaaagtcgcatatggtttgcaacttcaaaagttagtaaagttctttattaaaataaaatctcaaagagaaatcataaatgtaaaaatttgtaaaagctgtattgttcttgtagtggtgatgggggatggggataactgaaattttcagagagaaaaaatgtttcccaatcttaaagtgaataatttgyattttcagtgtgctttgtatgctatgccttttatgaacttcttgggggcttgtggggaagtacaccaaaaacagaaattcttggtacttaattcaactcccagggaaactacctgtttttcatgattatgaactgagtttaaactctagaaaccactcctaagcctctggggtggtaagacaccctgcattttacatcattatatgcctcttttagtcctaaaacatgtagaaaaacttgacctgaagcatagtttcagtgtcttgatctttctaggctctcccatcccacaggccttgaaggccattgcacaggccagtggctagctcttccctgatctg

SEQ ID NO: 622125 - DNA, 509 bp, Homo sapiens
aattattagccttccggacctgtcttggtctagtcttgcctacctgcccttgtccacactatgactctcaactggttttctttatgtcctagctattatcaaaattcctcttgagttaatctcttttccatttggtgtcctggtaaatacttgcagggtatttaaagtaacaggccttaaaatgtggaatttgmtgaactgagtttgctagcacctccctctttctctagagggaagatggcaaccctttcagaagatagcaaagcaactggttgaattgttccctattgtttcatggggttcagacaatgtgcctcctaaggctggaaatttagagcactttgtaaaaaggtatcaggtaggattttggatatgttggctgcttctgaaagctttcaattatgtcttaaaaaaaaacttctatattaactggtccatctgagaacagaaagaaaaaataggcagttttattaaagagaagccctttctgcatggccagaaaagtcatg

SEQ ID NO: 622126 - DNA, 541 bp, Homo sapiens
ggaatttctttctatctgtgtccctccttggcacccccaggcactccaatgccagaattgcctaaaaagagatcaagaaatatccttccgtatggatggaactaccatgtattacatgccagggactgactgcactaacagtctgattctctcacttaatcctctcagcagtgttctgtggtatacattcctattttacagatgaggaaactgagtctcagagatggtaacctggccaggaacccactgctgagatttgcatccagttccttctaccccacacccatgctcctcactgcaacacttgctgtctccctgtgtagtcctagtcttcgcataccctcaggtcatcagaatttaaatctattactttaccccttaactcagcaaagctttctgtagagtcaggtaaaatttttccctaacattttcttccatgcaattgaatcccttctccaagagctcccttgcaaaaayggccctccctctcccgagataagtttcatattcactctgatttcctttgcgctgaagtgtttct

SEQ ID NO: 622127 - DNA, 412 bp, Homo sapiens
tttcagaatttctaacctataccactgtgaaaagaaaatttaccaataaagttctcaataggaatcttactttgttttttggcaaaatttatgtatagtgaaatgtacaaacattaagtgtgtaattcaatgagttttgacaaataataaggcagttttgtaaaaactttggtgaaattggaaaataaccgcaccccagtcaccttgtttttttggctactactaaattgactctgatcacatggaagtgtaataattttctttagtgtgaatgccmtgagccatgaggtaaccctgttctgaagtggtttccttgcttgtaaataaataatgttgacatgtaaagcaggaccaccaaactgtaagtcttgtagtaattttaatgtattttccactctggacaaaaagatgt

SEQ ID NO: 622128 - DNA, 574 bp, Homo sapiens
ggaattcaaggccaaactgggcaatatagttagactccatctctgcaaaaaaaaaaaaaaaaaaaaaaaacaaaaacaaacaaacaaaaaaacttaaattagctgtacatggtggtatatgctggtagtccctagctactcaggaggctgaggcaggaraaccacttaagcccagaagtttgaggccgcagggagctatgatcacgctactgcaccgcagctgggtgacagcaagaccctgtctctaaaaaaaataaaataaagggcttaatttcccaaaatgagatcaatctaaacatactgacctacactttatctcatttaatacaccatgaacaactttccatatcattctttttattgctggatagtatttcactgtatgatatatcattatttaaccattcccctattgagatccatttagatgtttctaatttttcagtaaagcaaacaatgctacattgtaaacatgtacataaatcttctaaaacctgcagacattttcagagtcccaaaaatgggactgttagctacttagccctaaagaacaaaacctgaggcaaagctccca

SEQ ID NO: 622129 - DNA, 574 bp, Homo sapiens
ggaattcaaggccaaactgggcaatatagttagactccatctctgcaaaaaaaaaaaaaaaaaaaaaaaacaaaaacaaacaaacaaaaaaacttaaattagctgtacatggtggtatatgctggtagtccctagctactcaggaggctgaggcaggagaaccacttaagcccaraagtttgaggccgcagggagctatgatcacgctactgcaccgcagctgggtgacagcaagaccctgtctctaaaaaaaataaaataaagggcttaatttcccaaaatgagatcaatctaaacatactgacctacactttatctcatttaatacaccatgaacaactttccatatcattctttttattgctggatagtatttcactgtatgatatatcattatttaaccattcccctattgagatccatttagatgtttctaatttttcagtaaagcaaacaatgctacattgtaaacatgtacataaatcttctaaaacctgcagacattttcagagtcccaaaaatgggactgttagctacttagccctaaagaacaaaacctgaggcaaagctccca

SEQ ID NO: 622130 - DNA, 317 bp, Homo sapiens
atggtcatgtgtgagggaggtcytatgtggccagctgaaaaaggaggtaaaaattaagcttatgttatggatgggccagcttgaagcactgatgtaagccaaaaatggacagcactgcatgccagctatattcaggagtggccttgaaaagccatgaaaaggacacagatgtgagcagtgcaccatggtcatccccttttatgaaaagtaaatgtcctaagatgagaatatctacagattcctgagcagtggtcaatgacccggccacgtggtcagtggcctgaaagaaaaaagacactaatatcagaaacaaagag

SEQ ID NO: 622131 - DNA, 549 bp, Homo sapiens
tgctagcagcccttgctcgctctcggtgcctcctcggcctyggcatccactctggccacactcgaggagcccttcagccagctgctatgctacgagggcccctctctggggctggccaaggctggagccggctccctctgcttggggggaggtgtggagggagaggcactggcgggagcgaggcatgcacatggcactcacaggccagcctgggttccgggtgggtgcaggctcggtgggcaccacactgggcacggtcggatggcacctgctgggcttgatcagaggctgggtcccgttcgtggactgcctttccctcttcgcagggtcattggccacgatggtgggtctctgtctctttctcgctccccctcttttcctcttggttgtctgggacgagctccctctgggctgccagagtgccccagctaggagctgcaaagtccgagggcaagtgccagtgagaggtgaagcctgctgggcttctgggatggtggggacttggagaacttttctgtctagctaaaggtttgtaaatgcaccaatcag

SEQ ID NO: 622132 - DNA, 340 bp, Homo sapiens
tgtgctatgttgattgtgtgtgttcgtgtatgtgtgtgtgtatttactttaacatgcaaataaatgagccagtgatgagtaaatgtagacctgttgtgacatcctcagaataagaacaaaacaaaatgaaaaaactaactcctgactttatatactcatctagtttcttcccttttaaagacagctctttaaaaatgacctggctgtgcttatgcgtttttatctcccagtttttcttaacttcctccagtacaattttcattcccatcacttcattgaaatacctagcactttcatcctggtcgcacagttmtaaatataatatacaactcagagcctc

SEQ ID NO: 622133 - DNA, 668 bp, Homo sapiens
cataataaatatatagtatttttgctgttttacgtaagagaatatatatgttactttacagaagagaatatatatgttaatttactatatattgctgcttagcagtccctttgtaaatacattataattaaattacccaattccttattgattaaattttatgttatctttttccctccctccctccctccctcccttccttccttccttctttccttccttccttccctccttcttttcttcctttccaacagcatcctggtgcacattattttacctgcttstctccatttatgtgtgtgtttctatagtgtagatatttagaagtggaacttctgcaacttaggatgttcacatctttattattttgacctgatattagaaaattgctctccaggctgggtgcggtggctcacatctgtaatcccagcactttgggaggccaaggcgggtggatcacaaggttaggagatcaagaccatcctgctaacacggtaaactccgtctctactaagaacaaaaacaaacccccccaaaacatggtggcgggtccagtaaaaaagcactcaggaggtgaggcaggagaaggcttgcccctgggagcagaggttgcagtgagtgagttgaaaaaaacctccagcttggcgacgaaggagatcctctcaccc

SEQ ID NO: 622134 - DNA, 498 bp, Homo sapiens
ctcttgcttaaaacccttcagtgactgcttccccgttgagttgaaagaaacccagaatcttctgtgactcaccaccctggtgagcaggtcctgcctgcctccccagcagtctctgccctccacttctctcactctgttctagacacagggctcctcttacacttcctaggacacaccaagtgctctctgcctcaggacttttgtgcgtgcagccagtgcctctgcctgctattcctccagctccttatcctgggagtctctgcttaaatatcactaacctcctctgataggccttttggatgacccatcatgagtaggctcctgctctgctggactctgtcacagcactatatttattttctagacagaatgtttcatagtctgaaataattttagtcatcagttgctctagctgtttatgatctctgggaccccactagatgtaggttctatgagggcagggaccctgtctsttttattgagcgtggtgttacccca

SEQ ID NO: 622135 - DNA, 390 bp, Homo sapiens
taactaatttcataagtgaaatgcctgctttttggagaaaactagatttttatgccacaaaattccaaagtttttaatatacaaaatgataaaaataccagaagaaaacaaaatgcctgttcacacagatacatttttatgttgacaaaacctttctaagaarctcagaagcaagcattctgaaggttaatttagtaaaacaaaaattaaatcaccgtgcacatgagaaaaaataaaaggcagcatacttgtaaaatatttactacatatgtatatgcgtgtgtgtatacatattagatttaaaaatcttcattttatagagaattcactcaaatcaacaaaaaaaccctctaatttaaaattgggcaacataaattagaggtctaaatt

SEQ ID NO: 622136 - DNA, 430 bp, Homo sapiens
ggctggggtggaggaacccgcctggcgcctgggctcatgcggcctctcccacccccctgccactcccggctcacctctcactcccaggctggctctgggtctcccgtggggccagagaaaggccggtcctacctccagcctgagttcgattcccacccgttgggctccctctcccttccccagccccaggcacaggcagttcctaccccttccccataagagaagtggttgtgggtgagagggttgagtctcagggttaacccmagggctgagcccacagattgggccttgcactctctgttccttttgggctgtgcactgtcggtgagtttccagtccccgtccccaagtacagtccctcaggtagccctaccttccctgagcaggaagggtctgagctcctagcaggaagcccagagctgactcagga

SEQ ID NO: 622137 - DNA, 566 bp, Homo sapiens
cattctgccggctgcaggttgtgcttgactcactggacacagcrggacctggccaagcctgccacggcccacagcccagcaactgcctttgattgggctctgctgccagaccaagggtggaggggcctgtccagggcccccgaagtctctgagaggcaacaattctgactaagaaggacacgtggtttctggagaagcatgctctgggtcactggggccactggctaatggagccagcagggacctcaccaggtttcttctgagcagttcttatggggctgggtccatcttggtcacagattcctggatgccagggcttcctggtgaggtgaagagtgtggaatgtatctactcccttctatcccccaactaccaccaccaatctagggacaatgaccctgtctccaacatccagcatcctctagggatcctagatggttgtaggaggagtctgtgcaagtttcacctagttcttcctctgtcagaatgtcccctgaccctgtcttatcccatttagtcaccctgcctctaatctctaattcctgttctctctctttctctctcta

SEQ ID NO: 622138 - DNA, 435 bp, Homo sapiens
gaaacagaagcaataaaatgcagatacagataaagatatagatatgtctaataatatacactatttgttattctgagatttattatgaggaattggctcctgtgattatggagtctgagtagccccacagtctgctgtctgcaagctggaaacccgggaaagttggtgacgtagttcagtatgagtctgaaggcttatgaagcaaagaatctggtggtgtaagtcgtagtccaagggcaggttaagaccaatgtctcagctcaatcagtcaggcagaatgagcraattctcttttcctctgcctttttttttttgagacggagtctcactctgttgcccagggtggagtgcagtgccaaaatcttggatcactgcaaccgccgcctctggggttcaagcaattctctgcctcagcctcccaagtagctgggcttg

SEQ ID NO: 622139 - DNA, 546 bp, Homo sapiens
atagatgtttaaggtgacggatatcccagttaccttgatttgactgttaaacattggatacatgtattgatatatcacatgtatccccaaaatatgtatacctatgatgtattaattttttaaagccccataattgtaattcttagatattgtaataagagagtaaagacaaataatgaactcaatttagtaaaaaccaaatacaataataacataagatgtgatatgttttcaaactgttctcaggcaattggtccaacttctcattttaacacttgtatgtactatgcactccttaaggtttggggagaagtccttgtagaaatgtyattgaatttttattggaataagataaaggaaaagaaaaataaaagttaaaattagagtggtgtattagaaagtcaggtacttttgtgtgtgtgaaacagcctaaggattaagaacaaaggctctggagccaggctactgggttcagattctagttttcccacttactgtgtgactttaaccaattgcttagcttctctgtgtctcagtctcctcatc

SEQ ID NO: 622140 - DNA, 479 bp, Homo sapiens
agatggcaaatgtacattgagtttcatttacagcagaccctgagcaccaactctattttaaggcctgagctggccactgggcatatggaggtgaatgagacactgccaaacaggagagccaggtgagtaaacagatcattacatgatggaggtaagccagggagggtgaaggcgtacgaataaacctcgaaatacagttatcgaataaacagataacatcggagaaacaagactctgtaactcttctttgtgcagccagtctgcgtagttgcctgcatagtccacacattaacacaaaagagtctatttttcctggtggcaatggttctgaagatcagggtactctgataattccttggggttggcagcttctgaaatggctcgcagtgatccccgcttcctggtattcaagctttgkgtaaattcctctccttgagaacggactggacatggtgatttccttctaacaaaaaaatatg

SEQ ID NO: 622141 - DNA, 413 bp, Homo sapiens
ctttttctggaagacacaattcttaatctacatgtaaagtagcctcaaaaattataaatcagcagttgatgagactgcagggaaaatacaaaacccaccctcatggagagagatttgaagactcacgtctccataactggcaggtcaagcagacagaaaattagtcaagcaggatttgaataatatatagcaagcaaggtggaatggaagtttatggaacgctgcatctagagactaaacttctcaagcacacwttttttttaatttttttaattttttttttctcagagacagagtctcattatgtcgctcaggctggagtacagtggcacaatcatagatcgctgtaaccttgaactcttgggctcaagcaatcctcccacctcagcctctccagtggctgggactacagg

SEQ ID NO: 622142 - DNA, 478 bp, Homo sapiens
gaacagagatgtttaacctgaaatggggaaatttagtggaaaggaaggcaaatgcttaaaaatacctgaggttctagcccacgaatggtaccagaggcttgctctcagggattagaggtaaggttctaaggagttcagtgttgttagyatgaccaaccatatgcactttttgcccaagatagtcccagtttatgcctgctgcatgcagctcagttcactcctattaattacttagagtgccccatttcactcagaatgtctcaatgtgaacaaaaggttatatttgccctaagttttgtagaacccatacaattctttgttctacatcagaaagagctttccaatgataaagactattcaataatgtgatgggacaacttgccaagtgactattttcctgtcactggtaaggcacaagcagagacctggggtcacctgtctgggatgttctaggtaaggattccttatttggtgagag

SEQ ID NO: 622143 - DNA, 442 bp, Homo sapiens
aaagttggtgacttttaagttttctgccttctgattttaagattctgttgttttgtttttgaatattctatggtcaaatatcagttccatgacatacctacgaaaacacaatttttaaaatatactytttctctcgctaacatgaagacttctccattttacatttcattgaatttctgtggatgttgactaattctggagatgtggcaaattcatactagtagttctgtgtgtgataccttgtggaatgatgggaatccctgctatgataaagaaataagaccgggaggtactgtttaagaatatgacctggacagaaaataaatccaacatttattgaaatttgtttatttaatattgtaaatggtttgcttttatatagatttaatatatttaatagttattctatattataaatcattcactatagcaggctgtttca

SEQ ID NO: 622144 - DNA, 540 bp, Homo sapiens
ttaatttgtttatttactgaatagataattttataaatgaatgaatagatgtttcatagttatttaagcactcagtctcaaaaatttcaggtcacttatataattttttaggttagtgagataaaaatctacctgtccaatagaaagaatatctctgctgaaacttagcaaagtgcttttaaaaatatattgaaaaccaattatattgctttttcatatttaatacatcacttcactcattcatttgttcattcatttaatatttattggatattaccaatatgccaggtgttaaaaataataaaattgttatctgtccacctggagccataatgtatataaaattttacagaaatatgtttttaaatgagaacatctaatttattcatttattccttattctttgaacacgcatcagatgaagcatctaatttaaccatatccagctgggaagtcttcacggaggaggtamcatttggggcaggttttgataagaagtggtattttatccagtgaagacatttgtccagggcaaaatat

SEQ ID NO: 622145 - DNA, 603 bp, Homo sapiens
atggtagccttaagccagaagccagaaaagattcttcaagggaggagcaacaggaatttatgctgagtggggtgactgaatatacatattcaataagcctcaggaagagtcatgagtatttatgaaaggagaaacacgcaacatgtgcaaattgagttttacatcccctggtgcatcccaacgtaccaaaatggcagcatttagcacaatctgagggtgggaattttcaagcccttctgaccaatcaaagccagtggaaagaaaggaaggaacatgaaagaacctggactgcagattctccaaacactggcccatggacaactctgtggccagaggtctctcatcagttagtagaagaggggcagcatcaggtggttggttgatatcagtggtggaatcttttgaaagggtggtttctgcttagcacttagggaagtaaccctaatggtgtatagccagggaggggtgtctgayttcccatcccactgtagccaagaactcagttttcaaggttgctctggtgtccccttggccaagtggggatccactcagatggttgttggagcttaggattttgttatctttcaagtgtttctgtggcaa

SEQ ID NO: 622146 - DNA, 603 bp, Homo sapiens
atggtagccttaagccagaagccagaaaagattcttcaagggaggagcaacaggaatttatgctgagtggggtgactgaatatacatattcaataagcctcaggaagagtcatgagtatttatgaaaggagaaacacgcaacatgtgcaaattgagttttacatcccctggtgcatcccaacgtaccaaaatggcagcatttagcacaatctgagggtgggaattttcaagcccttctgaccaatcaaagccagtggaaagaaaggaaggaacatgaaagaacctggactgcagattctccaaacactggcccatggacaactctgtggccagaggtctctcatcagttagtagmagaggggcagcatcaggtggttggttgatatcagtggtggaatcttttgaaagggtggtttctgcttagcacttagggaagtaaccctaatggtgtatagccagggaggggtgtctgacttcccatcccactgtagccaagaactcagttttcaaggttgctctggtgtccccttggccaagtggggatccactcagatggttgttggagcttaggattttgttatctttcaagtgtttctgtggcaa

SEQ ID NO: 622147 - DNA, 586 bp, Homo sapiens
caactcaaacaaattagcaagaaaaatacaaacaatcaagtcaaaaagtgggctaaagacattaatagacaattctcaaaagaagaatggccaagaaacgtgcaaatggccaaaaaacatatgaaaatactcaacatcactaatgatcagggaaatgcaaatgaaaaccacawtatggtaccatcttactcctgcaagaatggccataatcaaaaaaccaaaaaataatagaccttggcatagatgtgatacaaagaacacatttatacacttggtgggaacgtaaactagtacaaccactatgaaaaatagtgtggagattccttaagaactaaaagtaattaccatttgattcatcaatcctactcctgggtatctaccaagaggaaaagaagtcattatatgaaaagatacttacacatgcatgtttatagcagcacagttcacaattgtgaaaacatggaaccagcccaaacgcccatcaatcaatgagtggataaaaaaatttggtgtgtgtgtgtgtgtgtgtgtgtgtgtgtgtgtgtgtgtgtgtgtatcagccattcaaaggaacaaaataatggca

SEQ ID NO: 622148 - DNA, 651 bp, Homo sapiens
atttctctctcctccctcttggttaacgtgttccttttgtgtgactaatgcttgatgaaccccatttctaatcttcagttattccaccctcctcggtttttattcagattaggtggcagaattaaagggatgaatgatgattttctgctgtgattaaggtaaaaatacaattgcatctggaacaaatggatataaaatacctcagccatattggaaggcttctctaggcctcatttttcctccattagacattagcatttaggctatttgttttacagtgtcaagacttccagaagataccatcattacactacttagttatagatttagagaacagtgagmagtgataacctgttatgcttgcaaactgtcacttgggcatcttccattccttgactatgctcttcagtagattaatgtatctttctctttgtgaatagttgcaaccagagagtaaacatcatcattcccattactaaatcaattatcttgatcccaattccgtaccttcctctgagctcattcctttggagtcagttaacatcaaaaatgaatattgattaaacctcaagaggctatagagaaatacaagagattcatgtgaaatgagggaaggtgggattcagactattgttagtaagtatttcaaaa

SEQ ID NO: 622149 - DNA, 621 bp, Homo sapiens
ctgaaaatgcaatgaaacacaaagatttaaaagagagagagacaaagaaaaaacaatagagagtatccaggaagtctaatatttgaataataagagcttcaaaagagaatcaaaggaaaagagggagaaaatttaaaaaaaaaaaagacaagaaartatcccagaaccaatgtactactgtgcagatcaaaagattccctggataccaacaatatgactaaaaagtgattacatataaagggatattatcaggaaattgcagagtaccatgtttaaaaagcacatccaaaaagctgccaggaagaacagacactaccacaatcaggatgtgaagcagcatcatgatgtcggtctccattattgctaacccctcttctacccttcctaaaactaagcaaacactgccatgttttgttatgtataattctgccttttccatattgtcatgtaaatggatcacataatatgtagccattcaaatggcttcttttagttagcataatgcatttaagatttgtccatcttattatatacatactagcagttgtatacatactagtagttgtcagtttttgttgctgagtaagattccattatatgaaagttctacagtttgtgcac

SEQ ID NO: 622150 - DNA, 641 bp, Homo sapiens
ttggactgtgtttgattttcttgtaatacctttgcctggattgggtatcatggtaatttctggtctcatactaacttgggaagcatttccttcttttctattttgtggaagagattgtacaaargtgttattatttcttaaatcttggtaaaattcaccagtgaaacccatatttgcctggagtttttctttgatggaaggttttttaacttggaattcaattcccttaataatgtatgatatttggcaatttattctccagtgagtttagtcatcttgtgggtgcagaaaataggttaatttaatcaaatttgtcaaatttattagcaggaagttgtttgtagtatgtttgtactacaaacaacaatttgttgcaattgattttattctttcatttctgatattggtagtaagtgcccccgtttttctgttcagcctagagttttatcaattttgtagatcttttcaaagaaccatttttggctttatttattttctatatcatctacattgttttctattttccatttcagtgatttctgctctctattgttttcttccctcttgccttgctattgcttctctagtttcttaaagatgaaaactttcattattgatttgagacctttcttcttttctct

SEQ ID NO: 622151 - DNA, 641 bp, Homo sapiens
ttggactgtgtttgattttcttgtaatacctttgcctggattgggtatcatggtaatttctggtctcatactaacttgggaagcatttccttcttttctattttgtggaagagattgtacaaaagtgttattatttcttaaatcttggtaaaattcaccagtgaaacccatatttgcctggagtttttctttgatggaaggttttttaacttggaattcaattcccttaataatgtatgatatttggcaatttattctccagtgagtttagtcatcttgtgggtgcagaaaataggttaatttaatcaaatttgtcaaatttattagcaggaagttgtttgtagtatgtttgtactacaaacaasaatttgttgcaattgattttattctttcatttctgatattggtagtaagtgcccccgtttttctgttcagcctagagttttatcaattttgtagatcttttcaaagaaccatttttggctttatttattttctatatcatctacattgttttctattttccatttcagtgatttctgctctctattgttttcttccctcttgccttgctattgcttctctagtttcttaaagatgaaaactttcattattgatttgagacctttcttcttttctct

SEQ ID NO: 622152 - DNA, 595 bp, Homo sapiens
aattaaaagaaaagtaaaaaatttactccactgaagaaaaaatgaatgtttttgtttgggtaaccataacaatttcttcagtcaaattatttatgtaatgcacaacccccaaaatgtttttatcatgtgtgagatgtaaatatgatcagaggtataatcctgaatgatttgcatccatttattgtaatacaaacatatcattaataatggttactttctaagtttaataacagatacatttgtcctccctaatgtgagtgggcatcagccgatcaggctctttggcaactggtaatttcaagtgatgttattttgatcgtcactttgtttccttggtatgcaatctccattttaatctccttctgctcttctgtcatctctctgatttcttgttttattcaattacagtttactaaatttcatagcatgaattgcttataaaaaatatttttttctattcctttggtttttgtttcttcaaagttgggttttgtcttttgtactctaaatttwaaaaaaaaaaaagcacttttaggttttgtagatagctgtgccaagccatttctttcatttgctcattattgagtggttttat

SEQ ID NO: 622153 - DNA, 549 bp, Homo sapiens
ccctcctgacattcccacttgttccccatgtctcakttacaggcccaaaaactgcgactggcatacacaaggagctctcattatggtgggtctctgcccaatgttaaccagattggctctggcctggccgagttccaggtgagtagaccccagccagggaggagtggagtttcttaggctgcttcctctgctgacttctgtcctttttggcagagccccctccactcacctttggattcatctcggagcactcggcaccatgggctggtggaacgggtgcagcgagatcctcgaagaatggtgtccccacttcgccgatacacccgccacatatccttcacaggggacttgggagtgtctgaaaggtagtgggatggggttcctcagggactcataggaagcacttgaagtgttgtgcgtcccttccttctcttggagctcttctttacccagcttccctgaaaagcgaccatagcccctgcgtcagcacctgctcctgtgacaaggagttttgctcctgaggctgtgccccctgtctctggctggctc

SEQ ID NO: 622154 - DNA, 549 bp, Homo sapiens
ccctcctgacattcccacttgttccccatgtctcagttacaggcccaaaaactgcgactggcatacacaaggagctctcattatggtgggtctctgcccaatgttaaccagattggctctggcctggccgagttccaggtgagtagaccccakccagggaggagtggagtttcttaggctgcttcctctgctgacttctgtcctttttggcagagccccctccactcacctttggattcatctcggagcactcggcaccatgggctggtggaacgggtgcagcgagatcctcgaagaatggtgtccccacttcgccgatacacccgccacatatccttcacaggggacttgggagtgtctgaaaggtagtgggatggggttcctcagggactcataggaagcacttgaagtgttgtgcgtcccttccttctcttggagctcttctttacccagcttccctgaaaagcgaccatagcccctgcgtcagcacctgctcctgtgacaaggagttttgctcctgaggctgtgccccctgtctctggctggctc

SEQ ID NO: 622155 - DNA, 586 bp, Homo sapiens
gtgtttcctagaaagaagaggaagggcagtccccagatgggcagtgctgtcagggatagagtagggaggacgttgtgttgccgctttcatagtctggtcactgccacccattctgggtggaaaggggctcagttcccatcagtaatgttggcatctctggttttttgtctgtgcctgcaggacttcattcacctctcagccacccatccctgcagtcctccmtaagcaatcccaacctccaggcttccctgagcagtcctcagccccagcttcagggctcccacagccacccctctctgcctgcctcctccttggcccgccatgtactgcccaccacctccctgggccacccctcactcagtgctccggctctctcctcctcctcttcctcctcctccacttcatctcctgttttgggcgccccctcttaccctgcttctacccctggggcctccccccaccaccgccgtgtgcccctcagccccctgagtttgctcgcgggcccagccgacgccagaaggtcccaacagcagctgcccaaacagttttcgccaacaatgtcacccaccttgtcttccatcactca

SEQ ID NO: 622156 - DNA, 586 bp, Homo sapiens
gtgtttcctagaaagaagaggaagggcagtccccagatgggcagtgctgtcagggatagagtagggaggacgttgtgttgccgctttcatagtctggtcactgccacccattctgggtggaaaggggctcagttcccatcagtaatgttggcatctctggttttttgtctgtgcctgcaggacttcattcacctctcagccacccatccctgcagtcctccctaagcaatcccaacctccaggcttccmtgagcagtcctcagccccagcttcagggctcccacagccacccctctctgcctgcctcctccttggcccgccatgtactgcccaccacctccctgggccacccctcactcagtgctccggctctctcctcctcctcttcctcctcctccacttcatctcctgttttgggcgccccctcttaccctgcttctacccctggggcctccccccaccaccgccgtgtgcccctcagccccctgagtttgctcgcgggcccagccgacgccagaaggtcccaacagcagctgcccaaacagttttcgccaacaatgtcacccaccttgtcttccatcactca

SEQ ID NO: 622157 - DNA, 582 bp, Homo sapiens
gggccagggaggtggcagaggtgatatgtgcctggcatgcttatttttgcaaccctgggggcaaagggcagggcaggaactgatgcaattcatccactggcttcgtcatggggcaccttccctgtttgtcttttgtgggcctcagttttacccactggaaaatgggaactgctgtgttctggtttgttcatttgtgaagagcagtggcttggaggaagacggacataaaatctttggagggaacaaaatgcagagtagattcctgaggaattgaatataaataaaatgtttttttaaaaaaaatgggtcctaggccaggcgcagtggctcatgactgtgatcccagcactttgggaggctgaggcaggtggatcacaaggtcaggagttcaagaccagcctgaccaatatggtgaagctccatctctactaaaaatacaaaaattagacggacatggtggcgcatgcctgtagtcccagctactcaggaggctgagacaggagaatcacttgaacctgggaggcggaggttgcagtgagctgagatcgcrccactgcactccagcctgggtgactaagcaag

SEQ ID NO: 622158 - DNA, 587 bp, Homo sapiens
cttttaccctttgaaatttcttccactcaccctagaacattattggagatttattttctggaaagatcaaaagtagggtctttgtgccttgtgttcacgattgaaacagataatatggacagtgaggtctccccagacctcttttccatgttgctctcagaattccagtcaccatgccttcatccttaaggcaagccttgaggctacaagaagagcctactctaaggaatatgatctcccccaaagaggaaagccttaatcaaagtttccccaaagaaagggcccagccagataaccctatggaaatattcacagttgatcaattcaactctaaaagcttccagtcagctttttagtgtccctcttgtaaatgtaaacagacagccaaggatcatcagatgagcaaaaaaagcaattagaggaaacagttattttgtttaacctttcctcttcccaaataacctatcagcacctcacagagctgagaagatactgcaaccatgaaaaaacaaggacaagaaagaasagagatttaaaagaagaatatttaaaataaaaatataaatgcagacataaatatataacac

SEQ ID NO: 622159 - DNA, 637 bp, Homo sapiens
accggttcacctggggatgagagagagaatcatctatctattgcatctcatcccccattggccaagggccacccaaggagtgttaactcctccatattctgagttactcatgtgtcacagctgagtgggaggcagcaggattccatgctattgtgtaagagaagcctggagcaagaagcaagaaacatgaggtgttggctgggagagaagtgctatccaggtgcacctgtgtgaaacagcccaatctacttcgaattgtaacaggtgctatccakgtgtaacagtgctatccagtgctatccaggtgcacctgtgtgaaacagaccactctacttcgaattgtttcatatcaaggctactggaatccaagattgggccaaaattataaagagaagcttaagggggttttgatacatcatgtaaaaatgccagtttctagttgttatccattgttatgggttgaattgtgtgttttaaaaattgcatacattgaagtcttagcccctggtacctcagaatgtagtgctatttggaaatagggtcattgcagatgtaattagttaaataattcttaccttacttaaattggagtagggtgggcttctcatccaatatgacttgtgtccttagaaaagaa

SEQ ID NO: 622160 - DNA, 529 bp, Homo sapiens
gtggcgtgtgcctgtaatcccagctattcaggaggctgaggcaggagaattgcttgaacccaggaggcggaggttgcagtgagctgagatgtgccactgcactccagcctgggtgacagagcaagactctgtctcggaaaaaaaaaaaaaaaagaagcataatttcttagtctgggtgctctaataagcagaacccaaggtaaggattagagcactgctgttttatttggtacaaacccatgagagtgaaagtgagaaagaaaaagggcaatgaggcaagcaaaaataagtgacataatttgttactgcattggccacagcttgatgataagccaagaaactagagcataggtaacttggcatctatgtctctttgtaccaggattcctctggaaggtgcaagaagaaaccacatgtcacagcagtccatggaagggaraaaggaggaggaatttatatgatcagctccctcatgcctcctgttttccattggccaaggtttacctcacagagaactaacgccccttta

SEQ ID NO: 622161 - DNA, 561 bp, Homo sapiens
tcttccaccatgattgctaacctgaagaaaaaagctatgaaagagcttctgaagctcccatgcccatggatttctcagtgccttgagaagggagtatgtcatctgcatcttgccagaggaaatagtgagagaggtgggtggggtggggcacacaataaactcactccawcattcttatctcttgttggaactcagaaaaccataccttcaaagactgatgctttgatatgctgagaaatcttagaagctgcctcagaatcaagatccctctagccttgtctttttccacctgctcaaagtagagggagagactttctctggaatgtccctgatctgaccaggaaagtttcttttcaaaagaaacagttgccttcctcccttccttgaaatctcattatccatctcagaaaagaagacaggaatgccaccacatctggacactttttcacaaaataatgcctgcctctcagactcaaattccaaagagaatcatttacaagttaacttttgtccattattctccctaataatcatttactactcctcaaaagcgttgtctac

SEQ ID NO: 622162 - DNA, 536 bp, Homo sapiens
gtttaatatgctattatacaaaaacctcttgtgaattgctataggtgtttaagagtttgtttttgttgttttttagtagaatttagaggaatggattaggatctggaaatggaatgggaacacatttttyttatttaaagtaatagctcctgcatttccaaaattctctgccaccaagttttgggaaacaaattaagagtcagaaattaagagatgcatggacttgcctaaatctgctaacaagtttttcaaattgggtctgtagagtcctctttctaactcttgatttatattttatttcttccaagattttagagataacctatagcctagacattttctacttggatatatgctaagccttgctttttttttttttttttttgagacagagtctcgctctgtcgcccaggctggagtgcagtggcatgatctcagctcactgcagcctccgcctcccagattcaagcgattctcctgcctcactttcctgagtagctgagactacaggcgtgtgccatcatgcccagctaagt

SEQ ID NO: 622163 - DNA, 390 bp, Homo sapiens
cctttgatcacgcccggagtgggtggcgggtgggccagggaggtgtggggctgtcaggggcattggggagagtgaattccaaggtgacaccctcccmactatgtacaagtatctgctgcctggagaaacactctgaggacaaaagaccagggtggcggcgagtgagtgatctaaggatagggcccccacccagcattgcccctgtctcacccattgggtcgtttccttttctgttttccaaatgaaaatagctttgttgggtttctcccctctgaggattaaagatgcatatgtttgttgtatagggttcagacaatacagagaaaaaggtccccaaatcttttttcctcgtcaccaacactgggcaaaggggtgacagggtctgtgcat

SEQ ID NO: 622164 - DNA, 390 bp, Homo sapiens
cctttgatcacgcccggagtgggtggcgggtgggccagggaggtgtggggctgtcaggggcattggggagagtgaattccaaggtgacaccctcccaactatgtacaagtatctgctgcctggagaaacactctgaggacaaaagaccagggtggcggcgagtgagtgatctaaggatagggcccccacccagcattgcccctgtctcacccattgggtcgtttccttttctgttttccaaatgaaaatagctttgttgggtttctcccctctgaggattaaagatgcatatgtttgttgtatagggttcagacaatacagagaaaaaggtccccaaatcttttttcctcgtcaccaacactgggcraaggggtgacagggtctgtgcat

SEQ ID NO: 622165 - DNA, 529 bp, Homo sapiens
ccaggcagaggtaaacataagtacccctgaaaaagcaaattaattagaactaactaggaaagaagcggttgagtcagagagcaagacagcctgtcccttgcttggagctgaattgagagctcggacagggaaaatgaaagcaggtacaaagtgtggatcctgagctcggaaaacaggtagtatttatggcatagaaatccctaaggcttttctgtcgagagagatttccrgaaggtgtgggtgaaggggtaggaggaggtggggagctcaactctgttgagactgaaggacagagacagaccctactccttctctcccctcggctgagaattgcctaagaagcctgggctcagtagctgttctggaagcctcggggaacctgtcaacgcgatgctgtgggccgcagttcctgggagactgcctttctctccatccctgcctgcggctgtggatctcagcaaggctgctcaaaccttgaaacagcccctgcttgtggccagcacagttctaataaggattcattactaga

SEQ ID NO: 622166 - DNA, 626 bp, Homo sapiens
cttaggtatcactcagtggttccccgccctcagcggcttggattcttatcttttatgcccccacgactccgcatgaagtccaaaggctgtgttgcatttattgtacttttctcctgctacacagagcagctggagctggtccagtttctcttttgggctttccttcttgagcacaaagcctttcacgcccttcagcatccaggctcattgtttgtccctggttgaaggtcctgactaactagtgtttttttttkgtttgttttgttttgtttagaaggcgtctcactctgcagtccaggctggagtgccatggcacaatcttggctcactgcaacctctacctcctgggttcaagcaattctcctgcctcagcctcctgagtagcacgtcaccacacctggctaatttttgtatttttagtagagatgggttttcgccatgttggccaggctggtcttgaactcctgacctcaggtgatctgcccacctcagcctcccaaagtgttgggattacagacatgagccaccacgcccagcctcccagataccttttattcagtttcttagttgtaatcctcccaattactatgtaaccagagaagcagtgtggttgggaagtgctttct

SEQ ID NO: 622167 - DNA, 590 bp, Homo sapiens
gaactgctggggtttgggtgggggctgcagcccacctgtgggccagcgtcctgtggccaggcaaccccaccctgctcctctgtcaccagagaccaaccctgatgggcccagggtcagggaggaggggctcatcccccttgagtctgggtcaattgtgaggtgggggtgagcaacgttggactagaggccaagcagtyccagaggttcagagagtctgaaaactgtgtccaggaccctcttgatttaggtgatgcctttttcatctcttttcaaagaactcaatcaatctttttgggaagacaggaaccacatatttcttgtgaagacaaggacacgcccttgtgtccctggcacctggcacatagtaggtgctcaacaaacatttgttaaatgaatgcactgtgcaaaacaaggtctaatctgtcctcccctgccctctgtagatggagtaagaccctcctccaccaccaccgcctgaggaacagcacagtagaggtcagaaaggttaaggggcaggcacagagcctggagtagaaccatgattccatacttaccggttaccaaaactctgcctcagtttccttgtctgt

SEQ ID NO: 622168 - DNA, 540 bp, Homo sapiens
aacttacaaatgataaattgtaaatttcaggctgggtacagctgctcatgcctgtaatcccagcactttgggaggccaaggcaggaggatcgcttgaggtcaggagctcgagaycagcctggccaatatgatgaaaccccgtctctactaaaaatacaaaaattggccaggcatagcggtgcacacctgtaatgccagctactcgggaggctaaggcaggagaattgcttgaacctaggaggcgaaggttgcagggagctgagatcttaccactgcactccagcctgggtgacagagtgagactgtttcaaaaaaaaaagtaaacttcatatagccaactgattctcacagagtgcttcaattttgctaaactcatgtaactggaaccaatctgtggctgcaattgacaaacaagtgcagatccaatgtgaatgttggttgatattttacttaacattaaagagtaacaattaaaaccacgggggctgggagcggtggctcatgcctgtaatcccagcactttgggaggccgaggtggtt

SEQ ID NO: 622169 - DNA, 616 bp, Homo sapiens
ccttcaacccccaggtacagagcaagggggcagaggcccaggtagagagaccagtgtgtgccgaggtcctggagtggagggtcacggcgcacggcaggtaaagagctggaaaggcatggaagctgaccctggaggtggagaggcgggaggagggtgtgactctggggaactgggcaggagtcactctctggcgagccttcttgtccagcgtccggattcaggatttggtcctaggaatgccaagaggaggagtgtgcaatgtgactgtgctgtgtttaaacaaggtcctctggccacggtgcagggaacagactggagttggcagagactctgtggacactccaggaggcccatgcggtgggctgggagagacagtggcagcctgggtaaaggagatgggggtgaaggagaaaagcaggcagaccagagagggtcagttacgggaagactgatcagtcgtggtgatggtggcgggggagaagaggtggcggcagggatgaaagccggatttgggtcatgtgcagctygggagatggtggagccacttatctagataaggaaatggaatgggggcacagatttgaggtgcaggaagagaaaaggtttaggtgtggat

SEQ ID NO: 622170 - DNA, 611 bp, Homo sapiens
cgaagacgcaagggaagaggattctagcagaggacatggaaaatgcaaagtcctctaggcagcaaagggcattgttcaaggaacagtctgaaggccagtgtgaatggagcagagtgaaccaggcaaaaatgtaagcgatgatggcaagatgggaagaagtgaggccatgcagtggctgagagattgtgtgtggtatgggctgtggatatttttctaacagcagtagggacccgttgaagggtttccaatagtggtggtgtgcagggggtaacatgatctgatttatgtttttcaaagatagttggctctgtgaaaatggcttagaaagggcaaggatggtttggaaagacatgttgacggctagaatagactaggggagagatgacagtggtttggactagggtgaggggacagttggaatggagagaagtgcattgatctgtaacatattttggaggtaaagttgatgggactagagatggtttagctgtaggagatgagaaaaaggttagaatcaagatgacttctagtgtttttrccacctggggtaagatatcattcgctgagatagaaaaggctgaaggaagaatgaatttggagaaagggtgccc

SEQ ID NO: 622171 - DNA, 594 bp, Homo sapiens
ctctggttgatatgtagcgaatttatgtccttatgggctggatccaacaagaaaaatatgaatcaggtatgtatgataattatagggccatttgataccttaagaaattccagctttcctttgactcattttgatatatctatttactgtataaattcatatggtattccaaacccttaaagacagatttttttttgcttttaaaaatgtttatgggtatataatagttgtacatatttatgagacacatatattttgatataagcatacaatgtgtaatgaccaaatcagggtaattgggatatccatcacctcaagcatttatcatttctttttgttagagacattctaatttgactcttctagttattttgaaatatacaatgaattattgttaactatagtcatcctattgtgcatgccagactttagtccttctaacggtattttggtacccattaaccaatgcctctttatccttcccccwcccctactacctttcccagcctctggtaaccatcattcttctcactatctctataaggtcagtttttttttaaactcccctatatgagtgagaacatgcagtatttg

SEQ ID NO: 622172 - DNA, 485 bp, Homo sapiens
agtatttgtctttttgtgcctggcttatttcacttaatgtaatgttctctaatttcatccacattattgcaaatgacatgatttcattcttcttatggctgtctatatgtaccacattttatttatccactcatctgttgatggacacttaggctgatttcatatcttggtcattgtgaatagtgctgtactaaacatgggggtgcagatgtctcttccatggattgatttcctttttttttttytgaatatagacctagcactggaattgctggatcatatggtaattctacttttagttttttgaggatccctcatactcttccccatagttcctgtactaatttacattcctaccaacagtctgtgcaagagttctcttttctccacattcttgtcagcatccattattgcctatctttttgataaaagctattttaactggagtgagatagtacttcattgtagttttagttcgcatttct

SEQ ID NO: 622173 - DNA, 628 bp, Homo sapiens
tattctctcaagtatttctagataaatttccaggtgaaaaatcaaatttctttaaattaaaaaaattcaaaatgacaaatggaagtttgttgatgccaatatatttctaaagtcaaaattacagaaagaagcactgcatgtcaaacattatgaaaatactatgtatgagagaataaagtattttggaaaaacaaacggataattctttaaatccagaactactttttatcttctgatatcatagaaacaatgtcattgtaaacttcttgaggggcatccattgcccagataaagtccaagtgattgtaaaaaggaatctccttgtggtaaataagattggggagttttggaagcaaaaggccaacatcttgggggtcagccaacaggtccttgccaccgttccacactgcaattggtacattcatggctgtcacattgtagtagggaggytgggactagaaaacacaagagaaagaaccagagtttaggtaaccacactttaaacccagtacttactattcaagtagagtgtataacattaactggcggttttataagtgaattctagcaatgattgcacagagaaaaccacctttatccacagagcaaagtgaatgcaatatgtttt

SEQ ID NO: 622174 - DNA, 582 bp, Homo sapiens
gagcttgctatgagccgagatygcgccactgcactccagcctgggtgacagcgagactctatctcaaaaaaagaatatgggcaaagtcttacataaatagttgctcagaaatatagtctgtaagatttatcaaaatgactgtcagcattagaaatatttattgaaaacatttattcaatatctagacatttttctcacaaaggagcctgctaaaatatatggttcagtcctttctcttacagaatttaaatgtaacacctagtatttaggtggtcataagtgagtagtgaattgtgttttttcttcatgttgtttatttggtttaggggcaactggggtgatggaaggatgctggaagtgattaaattgggagcaatgatttgtgatttctctcatgtttatcaggatatcgcagttctgaacctactcctagttctcataaagtaccacttctaagtggcaatgaaacaagtaatcaaagatgttgctcaaaatatagaaattgaaatgcatactaaccgtgttaaagttcttactgtcaaatccacaaattataaataaggcattgctgcaaaggagatt

SEQ ID NO: 622175 - DNA, 587 bp, Homo sapiens
aattcattttaagaggaatagaatgcactgaagggtttgaagcagggtagtgatatgctgtatgtttttttaaaaatcaacctggagactgtataaagatgaagaaagaaaggaaagaatggaaacaggaatggcagttaggagctttttcagtgtttcagctgaaagatgatacagctttgatcagaatsgtagcagaaaaggtaataagagctgattcaaggtatcttctgggtgttagtctgatagaatttactaacgttggattcaggagaggtcagggtggcagaaaaaaaaggagaaataagaatgattcgtaggtttctgctttaaccagctgggtggatggtagattggatggttaattacacagggaagcctcaggaaggagcagatgggagtgggaggtagaaagtcaggaaatccattttggatattttgactcatagatgaaaatatgaaatagatatttttcataatactattgtgtttaaggaaacatttgtattggaaacacatgtgactgtaattagtacacaaatggtatctaagccttgcaatgggataaaatcacttagggaagtagc

SEQ ID NO: 622176 - DNA, 633 bp, Homo sapiens
attttgtgtttattcagtgtgattaagaaaaaagaacaattataaatggartggcttgttttctgtgatctcccaaactaggctgtgagtacttcaaaggaaagcaatgcattaacttctttttccattctttttgcaagacctagaattaaatattaagagtagaagagaatcatctggtttgcctcaggtcctcaagtattataggctaggaaactaaggctctaggagattgacagagttgtgaaaatgtcacaaatcttgttactgatagattcaggggtgactaccaagtcacttctctcttcattataccaatgccttctttcaaatgatgcaaaataatttaatatttttatgtattatttttcacacataggtcatcgtttgtaaatacttgatttaaacttgataaatggttttacttggaaagcaattactatagttctgaatcattgttctaatgcccaaagtgtatagtttttcagtattcatatttaaatttagtgtttacattttgttatttttctatgctccttaaaaatgatatcctccctttatcagccctaatttagtacagtgactttggtgaattatctgggactacatttataactgaagttttgctgcaag

SEQ ID NO: 622177 - DNA, 511 bp, Homo sapiens
cattaacaatacaaacaataaaataagagaatattctgaaaactgcaaataaatttgataaattatattaactagacaaattccttgaaaaacacaacttaaaaaaccatttccagaagaaaaagaacatttctatatctactttaaaagttgaatttgttttataaaatatttccacgtgcatggacaaaaattacagatccacatagtttcattggtgagcatcctatctaatatgcggaagaaattattacactcatcgacgattttacagagttataacactgaagttgttcatgtgtccctgaagttgttagcatacaacccttcttgacaaactattcttagtgttctgatggataaattggagccaaggttattagaataatatggaaattaatcaaaggagcaaatagtttaaaatgatcagttttaaaattgggaagtacrtttgacaaaactcaacaccactttataataaaaaatttttaggaaaatagaaatgaaaagg

SEQ ID NO: 622178 - DNA, 611 bp, Homo sapiens
tttggtaaaagaactttggagccaacttatagaagctctcacaagaaacagagggtataattttaatatcagtaaggataataatccttacagatttgaaacatcaaatatgcatagaaccatatatttattataatactaaacgaagaaaaaccaattttggaaattcataaataaagggaaagaatcatggattttggataacttaaatatatgtgacaacaattcctctttatggaagtattcagttaataaacgaagaactgatcaaattggaatgccaccatttttaatctcctaattaactcttgggtttgtgtattgaaaagcagtagtctctgacattctaaaaaagagaaacagctgtgcattgtcagcctcattatagtagaacaccatacggtctataaaatattttttttttwaaatcttaatcttattaaggttataatttacagtactggttcttaacttagtagggtgggcattttgccatcaagatgatatttggcaatgtcaggagacatagttgactgttacaacttgggatgtgtgtgctgctgggatctagctagagatactgctaaacatcctccaatactcaggacaac

SEQ ID NO: 622179 - DNA, 522 bp, Homo sapiens
aggtttgcttctgcataaaaaggtaggagactttgtagatatccaaaaatatcttcccatttacttatcactgaacctgaaattctctgcaatgtatgagtcattaaaggccctcaagagaatgcagattaattattaattattcatagcatttgtataattcttttcatatatgtttaatccttacaacgtctctttgaggtcaatattattatccccatgttagacataaggaaactgatgcctgtcttattcatgaactagaagattcaaacctagatcccyggctctaaattctggattgttccacacctaggggatgaaggtagttgggaagcatgttacaagaagaagctattgtcactggtaaaaattattggattgtaggtagttggggtttgaggttacagtgagctgtggtagctatggtagtgccactgcactccagcctgggtgaaagagtgagaccctgtctctaaaaataaaacataaatttattggattgatagaagagcgcagacc

SEQ ID NO: 622180 - DNA, 568 bp, Homo sapiens
gcgtgaacccaggaagcggagcttgcagtgagccgagattgcgccactgcactccagcctgggggacagagcgagactccgtctcaggaaaaaataaataaataaataaataaataaataaataaataaataaataaataaatagaataaccagaaaaggccagtccacagagacagaaaatagattaatggttgcttagagtaggrgagtttaggcaaagatgaggagtgaatgttaatgagtactaggtttctttgagggggagcaaaaacgtttgtgatgattgtgatgatgattgcacagccctgtgaatatacattaaaaatcagaatattgtatgtgttaaatgacctaattctatagttatacctttataaagctgttaaaaattcaaaaatgcattcatacgaatttctcattctgttgtctaatataactttgtttgctagagtgtaaaaataatgtcttttgccccatcatttttttcctaaggaaaattatttttcaggataatacattatttcatgaatttacatgtgtggtcagaggatatctacccatataggc

SEQ ID NO: 622181 - DNA, 540 bp, Homo sapiens
cctcttcaactctgccctctcctacctctatagcactcttcactgggcaaacagagtggcacaagcaagccaagtatctgaggcaaataaaacattgtatataacgtaggtattacatacacatggtattagaattcaagccaagtgaaatagtcttatgttttgatagagcactgaactgttcawctcagaaaattggacgatggatgatgaacagcaccagagagttgattcccattacatttcccaaaggcaaaggtgcttgggggaatttctctgaataaatatgccattctgcatattttaaaagtacatttaatctcttctagtaattagtctgcagatgtgtatttcaggattgagtgagtaaattagtttaaagagtttgctaatttttgtagagaaccaaggccaaatctgttatttcctgaggttgaaatataacacaggcactgaaacatttttgtagttcaaaataaagaatgttgggtgaatagtttaggagaagtatacttgcaaagataaactgatttttttttc

SEQ ID NO: 622182 - DNA, 524 bp, Homo sapiens
ctcctctcttcctgtccttctctctctcttgtttatagagatgattattatagagtgttatgtcaactaagtaaatcatagcagaaaaaattcaaaaccctttagaaattaaccattacccagtgatccattttgtgcagtctaaatactctaaggaaggtgttttccaaactgcaataaccctgtttaaccaaaactggcatttctaggtttgatgtacagtggagcaattggagtgcattatgatcctaagatttagggacataattataatatgtagtagacawtgatagtataaataaagtggaaactgagctaaaatttatgaactgaatattaatatgttaatacactgctatataaagagaactgccagccaaaactgtatcgagccctaaacaatgagttcctgcatcctcatacagacttgtggagcaaaaatgttataatactctcataaggccacatcaaagtgttatagctacaaaagagctttgcttgaacataaagcatcaaggtttatt

SEQ ID NO: 622183 - DNA, 567 bp, Homo sapiens
ataacaacaagaattaacagaaagcaagataaagaaagcagtatagaatcttgtcccttctgtcatcatctgactaaatgccaataatggatatgtaataaaagaaatacaggggagattcgagcaagatgactgactagatgcaacaaggttagaacagctgccactgagggactgagaggactggtgtacccctaacagatcttcggaggaaaggcactgagagtggacagagggaagacatagcagctgggctgaagcaggaggaagctgggaaccctgcatgaggctactaagcaccaggacycacttgtggcccaaaatgattccaggcgaatgggtgagttgaactggtaagggggagggatagcattaggtgatacatgtaatgtaaatgatgagttaggggtgcagcacaccaacatggcacatgtatacatatgtaacaaacctgcacgttgtgcatatgtaccctagaacttgaagtataataaaaaaataaaaaattaaaaaaaaagaagtaactagctctcgccacaggcctctggaatgcaggcaggaggatac

SEQ ID NO: 622184 - DNA, 599 bp, Homo sapiens
aattcagaattctatcagatacatttaacaaacaaattgacatatttaaaaagagtcaagcagaaattctggagcttgaaaatacaattggtatactgaagaatgcatcagagtcctttgacagtagaaatgcccgagcagatgaaagaattagtgagcttaaatacaggctatttgaaaatacacagtcaagcctggatgaagtggctcacacctgtaattccagcaatttgggagtccgaggcaggtagatcaggagtacatsatgagcctggccaacatggtgaaacctcatctctactgaaaatacaaaaattagctggacatggtggcacacacctgtaatcccagctactctggaggatgaggcgtggtaattgcttgaagccaggaggcagaggttgcagtgagctgagatcacgccactgcactcaagcctgggcaacagaatgagactctgtcaaagaaagaaaagaaaagaaaatactcaatcagaggagacaaaaaagaatagaaaacaatgagaaaaatgaaacaaataacatgcaatgaagctccaatacatctggcagcagacttttcagtggaaaccttacagg

SEQ ID NO: 622185 - DNA, 599 bp, Homo sapiens
aattcagaattctatcagatacatttaacaaacaaattgacatatttaaaaagagtcaagcagaaattctggagcttgaaaatacaattggtatactgaagaatgcatcagagtcctttgacagtagaaatgcccgagcagatgaaagaattagtgagcttaaatacaggctatttgaaaatacacagtcaagcctggatgaagtggctcacacctgtaattccagcaatttgggagtccgaggcaggtagatcaggagtacatgatgagcctggccaacatggtgaaacctcatctctactgaaaatacaaaaattagctggacatggtggcacacacctgtaatcccagctactctggaggatgaggcrtggtaattgcttgaagccaggaggcagaggttgcagtgagctgagatcacgccactgcactcaagcctgggcaacagaatgagactctgtcaaagaaagaaaagaaaagaaaatactcaatcagaggagacaaaaaagaatagaaaacaatgagaaaaatgaaacaaataacatgcaatgaagctccaatacatctggcagcagacttttcagtggaaaccttacagg

SEQ ID NO: 622186 - DNA, 599 bp, Homo sapiens
aattcagaattctatcagatacatttaacaaacaaattgacatatttaaaaagagtcaagcagaaattctggagcttgaaaatacaattggtatactgaagaatgcatcagagtcctttgacagtagaaatgcccgagcagatgaaagaattagtgagcttaaatacaggctatttgaaaatacacagtcaagcctggatgaagtggctcacacctgtaattccagcaatttgggagtccgaggcaggtagatcaggagtacatgatgagcctggccaacatggtgaaacctcatctctactgaaaatacaaaaattagctggacatggtggcacacacctgtaatcccagctactctggaggatgaggcgtggtaattgcttgaagccaggaggcagaggttgcagtgagctgagatcacgccactgcactcaagcctgggcaacagaatgagactctgtcaaagaaagaaaagaaaagaaaatactcaatcagaggagacaaaaaagaatagaaaacaatgagaaaaatgaaacaaataacatrcaatgaagctccaatacatctggcagcagacttttcagtggaaaccttacagg

SEQ ID NO: 622187 - DNA, 619 bp, Homo sapiens
tcagccaggcatggtggctcacacctgtaatcccagcactttgggaagcygaggtggacagatcacctgaggtcaggagtttgagaccagcctggccaacatggtgaaacccgtctctactaaaaatacaaaaattagccgggtgtggtggtgggcacctgtaatcccagctactcgggaggctgaggcaggagaattgcttgaacccaggaagcagaggttgcagtgcaactgcactccagcctgggtgacagagtgagactccatcttaaacaacaacaacaaaaaccagatctcatgagaactctatcgcaagaacagcatcaaatggggaaatcagccctgataatccaatcacttcccaccaggccccacctccaacagtgggtattataatttgacttgagatttgtagggggacacaaatctgaaccatattatatgccttgaagatggtatcagttataaaagaggtcttctaagaatattatgcaaaatgtccctgttatgggttgaattgtattcctccccccaaattcatatgtagatgtcttaacccctggtacctcagtatgtgactttattttgagataaatgcttcaccaagttataatgacat

SEQ ID NO: 622188 - DNA, 619 bp, Homo sapiens
tcagccaggcatggtggctcacacctgtaatcccagcactttgggaagctgaggtggacagatcacctgaggtcaggagtttgagaccagcctggccaacatggtgaaacccgtctctactaaaaatacaaaaattagccgggtgtggtggtgggcacctgtaatcccagctactcgggaggctgaggcaggagaattgcttgaacccaggaagcagaggttgcagtgcaactgcactccagcctgggtgacagagtgagactccatcttaaacaacaacaacaaaaaccagatctcatgagaactctatcrcaagaacagcatcaaatggggaaatcagccctgataatccaatcacttcccaccaggccccacctccaacagtgggtattataatttgacttgagatttgtagggggacacaaatctgaaccatattatatgccttgaagatggtatcagttataaaagaggtcttctaagaatattatgcaaaatgtccctgttatgggttgaattgtattcctccccccaaattcatatgtagatgtcttaacccctggtacctcagtatgtgactttattttgagataaatgcttcaccaagttataatgacat

SEQ ID NO: 622189 - DNA, 515 bp, Homo sapiens
tgccccacccttatctccctttgtttttgactcctttttcggactcagcacgcctgcacccaggtgattaaaaagctttattgctcacacaaagcctgtttggttgtttcttcacayagatgcgtgtgacactttagagactttctctaatttctactgataatgcatggtgatctcttttttgaaaaccagtttgtgggttaatagtttgactatatggaggactgtgagaaataaagagaaaatgtattttcttgtgattcagtattgctggtagctattttaacagttcatatttgtattttgtgtttctttaatttattggtgtgacaaataactcatttatactcatttatattgattttaatataccatgaataaagtatttatagtccaggcatttcattttctgtaatctcaatattcaaatgtttgtttgttcttagaaatagtttttatctttaatttagtagatcctaggtgatgtagatgagcatttacctagaaacacaaac

SEQ ID NO: 622190 - DNA, 435 bp, Homo sapiens
ttaaagaatattatgagcagattaattcctatayattaaacatttaagatgaaatggacaaatttccaccaaatgataatttatcagggatcttgagccccctcaccccagaaagacaatataaaagagcatttagagggtgaagagagaatttggaggaaaaactgtgaagaaatttctttggtgaaagctattgccctgtttgagttctaccttctaattctaaccccagtaagaaacatcttaggaaagcttcgaaattgatttcctgatgtggagaaaaatggagaactggtgcctgacccctatagtgtggatatttgtccccacccaaatctcatgttgaaatgtagtccccattggagcttggggctagtgggaggtgtttggatcatggggacagatccctcatgaattgcttgggccatatccttg

SEQ ID NO: 622191 - DNA, 368 bp, Homo sapiens
tattcctgaaactgtgaagtgaagcctgggtccctgacctggagggttagcccaccatgacacagtgggtgattatgatcatacccttttattcctgacagacctggttccaatcccaattcttcctatgtttgtagattcagaaaagtcatttaatctccttgagtcccggttaattcatctatgaaatggtactaagggcytaatgtgttcaaagtcttacattaaagcctggcatataacaggtgctcaatccatggtaattatcattatttgaagtcacttcaatatatggaaggatgaagcttttcccgtgatattttagtcaaagttcaattgtatatctgaaatcattaaaagttgcatca

SEQ ID NO: 622192 - DNA, 480 bp, Homo sapiens
cacacgaaagaaagaagaaagaaagagagagagagaaagaaagaaagaaagaaagaaagaaagaaagaaagaaagaaagaamgaaagaaagaaattaatttataaatcagcaaatagaatggaatctctgacctcaccccaaatctgtatttggtggaagctgaatgtaaataaacagatgaaccagaagaacaaggaagcaaacaacattcatgatcaggaaagagagtgaaatcaactagagtatccacagaatccagcctgtaacatcagcctcattagcacagccccaaggccggagaaattatgttttggggcatcaaggatgagataagaaacttgataatgaccatctgctgctgatgtcaggtttactttaagctaggtagcagaagccctggcaatgggctcacactcggatgtgttccatgtggtgtgagagtgtgtatgtgcgtttaaagtactgtgggtggtgcattt

SEQ ID NO: 622193 - DNA, 529 bp, Homo sapiens
aaaactatacgatcatgtcaattgatgctgaaaaagcatttgatacaattcaacatcacttcatgattaaaaaaaaactgggcatagaaggaacacacctcaacacaacaaaagccatatatgacagacccmcagctagtatcatattgaatgagaaaaactgaaagcctttcctctaagatctagaacatgacaaggatgctaattttcactactgttattcatcatattactacaagtcccagctagagcaatcacacaagagaaagaaaagccatccaagttagaaaggaataagtcaaattatctttgcttgcagatgatatgatcttatacttgaaaaaaatctagacttcacaaaaaaactattagaactgataaatttagtaaagttgccggatacaaaatcaacacacaaaaatcagtagcagttctacatgccaacagcaatcaatctgaaaaagaagtcaagaaagttatcctatttaagaaatgaaagagctctacaatgaaaactataaaacattga

SEQ ID NO: 622194 - DNA, 529 bp, Homo sapiens
aaaactatacgatcatgtcaattgatgctgaaaaagcatttgatacaattcaacatcacttcatgattaaaaaaaaactgggcatagaaggaacacacctcaacacaacaaaagccatatatgacagacccacagctagtatcatattgaatgagaaaaactgaaagcctttcctctaagatctagaacatgacaaggatgctrattttcactactgttattcatcatattactacaagtcccagctagagcaatcacacaagagaaagaaaagccatccaagttagaaaggaataagtcaaattatctttgcttgcagatgatatgatcttatacttgaaaaaaatctagacttcacaaaaaaactattagaactgataaatttagtaaagttgccggatacaaaatcaacacacaaaaatcagtagcagttctacatgccaacagcaatcaatctgaaaaagaagtcaagaaagttatcctatttaagaaatgaaagagctctacaatgaaaactataaaacattga

SEQ ID NO: 622195 - DNA, 529 bp, Homo sapiens
aaaactatacgatcatgtcaattgatgctgaaaaagcatttgatacaattcaacatcacttcatgattaaaaaaaaactgggcatagaaggaacacacctcaacacaacaaaagccatatatgacagacccacagctagtatcatattgaatgagaaaaactgaaagcctttcctctaagatctagaacatgacaaggatgctaattttcactactgttattcatcatattactacaagtcccagctagarcaatcacacaagagaaagaaaagccatccaagttagaaaggaataagtcaaattatctttgcttgcagatgatatgatcttatacttgaaaaaaatctagacttcacaaaaaaactattagaactgataaatttagtaaagttgccggatacaaaatcaacacacaaaaatcagtagcagttctacatgccaacagcaatcaatctgaaaaagaagtcaagaaagttatcctatttaagaaatgaaagagctctacaatgaaaactataaaacattga

SEQ ID NO: 622196 - DNA, 529 bp, Homo sapiens
aaaactatacgatcatgtcaattgatgctgaaaaagcatttgatacaattcaacatcacttcatgattaaaaaaaaactgggcatagaaggaacacacctcaacacaacaaaagccatatatgacagacccacagctagtatcatattgaatgagaaaaactgaaagcctttcctctaagatctagaacatgacaaggatgctaattttcactactgttattcatcatattactacaagtcccagctagagcaatcacacaagagaaagaaaagccatccaagttagaaaggaataagtcaaattatctttgcttgcagatgatatgatcttatacttgaaaaaaatctagacttcacaaaaaaactattagaactgataaatttagtaaagttgccrgatacaaaatcaacacacaaaaatcagtagcagttctacatgccaacagcaatcaatctgaaaaagaagtcaagaaagttatcctatttaagaaatgaaagagctctacaatgaaaactataaaacattga

SEQ ID NO: 622197 - DNA, 587 bp, Homo sapiens
ccagggtttatctagaaatgacatctgggagctagggcctgaagtgggggcctcaggactctgcctggtaccctgttttattgtgactgagctggtttccaagtggcaagacaaagtcctstttcctcttccctctctcccctcaagtggaaagaagaaatctgtctcggagctgtgaggtacactatctgggttgggggaagggtagcacaagcactcccttggctgccccagctgctgtctcactaggctgtgtgccctccaagtccactggctctgagcccagcacagcaccatgatttgtccaagaattgcagtccttgtggtctagagtgcctttcaagtttatttaggatgccagggcactttagcccactgagttccctgttggaactcaggttctgactgctatgatgggcagttcccctcttgctagggctggtctaaatgcttcctctttgggcgccagctgagttctgcctggtgttgctttctgtgacaggacagcactaagttccaatgcaaagtccagcaatcactgtgctttccctcccacaagtgcaaagattctgtctctgcaacacatg

SEQ ID NO: 622198 - DNA, 587 bp, Homo sapiens
ccagggtttatctagaaatgacatctgggagctagggcctgaagtgggggcctcaggactctgcctggtaccctgttttattgtgactgagctggtttccaagtggcaagacaaagtcctgtttcctcttccctctctcccctcaagtggaaagaagaaatctgtctcggagctgtgaggtacactatctgggttgggggaagggtagcacaagcactcccttggctgccccagctgctgtctcactaggctgtgtgccctccaagtccactggctctgagcccagcacagcaccatgatttgtccaagaattgcagtccttgtggtctagagtgcctttcaagtttatttaggatgccagggcactttagcccactgagttccctgttggaactcaggttctgactgctrtgatgggcagttcccctcttgctagggctggtctaaatgcttcctctttgggcgccagctgagttctgcctggtgttgctttctgtgacaggacagcactaagttccaatgcaaagtccagcaatcactgtgctttccctcccacaagtgcaaagattctgtctctgcaacacatg

SEQ ID NO: 622199 - DNA, 565 bp, Homo sapiens
ctaacctggttattctagttagcaattcctctaaccttttttcaaggttcttagcttccttrcattgggttagaacatcctcctttagcttggaggagtgatgagtttgttattacccaccttctgaagcctacttctgtcaatttgtcaaactcattctctgtccagttttgttcccttgctggcgaggagttgtgaccctttggagaagaggcattctggtttttggaattttcagcctttttgcactgctttttcatcatctttgtgcattcatctacctttggtctttgatgttggtgactttcagatgggctttctgtgtggacatcatttttgttgatgttgatgctgttcctttctggttgttagttttccttctaacaggcccctctgccacaggtctgctggagttttctggaggccctcttcagacccttttggcctgggtgtcaccagtggaggctgcagaacagcaaaggttgctgcctgttccttcctctggaagcttcatcccagaggggcaccctccagatgccagctggagctctcctgtatgaggtgt

SEQ ID NO: 622200 - DNA, 550 bp, Homo sapiens
agcctcggtaaacaggcccggctgcagccggactcacccggctcgcttgtgccgaggaagccaggtcggaggaagggttccttggcatttccagcagcagcgctctcttactcaattaggccctttctgtccaaagggcagctgtgacgtgtggaacaggtctgtggtgtcaatatgaacccagcattgtacagctggggacatacaatgccctcggtcgactgtttatttataaatccacccagtgctcactgcggcctttacactcagctctttcccaaaatgcaaattggcttcttcctgtaagtcaaaccgacttgctcgagctgataaaaatcatcccaaacgggctcttttatctccccaatacacaaagtcctctgcacccacacctcctagaaagaggaagactgtctgtctgcagagtgcctgcggcagggatggcccagagagaggccctgaagaggcacgcaagggcatgggagggtgtgcatagrgtagtgggagccaggatctaaactcacaggcctgcattcaaatcctgcctaaa

SEQ ID NO: 622201 - DNA, 548 bp, Homo sapiens
taaggacactcccatctgacctacagtcagtcggtctgggatggtgacagtgcagcctacgatggcacagagctatatcctgccctgttttttttcatatgaacaatttgaagcttgaatgttttcctctaaatgcagttctgtctttatttcaaaaaagttgattgtgctttggttgatgccattttaaaattcgtgaagggagcaataactcatgcctttaaccccaacactttgggaggccaaagtgggaggatcatttcagcccaggggtttgagaccaacctgggcaacatgacaaaagccctcctctacacaacgtttttttttttttgagggtggggatggagtctcactgtgttgcccagactggagtgcagtggcacgatctcaaatcactgcaacctttacctcccgggttcaagcaattytcatgcctcagtctccatcctcagaagctggtgtcacagacatctgaaaccatgcctggctaatttttgtatttttagtagaggtggggtttcaccatgctggccaggttggtctcg

SEQ ID NO: 622202 - DNA, 538 bp, Homo sapiens
ggaccggggaggctgcaggaatttgtttatcttgggctgggggtgcatgggaagtaggtagggctcctgtgaccacaaacccaaggcctctgggatcagaaggcaacaacaagggccaggacctaccccggggcctgtgcttgcagggaccctggctctcatttgtatgtggggtgcctgagtgatttcagattcctcacccatccccrttggctcttctaggggagatgcatctataacacctgtaggtgaccctgtgtaggaaaagattgcagaacccacacgggcccatgctgagtgaggctttctccaggtgggcacaaaaacccctagctcccccagccactgccagagcttggggttgggggccttacatggaggcaaatgcagggagcattggcaaaggcaggggtgagtgaaaggagaagaagagcacatggaaaagacacaggggtatctgacagttccagggccagaggcacttgggagtgggagaggcatgactgggagataggtccagggctttttctgagccctg

SEQ ID NO: 622203 - DNA, 543 bp, Homo sapiens
ggctgcaggaatttgtttatcttgggctgggggtgcatgggaagtaggtagggctcctgtgaccacaaacccaaggcctctgggatcagaaggcaacaacaagggccaggacctaccccggggcctgtgcttgcagggaccctggctctcatttgtatgtggggtgcctgagtgatttcagattcctcacccatccccgttggctcttctaggggagatgcawctataacacctgtaggtgaccctgtgtaggaaaagattgcagaacccacacgggcccatgctgagtgaggctttctccaggtgggcacaaaaacccctagctcccccagccactgccagagcttggggttgggggccttacatggaggcaaatgcagggagcattggcaaaggcaggggtgagtgaaaggagaagaagagcacatggaaaagacacaggggtatctgacagttccagggccagaggcacttgggagtgggagaggcatgactgggagataggtccagggctttttctgagccctgaggccccagcaggtt

SEQ ID NO: 622204 - DNA, 487 bp, Homo sapiens
gtgagagagggagagagagaaagagagagagaatgagagaagggaggcagggaaagaagacaagaaagaaaaaagggagagagagggggaaagaaagaaagaagggaggcagagagggaaagaaggaaagaagaaagagagagaaagagaaagcaagcttaaataatgaaaagaaaacaaatagaacctgttctagggatgccccatgaatgttcccaacaagcttatttgtaggaactgaaaatgtgggcatgtaggcttgtgacattcccattcccattgttttagaaccttgagtaattagtagtttcccccaatggtaggaggggttcmctttcaggttcctccacactcactagtcactggatggagcactggatagaaaggaagggctcgtggtggccctgcttcctcactgcttcggagacgctcatgctgatgcagcagaggcagaatgctggcttaatggccactgagtacagagtag

SEQ ID NO: 622205 - DNA, 519 bp, Homo sapiens
attctttcaggttctgcatgtcagtgaawctgctgatgccagctgatctgaagggccatgcaatgcaccaactcaccaaagaatgcagtttctacatcctgttgacttcttccctcttaccactaccccaactttccggcctcttgctatccaggatccactggaaaccttcagtactccttggggagatgaatttgaggatctcctcctagcttctcattcagccaccttgtgatcattaaactctctgctgcaaaccctgctgtctcagaatattgctaagctactgtgcagcaggcataggaacctgatggtcctgtaataaagtcatgtcaaaattacaaatggaagtgagggtggagctggtcagggttgagctgggtttttaatggaacctgggagtgaagcaagacttgctgaacatgttgggggttatttgagtgggtgtaagaggaatctatgctaaccttgcactgatgcccttttggttttaatccttatgaccaagtctgattcttt

SEQ ID NO: 622206 - DNA, 519 bp, Homo sapiens
attctttcaggttctgcatgtcagtgaaactrctgatgccagctgatctgaagggccatgcaatgcaccaactcaccaaagaatgcagtttctacatcctgttgacttcttccctcttaccactaccccaactttccggcctcttgctatccaggatccactggaaaccttcagtactccttggggagatgaatttgaggatctcctcctagcttctcattcagccaccttgtgatcattaaactctctgctgcaaaccctgctgtctcagaatattgctaagctactgtgcagcaggcataggaacctgatggtcctgtaataaagtcatgtcaaaattacaaatggaagtgagggtggagctggtcagggttgagctgggtttttaatggaacctgggagtgaagcaagacttgctgaacatgttgggggttatttgagtgggtgtaagaggaatctatgctaaccttgcactgatgcccttttggttttaatccttatgaccaagtctgattcttt

SEQ ID NO: 622207 - DNA, 519 bp, Homo sapiens
attctttcaggttctgcatgtcagtgaaactgctgatgccagctgatctgaagggccatgcaatgcaccaactcaccaaagaatgcagtttctacatcctgttgacttcttccctcttaccactaccccaactttccggccycttgctatccaggatccactggaaaccttcagtactccttggggagatgaatttgaggatctcctcctagcttctcattcagccaccttgtgatcattaaactctctgctgcaaaccctgctgtctcagaatattgctaagctactgtgcagcaggcataggaacctgatggtcctgtaataaagtcatgtcaaaattacaaatggaagtgagggtggagctggtcagggttgagctgggtttttaatggaacctgggagtgaagcaagacttgctgaacatgttgggggttatttgagtgggtgtaagaggaatctatgctaaccttgcactgatgcccttttggttttaatccttatgaccaagtctgattcttt

SEQ ID NO: 622208 - DNA, 519 bp, Homo sapiens
attctttcaggttctgcatgtcagtgaaactgctgatgccagctgatctgaagggccatgcaatgcaccaactcaccaaagaatgcagtttctacatcctgttgacttcttccctcttaccactaccccaactttccggcctcttgctatccaggatccactggaaaccytcagtactccttggggagatgaatttgaggatctcctcctagcttctcattcagccaccttgtgatcattaaactctctgctgcaaaccctgctgtctcagaatattgctaagctactgtgcagcaggcataggaacctgatggtcctgtaataaagtcatgtcaaaattacaaatggaagtgagggtggagctggtcagggttgagctgggtttttaatggaacctgggagtgaagcaagacttgctgaacatgttgggggttatttgagtgggtgtaagaggaatctatgctaaccttgcactgatgcccttttggttttaatccttatgaccaagtctgattcttt

SEQ ID NO: 622209 - DNA, 561 bp, Homo sapiens
agatttcaccactgtactccaacttggtgacagagcgagactccatctcaaaacaaacaaacaaggaaacaaacacaaatgaacaaacaaaggaaaaagctggaaaaataaattctgaaagaatttccatctctaggaattcatcttcagaagtgatagcatttcctgcttgggcatttttcgcctacattttgggcataagatctatcaacaaaaaagtatgaacccaggtttgtgtaatggaatatcttaaacatcaataggaggagtcaatagttctgatgccacacacacatatatggtcttctccatcatcagaaaatggcaacaaagtggtagagttatgcagartgtagcatttgaaatggagatttgaaggtgacaaggaaaggattttgtaagacattagtgtacaagttgagcaatgttggttcctgtcacagtatttttagttatttttttatttattttattcatttattttttgagatggagtctcactgtgtcaccaggctggaatgcagtggcacgatctcagctcatttcaacctctgcctcccc

SEQ ID NO: 622210 - DNA, 561 bp, Homo sapiens
agatttcaccactgtactccaacttggtgacagagcgagactccatctcaaaacaaacaaacaaggaaacaaacacaaatgaacaaacaaaggaaaaagctggaaaaataaattctgaaagaatttccatctctaggaattcatcttcagaagtgatagcatttcctgcttgggcatttttcgcctacattttgggcataagatctatcaacaaaaaagtatgaacccaggtttgtgtaatggaatatcttaaacatcaataggaggagtcaatagttctgatgccacacacacatatatggtcttctccatcatcagaaaatggcaacaaagtggtagagttatgcagagtgtagcatttgaaatggagatttgaaggtgacaaggaaaggattttgtaagacattagtgtacaagttgagcaatgttggttcctgtcacagtatttttakttatttttttatttattttattcatttattttttgagatggagtctcactgtgtcaccaggctggaatgcagtggcacgatctcagctcatttcaacctctgcctcccc

SEQ ID NO: 622211 - DNA, 474 bp, Homo sapiens
cagaaattcccatcaacatcccrcaaatccagcacttgaagtttccacctcctgtgagtaacacaggggaaaagctcagaatgtaggcaaggacccacccctgacctgagctttcactccacatccaggacatcagtcagctgctcctgtcctcagtgctcctccttctgtctcttctccatcccgctcccccttgggttctgcctggttctcacttctagaatctttacgttccactgggagaaagcaggttcctgtttcctcagtggaccctgtatggtgagcagtcctttcccagaggatctgggcaatggtcaaggcctctcatgggcaccatcagaagcctctgagccaccctagctccccaaccccaccactcctcatgagccagctgtcccttccctggatgcctggacccttcccaccaggccacctgagtcacctcacctgaggcaaaccttctgggccagcagt

SEQ ID NO: 622212 - DNA, 665 bp, Homo sapiens
gcagccatgggatgctgtatatgcactgaccaaaatgttcacagacccacctgggctgtgacagcatccgggctcgaccacaaccacaccccaaaattagggcaggygccatgagagaccaggcagtgggaacagacaccctgaagctgaaggagaagtggggatctcctgggccctcaagagcactgggggacctcagttggtaactgtgacctgggcagattcagttgcacctttggagctgctgccctgccaactcgagaggaccaggactccctcttgtcccaggctcccatcagctccgaagtatacgcagccttggctgtgccctctctctgtgtttccccacagagaggacaggtgagatgcaggttcacagcagctctgaccaaccccgcacaaacaaacccaatgctcctgggtgtggtttaaccagccccaactgcactatcatccaggagcttgcaggctaacagcaggcagtgggcagtgaggtagaggctgtggtggagactccagacctgggtccaggttccattttgccatgagagggtgtgggtggcacagctggctgcctcagggacatggagcacaggcctggctcatgaccctgccaaggggggggcctccaggagtggttcgtggttcccaggcccagcaatcag

SEQ ID NO: 622213 - DNA, 665 bp, Homo sapiens
gcagccatgggatgctgtatatgcactgaccaaaatgttcacagacccacctgggctgtgacagcatccgggctcgaccacaaccacaccccaaaattagggcaggtgccatgagagaccaggcagtgggaacagacaccctgaagctgaaggagaagtggggatctcctgggccctcaagagcactgggggacctcagttggtaactgtgacctgggcagattcagttgcacctttggagctgctgccctgccaactcgagaggaccaggactccctcttgtcccaggctcccatcagctccgaagtrtacgcagccttggctgtgccctctctctgtgtttccccacagagaggacaggtgagatgcaggttcacagcagctctgaccaaccccgcacaaacaaacccaatgctcctgggtgtggtttaaccagccccaactgcactatcatccaggagcttgcaggctaacagcaggcagtgggcagtgaggtagaggctgtggtggagactccagacctgggtccaggttccattttgccatgagagggtgtgggtggcacagctggctgcctcagggacatggagcacaggcctggctcatgaccctgccaaggggggggcctccaggagtggttcgtggttcccaggcccagcaatcag

SEQ ID NO: 622214 - DNA, 575 bp, Homo sapiens
ggaatatatacttgaaatttgtatgtgtatttatattaatccacatatatgctatagtgtagggtgctacagaagagggcctgacaattaattgtccagtcctagacactttggagagtgaatggacatgcctgttataattaattatttttttttgggagatggagtctcactccgtcgccaggctggagagcaatagtgccatcttgggtcactgcaaactctgcctcctggattcaagtgattctcctscctcagcctaccgagtacctgggattacaggtgtccaccaccatgcccagctattttttgtattttaatagagagatagttttgccactttggtgaggctggtctcgaactcctgacctcaggtgatccgcccactactcctgtgatccgcccaccttatcctggcgaagtgctgggattacagacgtgagccactccaccgggccttgttataattaagattttcagaacaacaggggtgtatgaaggcttataatcacctttaccatagaccttggtctctcacctaagtttgtaactaatatatttttcaaatataataa

SEQ ID NO: 622215 - DNA, 575 bp, Homo sapiens
ggaatatatacttgaaatttgtatgtgtatttatattaatccacatatatgctatagtgtagggtgctacagaagagggcctgacaattaattgtccagtcctagacactttggagagtgaatggacatgcctgttataattaattatttttttttgggagatggagtctcactccgtcgccaggctggagagcaatagtgccatcttgggtcactgcaaactctgcctcctggattcaagtgattctcctgcctcagcctacckagtacctgggattacaggtgtccaccaccatgcccagctattttttgtattttaatagagagatagttttgccactttggtgaggctggtctcgaactcctgacctcaggtgatccgcccactactcctgtgatccgcccaccttatcctggcgaagtgctgggattacagacgtgagccactccaccgggccttgttataattaagattttcagaacaacaggggtgtatgaaggcttataatcacctttaccatagaccttggtctctcacctaagtttgtaactaatatatttttcaaatataataa

SEQ ID NO: 622216 - DNA, 278 bp, Homo sapiens
tgcctggcctgagctgctgctcccagctcaccaccttctactttggcagcaattgcatgtctattgacgccctgaaggacctgctgcgccacaccagtgggctgagcaagttaagcctggagacgtatcctgcccctgaggagagtttgaattccttggttcgtgtcaattgggagatcttcaccccacttcgggctgagctgatgtgtacactgagggaaktcaggcagcccaagaggatcttcattggccccaccccctgcccttcctgtggctca

SEQ ID NO: 622217 - DNA, 214 bp, Homo sapiens
cctagccctccacaccccgagaggccctgatgtgtartgttcccctacctgtgaccatgagttctcattgttcaactcccacttatgtggtgttttggtttactgttcctgtgttagtttgctgagaatgatggtttctagcttcatccatgtccctgcaaaggaaatgaacttattttttatgactgcatagtattccatgatgtatatgtgc

SEQ ID NO: 622218 - DNA, 548 bp, Homo sapiens
tgtattgatcttactgtatgccagaccccatgccaagccctaaacatgaaccatctcattggatcctaccaaggtcccataagctgttggacatcatcatcctcattttacaggaagctgaggctctaggctaacatccctgacagcaacaccagcccctgagtactcagcaggatccttcacttgggtgcccattatgcagaattcctcagcacagggaaggtcactcatcacccacaggcccttgatcgttatccaccctttgatgctgtcagattccagaacacgctgcactagtctcttccttcatagggagagaggggaggtgttatgagaaaatctctcatcaatctgacctagctccccmaaaagatgtaacttttaaaatgtcagatggaaatatttaaaaagtgttacatgcctgtatagttttagtattttacttaaagggaatgtggctgtctttactggctacaaccagtttaattcaagaagggctgctggtcatcaggagaacaagcaagggttgatgctgcccagagtctcca

SEQ ID NO: 622219 - DNA, 263 bp, Homo sapiens
gctgctcccagctcaccaccttctactttggcagaaattgcatgtctacggacaccctgaaggacctgctgcgccacaccagtgggctgagcaagttaagcctggagacgtatcctgcccctgaggagagtttgaattccttggttcgtgtcrattgggagatcttcgccccacttcgggctgagctgatgtgtacactgagggaagtcaggcagcccaagaggatcttcactggtcccactccctgcccttcctgtggctca

SEQ ID NO: 622220 - DNA, 263 bp, Homo sapiens
gctgctcccagctcaccaccttctactttggcagaaattgcatgtctacggacaccctgaaggacctgctgcgccacaccagtgggctgagcaagttaagcctggagacgtatcctgcccctgaggagagtttgaattccttggttcgtgtcgattgggagatcttcrccccacttcgggctgagctgatgtgtacactgagggaagtcaggcagcccaagaggatcttcactggtcccactccctgcccttcctgtggctca

SEQ ID NO: 622221 - DNA, 544 bp, Homo sapiens
accatgttggacaggctggcctccaactcttgacctcagcctcccaatgggctgggattacattgtgagccaccgtgcccggcccagttctcacttttcatggtgcctttcagtgccattagaggagaggttcctgttacctctatggaccttgcctggtgagcastgctttccctgaggagctggtgaatggccaagtcctctcggcttcctcaccaccaccatcccccttgggcctcctcacttcacatgacccagctgttccttcagttggacacctgggccctccccaccagcccacctgggccacctcacctgggacgaaccccttgggtaagcagtgcatccagcccatcgagcacagcttggaaggcctccagacaaggcatctttatcagaggcctcagagggaggcggcggaagggccaggcctgcaccatcagcttcagggcctcacagcgtctcctgctgaaggcctccatgaacagtggggggaaaagttccgtgggcagctcctccagggtggagacggccaaggcttggt

SEQ ID NO: 622222 - DNA, 544 bp, Homo sapiens
accatgttggacaggctggcctccaactcttgacctcagcctcccaatgggctgggattacattgtgagccaccgtgcccggcccagttctcacttttcatggtgcctttcagtgccattagaggagaggttcctgttacctctatggaccttgcctggtgagcactgctttccctgaggagctggtgaatggccaagtcctctcggcttcctcaccaccaccatcccccttgggcctcctcacttcacatgacccagctgttccttcagttggacacctgggccctccccaccagcccacctgggccacctcacctgggacgaaccccttgggtaagcagtgcatcmagcccatcgagcacagcttggaaggcctccagacaaggcatctttatcagaggcctcagagggaggcggcggaagggccaggcctgcaccatcagcttcagggcctcacagcgtctcctgctgaaggcctccatgaacagtggggggaaaagttccgtgggcagctcctccagggtggagacggccaaggcttggt

SEQ ID NO: 622223 - DNA, 608 bp, Homo sapiens
gaattccctttatttccttcwcctgcctgattgctctggccagaacttccaacactatgttgaataggagtggtgagagagggcatccctgttttgtgccagttttcaaagggaatgcttccagtttttgtccattcagtatgatattggctgtgggtttgtcatagatagctcttattattttgagatgcgtcccatcaatacctaatttattgagagtttttagcatgaaggttgttgaattttgtcaaaagccttttctgcatctattgagataatcatgcggtttttgtctttggttctgtttatatgctggattatgtttattgattttcgtatgttgaaccagccttgcatcccagggatgaagcccacttgatcatggtggataagctttttgatgtgttgctggattcagtttgccagtattttattgaggatttttgcatcaatgttcatcaaggatattggtctaaaattctctttttttgttgtgtctctgccaggctttggtatcaggatgatgctggcctcataaaatgagttatggaggattccctctttttctattaagtggaatagtttcagaaggaacggtaccagctcct

SEQ ID NO: 622224 - DNA, 608 bp, Homo sapiens
gaattccctttatttccttctcctgcctgattgctctggccagaacttccaacactatgttgaataggagtggtgagagagggcatccctgtyttgtgccagttttcaaagggaatgcttccagtttttgtccattcagtatgatattggctgtgggtttgtcatagatagctcttattattttgagatgcgtcccatcaatacctaatttattgagagtttttagcatgaaggttgttgaattttgtcaaaagccttttctgcatctattgagataatcatgcggtttttgtctttggttctgtttatatgctggattatgtttattgattttcgtatgttgaaccagccttgcatcccagggatgaagcccacttgatcatggtggataagctttttgatgtgttgctggattcagtttgccagtattttattgaggatttttgcatcaatgttcatcaaggatattggtctaaaattctctttttttgttgtgtctctgccaggctttggtatcaggatgatgctggcctcataaaatgagttatggaggattccctctttttctattaagtggaatagtttcagaaggaacggtaccagctcct

SEQ ID NO: 622225 - DNA, 610 bp, Homo sapiens
gaattcaagaccagcctgggcaacatggcaatacctcatctctattaaaaaaaaaattattaagaaagaaaggggccaggtgcggtggctcacgcctgttaccccagcactttgggaggctgaggcgggyggatcacaaggtcgagggattgagaccatcctggccaaccaacatggtgaaaccctgtctttactaaaaatacaaaaataagctgggtgtagtgttgcatgccttttagtcccagctacttgggaggctgaggtaggagaatcgcttgaacccggcaggcagagattgcagtgagccgggattgtgccactgcactccagcccgggcgacagagcgagactccgtctcaaaaaaaaaaaaaaagaaagataatggatttggttctgccattagatctgggttggatcctgggtctgctatggtttctgtatccttagtccagtttcttaatttcttgagtcgtcagttgctccgtttataaaatggtgttcagtgatacctgtgtttttagcttctcaggcttgttgtgaggtgaacatataatgtttcatgtaaagcaccttttagatggtaaagcgctatgcagaactgttcttaact

SEQ ID NO: 622226 - DNA, 526 bp, Homo sapiens
gaaccctggtgttcctggtctttgcaaggacttaagtctacatgtaacagcttttctcctggttatgaccctgaaacaaagaacaccatgctgtcatcttctgaggagagatgggagtccaggccccattctctcacttactacctatattaaagaagctgaagaaagctgaagaaaccactctctcctgtgaaatgccattggaactctgcttaggaagaggacaactttgcaaaaatatcctgcaaacctgcttataatagatgaaccttgagggcaggggtcaaaatatcagaggacagggatgaactagaactactctgtctgaaaagagaagaggtggtttcatttttctttttcttttcttttctttctttctttctttcttttcttttttttttttttgagacagcatctccctttgttgcccaagctggaatgcagtggtgtgatcactgtgggctcaacctcttgggctcaagcgatcctttcaygtcagcctcctgagtagctgggactacaggta

SEQ ID NO: 622227 - DNA, 449 bp, Homo sapiens
tcccttcacctacaggggaaggggtgcctcctcctgccctcattgctcagaaaggtgtattgttgcgtgtcagggagttgtgatgaattataggtaggtggacagcaacayaaaaatctgaaagagtaacttattttatgttttctctgaaatttttctgttgttttggtttgaagaaggaaagaacttatctaatcctatttcgtatatgcaaatatcaaaaggaaggtgtaatgatgatgatgaggcaagccctgagtaaaactgagttaaacacaattatttccattcttctaacccttcccagagcttccctctcccttctcacagcccctcccttctctgatgaaactactaggcaaggaaactgattccttctgaagtcttagcgactatgttctcaaccagagaaaaatgttgattgtaagaaaacaaaactacacagagta

SEQ ID NO: 622228 - DNA, 465 bp, Homo sapiens
gctcaagataagttgaccattaaatggtagagacagtctgaccccatagccctcacttatgtatggagatamaaaacgcatccctttcccactgataagaaatgaagcaccacatttacaaccctgaacaaaactcacagcaaatggggaagtgatccaattattgataaaaacatattggccattataatatcttctactgaaaatactttcttcctctctcatgaatttgtgagaatttaagttgtgattcactttcagctcagtcttagaatttattcattgcattatagaatagttgttttccaacatttttgagtatgacataccatatgaaatacattttatattataaccaaatagttacacatatgtatttggaaaattgaaattaatgtagatgaaataatatttacattgacaatatgcaattgcaatatgcaatgaaattgggtattttctatt

SEQ ID NO: 622229 - DNA, 465 bp, Homo sapiens
gctcaagataagttgaccattaaatggtagagacagtctgaccccatagccctcacttatgtatggagataaaaaamgcatccctttcccactgataagaaatgaagcaccacatttacaaccctgaacaaaactcacagcaaatggggaagtgatccaattattgataaaaacatattggccattataatatcttctactgaaaatactttcttcctctctcatgaatttgtgagaatttaagttgtgattcactttcagctcagtcttagaatttattcattgcattatagaatagttgttttccaacatttttgagtatgacataccatatgaaatacattttatattataaccaaatagttacacatatgtatttggaaaattgaaattaatgtagatgaaataatatttacattgacaatatgcaattgcaatatgcaatgaaattgggtattttctatt

SEQ ID NO: 622230 - DNA, 634 bp, Homo sapiens
tgaaattgggtattttctattcaatctattcttttcttttaaatgctgattatatcccactaaattgatttcacaacctactaatgagtcataacctgcagtttaaaaaaacactgccacagaagattaaagaaaattatgattgctctaagaaattaacatttctaatcaccatcatgaacattatctatgcagcagttgatgctaatgggaatttatgccattaaaagattatgatgtgtcaactctattttgcgaaggctttgaaatgctctcagwtgctgacccatttgatttgtaaaggctatcaagcacagtacttttgctggcttcttcggaggccaagagcctacttatattggtttcaaactcttaagtttattaaattattcttcctactttttttgaattatgcgtgggcatgtaacatggtttaacaccaaattgttacatttagtttgcaattatctaatgcatgtagaaactttgtgcaatccagtttttattctgcggaatctgagaaatttctgagagaaccagaagttaggaagaggagaaagccaggaaatgacccattggtccctagatccagaggccacaagaaaggacaggaaatcaggtgaccatggggaaa

SEQ ID NO: 622231 - DNA, 571 bp, Homo sapiens
tgacccatttgatttgtaaaggctatcaagcacagtacttttgctggcttcttcggaggccaagagcctacttatattggtttcaaactcttaagtttattaaattattcttcctactttttttgaattatgcgtgggcatgtaacatggtttaacaccaaattgttacatttagtttgcaattatctaatgcatgtagaaactttgtgcaatccagtttttattctgcggaatctgagaaatttctgagagaaccagaagttaggaagaggagaaagccaggaaatgacccattggtccctagatccagaggccacaagaaaggacaggaaaycaggtgaccatggggaaaagatttctttgctgctccttgtttctgatcctgttgggtttgatttttccttgggatctgcatattctgtattagaggatactatttatattatacagacttatccagtgtctgtccaaaaatgaagaaagagagagacaaaaagagctcatgcctgtaacagcaacactttgggaggttgaggcgggagtagcacttgagcccaggaggttatggctg

SEQ ID NO: 622232 - DNA, 256 bp, Homo sapiens
taactgttcttggtttgcttccctcaattgactctaccaaaaataaaaatttgagagattggccatcaggtgggatatgtatgcatccacaggaggcagcccagcagcytgaaactcggtttctgtgcctggaatcacagcactcaccggcaagccttatcttactccttcctttcccctagagagtttctgcctgggatggagcccctgtcttcattcagtgctggtggattgctaacatggaaagatttgtcag

SEQ ID NO: 622233 - DNA, 620 bp, Homo sapiens
ttccctttattacttgttattatagttttctatattggttattatatgttttatagcttaatggtcccaaagttttgcatcagtttgatgctagtttcatatagttcattgaagtttgcattagcctcttattctttgatagctcaaatagcattggataaaattctttcaaagaacaatctagcttgaacacttatttttgaggtggttctttgacaatttttatcatttcccatcacagctaataatctttttgctcttctaagtttttttaaaaatagatcttggtaatttgtatttttttagaaaatttttcatgcaccaacaattgtatgttatcaagcttgaaatgacatattcaattctgtagttccattggaattgtttcacttattcttacatctgtgggtatatcctattttayatatataatgttatatattttggggtttttatttttgtcatttttactactactagagacatatacgtattattgttcttttctaagaatcaggtatcagaatgctcagttttgtttcatcttattctaattcactaagtcttgtccttattttcgttatgtttcctacgtttttctaggaagtttttgttgttac

SEQ ID NO: 622234 - DNA, 529 bp, Homo sapiens
cagggctgcctcctctgactgtggcgacaaacaaccccagggtctctctcccccatataaacccatcattttgtaagctcagggctgcctcctctgactgtggcagagcagcccagcaggttaataaactttcttgcctgaccttgggtctctctctctcttgtcctttctctcrgctaaccttacagatctaacagaaatatacagaacagtctacacaccactgcacacacattcttctcatgtgcacatgagacattttccaggatagattatatgttaggccaaaagtaagtctcaatagacttaaaaagataaagatcatataaagtatcttctcctaccataatggaatgaagttagaagtcactaatagaagtaaaagtggaaaatgcacaaatttgtggagattaaacaacgcattcttaaacaaccaatgaatcaaagaaaacattagaagagaaattaaaaaatacttagagaagaatgaaaatgaaaacacaatatacccaaacttgtgtaatgtaga

SEQ ID NO: 622235 - DNA, 532 bp, Homo sapiens
aagagttcgaggccacagtgagctgagatcatgccactacactccagtctgggtgaygtcatctctatttaaaaacacaaaaattaattaatggaagccttggtgaatggatgggtcgctgacatctctgcaggtgtgtgtgtgataagaccacgcatggtgaattctcaggacatagcaggtgttcaggagatgatggttcaggccactatcctcctcgctcatgtgactctcaggagccagggtgcctcagagctcacaggggacagagctgaatggggggacacttcgccttccactttctcatctgtgatgtgggcaaataggaggtttcttccagctaggacggcgtttgggtcccgagccctctgtctctcatgctgctgcctaaactcaggacacccgcggtacggtggttatgcacatgggttcttgggactggcacgcctgggtctggaactcagctccctcctgtacccaccatgaatgcttggaatggtccctgcccctcactgagcttcagggtccccat

SEQ ID NO: 622236 - DNA, 532 bp, Homo sapiens
aagagttcgaggccacagtgagctgagatcatgccactacactccagtctgggtgatgtcatctctatttaaaaacacaaaaattaattaatggaagccttggtgaatggatgggtcgctgacatctctgcaggtgtgtgtgtgataagaccacgcatggtgaattctcaggacatagcaggtgttcaggagatgatggttcaggccactatcctcctcgctcatgtgactctcaggagccagggtgcctcagagctcacaggggacagagctgaatggggggacacttcgccttccactttctcatctgtgatgtgggcaaataggaggtttcttccagctaggacggcgtttgggtcccgagccctctgtctctcatgctgctgcctaaactcaggacacccgcggtacggtggttatgcacatgggttcttgggactggcacgcctgggtctggaactcagctccctcctgtacccaccatgaatgcttrgaatggtccctgcccctcactgagcttcagggtccccat

SEQ ID NO: 622237 - DNA, 623 bp, Homo sapiens
ctacctcatattcccatgaattaggtaaagcaaccaaagtttagagcagaccagaccacacagccagcgagggcagactggacttcagttgtacaaacagtagtgcaagtgtcgagtgaatgagacagasagtggatgccagagccatcacatgggagatcagtttctgcgggggtgtgaagtggtggtgaatagaaggagagataaacagcactggtcagggaggacttcctggaggaagggggcattgaccaacacagaacatctggcaggaccagtatcctcctgaatttccatggaggtggaggaaaggagaacccttcttttctctcctcctgggctctctcgtgcagttggagtcaacagagtagccactggccccccaactttgagtaaaaccccatcccccagcagggcaagaggggcagaagcagccagcagcctcccatcaagccttgacaggagttgtcaccagtgcagagccagcggagtgtggtggggccctgtctggccccagccccactgtttacctgtctgggttgttgctggaaccattcatctcagtgaaggatgacatggcctccctcctccctcctcctgctcagctcctccactgggcatcc

SEQ ID NO: 622238 - DNA, 623 bp, Homo sapiens
ctacctcatattcccatgaattaggtaaagcaaccaaagtttagagcagaccagaccacacagccagcgagggcagactggacttcagttgtacaaacagtagtgcaagtgtcgagtgaatgagacagacagtggatgccagagccatcacatgggagatcagtttctgcgggggtgtgaagtggtggtgaatagaaggagagataaacagcactggtcagggaggacttcctggaggaagggggcattgaccaacacagaacatctggcaggaccagtatcctcctgaatttccatggaggtggaggaaaggagaacccttcttttctcycctcctgggctctctcgtgcagttggagtcaacagagtagccactggccccccaactttgagtaaaaccccatcccccagcagggcaagaggggcagaagcagccagcagcctcccatcaagccttgacaggagttgtcaccagtgcagagccagcggagtgtggtggggccctgtctggccccagccccactgtttacctgtctgggttgttgctggaaccattcatctcagtgaaggatgacatggcctccctcctccctcctcctgctcagctcctccactgggcatcc

SEQ ID NO: 622239 - DNA, 548 bp, Homo sapiens
gaaagccatctggtgacccctctgcccctaccagagcatgtcaytggctgcccttggggctccggggaaagctcaggctgaggttacagcatagctgggagcaggattcagggcctgggttaggtttgagttttaggactgggctgtagctgcagtgggtttgaggttaggcctggggttggcagaggttgagtttagcttgggatagagctgatgtctggtttggactgtggatggggctggcgcagctgtgggatggtgtttagagctggggctggtgcccaggtccagctgggatgagggctaaaaggagggtttgaggtgggtgctgatgtgtatccagcctggcttgaagctggtttgggaatggccctgggatttgctctagggttggtttggaggctgttggaggaatcggggctggggttccattccttccattcccccggccccatgcccttctggacagaaatcctcccccaagcttgcccactgggtccttctcagagtcttgacagtggctcacaggagggcaagaaaaatgacat

SEQ ID NO: 622240 - DNA, 568 bp, Homo sapiens
tcctcataccaatcagtggtaacatacataaataattaactatttgtgggtcaactgcccaccatttatttactcagtaccttgctaggtgctgtgtgggagcaaaaggaaaggtaagtaaaacaagatccttgtccacagggagatggtaatccaatcctgaatccaacactggaatgattgaaaagagaactcttaaaagaactcaatccacaagagtcaagaagagggaaaggaagaaaaggagagaagaaaaaaacagattaatcccagtgagtggcaagggaaggactagggctggtaatttcaaggttyaatttcaacagacaaggtgaaaagaaaaagaattgcagacaaaggaagaaacatgaacgcagacctaaagagacatacttggcacatatgctggaaataacatatgcttgcaggcaactggcaccgcacctggctttggaaaggcacctgataagtaactgctatcgctgttatggacactgggatggccagaggtagatctccaaaaacacccatgtaagaggaagtatggagcatgagtccagacaatagc

SEQ ID NO: 622241 - DNA, 481 bp, Homo sapiens
cccatgtaagaggaagtatggagcatgagtccagacaatagccagaggaacttaaatgcctgctttctgagaaaggcacactgaactaggaacagcataattaaagcagagctttgctagtgaccagcagaatggactaataagggaaacacattagcactaggaaggagtaacaggcttcctatatatattgcctcccaataaacagtttgaggttcatgaagcaaaagctagacccacctctgcctggatttctgtatttcaatatccaagagagaaaagtcattctaattcttgatcaaggtcttcgattctgtctcccctaacaattctgcaccctcctatgggcagacctatcccgtggtctgagacatctttttgggtgttccagcttaatgcaaccttacytgtttttttttttttttttattgttggtactggtaatccctatcttctgaataaaatcttgacttctattttg

SEQ ID NO: 622242 - DNA, 520 bp, Homo sapiens
caaattcactgctgccaatgccctggagaccatcttctggagctaatggggacaaggagcaaaaggagtcaagaaggaaaactcaggaagactcaatggtcaggccccartcctagaaagctgagaaataggacgaaattagcaggttagattacctcttacagtattttctcaaaataagaaatagaatcacctaccgttcacctttgtttttatgctaaaaataaccccactatagctaacactagctaacaaatattaaccaacaaataaccaatatttggagcctgaaaacctattatttacagttataatcctttgtttctaatttcctcatccttcttggcccatttcttgcataaagcatcctctactgtttggtcctgttccagaaccacgctagtgcctgcagcagaggtcgctcatgcaaacgcctccaggggtcagacagatggaaaatctctaatgcttaaatggaagtaactactttttaaacactctatgagccaaactctggcct

SEQ ID NO: 622243 - DNA, 600 bp, Homo sapiens
tatactaaacaagtattcattatttatctgaaatttaaatttaagttggcatcatgtatttttatttgctaaacagagcaaccctacakggagtggggtggggtggtggtggtggtgtgatggagggtatataggtctccaggaaaagaaaacctaagcccaagaggagaaagagaaggctccttagagatgacaccccttagagcagatgctagagctaagtctaggagctggccaggtgaacgaggaatacaaaaacaatctaaacagagagaagagaataagcatgttaccctcagacatttgcaagtaattaatgaggctagagcctcgagggaggaaaggaacattggaggatcaggctgaagagcttctaacagggcttcacttcacagaggttttctaggtaaaggccagggtgtcaatacacttgctgaagttcagattcccaggcctctccccaggagcctcagcaggtctggccttgagagcctgaggtctaccgtgattctgatgatcagctaacttgaggaaagcctgggttaaataatctgggaactctgccacctacaatcctgggagcccaacaagttgctgctg

SEQ ID NO: 622244 - DNA, 498 bp, Homo sapiens
ggcaatgtgaggattaaaatataggccagaatgggcagaatgggagttacaagaaaaccttaatagtggatagacagaactaattaatgagagtaagtagktctaataagaaaactgcagaattgaggatattggtgaagagatggggtggaagagaaaaagaagttaaaaggttaaagaaagtggactagggaagtgtatgtattttctggtaacaatctgtagcattctctagtttacatgttacctcctctgagaagccctccctgactaccttgtccagagaagccctttgcctcagttatttctcgtcattgcatcctgttcatttccttgatggcacttaacaccagttgtaacctgcatttgtttttgtttagtttcaatttgcttgaattcagtaagggccagacagcctgagtttgaaaaccaagctctgccacctatcagctgtgtgaccttgggcaagatcgtcatctctttgagccacagtttcct

SEQ ID NO: 622245 - DNA, 498 bp, Homo sapiens
ggcaatgtgaggattaaaatataggccagaatgggcagaatgggagttacaagaaaaccttaatagtggatagacagaactaattaatgagagtaagtaggtctaataagaaaactgcagaattgaggatattggtgaagagatggggtggaagagaaaaagaagttaaaaggttaaagaaagtggactagggaagtgtatgtattttctggtaacaatctgtagcattctctagtttacatgttacctcctctgagaagccctccctgactaccttgtccagagaagccctttgcctcagttatttctygtcattgcatcctgttcatttccttgatggcacttaacaccagttgtaacctgcatttgtttttgtttagtttcaatttgcttgaattcagtaagggccagacagcctgagtttgaaaaccaagctctgccacctatcagctgtgtgaccttgggcaagatcgtcatctctttgagccacagtttcct

SEQ ID NO: 622246 - DNA, 651 bp, Homo sapiens
agtcactgaacttctctgagactcagttttctcatttctacattggggatgatggtgctccctgatytgccacctgaaagtgagcatggggcaaggttcattgctgtcattcgcatcattgttattagaggaacacactcattattattgagggctaagtatgagccacgcatttaaaatttatctaattttatgcccatactgaaaagtcagtgttaattattccatttacagatgcagaaattatggcttataaacaaactccttaaaagacttctatagatttttgtgatacccatctgcttaaactccgttaagtcttgcttgtgttccactggctgctaagatgctttttaatgacattttattatttgttatttgagaacatgtttatctgtgtgaggtgctcaagccaaggaaagggttatctttattttggcttccctggtaccacccagggtgccttgtatttaacagataccagtaaactattatccattgtagtagaaaacttcaaggtcaaactaagggatgcagaccagtgaaatatgctcttgtaatgtgaggaacatccattcagaaaggcctcttttgaaggggaaatgtgattatagagatgcagagattatcaagagttcatagaaggaaccc

SEQ ID NO: 622247 - DNA, 610 bp, Homo sapiens
gtgttcatttcggctggtgaggagagttactaaactaccacccactgactcagggagaactagccccaggtttatgtagaagaggcagccttgacaaggtgaagtgatggtgactggctggctccaaaaatctctctccagtcatcctgccttagatgactggaactccacccttaatccttccagttaagccttcgaargcctccattagcagtgtaaatgtttctcttgggaggaataataaaatgtaattgaagtaaacaaacatttactgagtttgcttcaaaccaggcacttgtgagccatggcagggtgtccaaggatgaataagatgctatcctgtcctccaggagcatgtagatcattagaagcactgagatgtatgccaaattacttaaaacgagagagaaaattcaaaagaagataaaataagaagaaagttccataattgttctctcatctatatattttatcagagctggatgataggatttatcaccttggggaatttccattaacatggctgaaaagtttgtactttatttggaatataatagatagctatggatattttctgggtgaaggggagggagtggcatattttttaaaa

SEQ ID NO: 622248 - DNA, 548 bp, Homo sapiens
tgccagtctaaatggcttcaaaaacaaggatttctagggcaaggaattaaaatgaaatgtagttagccctcccctgaatagtttgtctccccacacaaatgagaagtttaacgaagaagaagagaagcactgatttagcaatcatgtcaaatgccatgccagagacacccacccccgacaggttgtaataactagtccctttctagcttctcctttgctgagttcagtttcttctacttctcctgacagaagaatcatcatattccacactctctgtgtctcatatgtatctgcatgtatgtatgtatttgtgtacatgtacraatgtttctgttacatattatgtatatgtgtgtgtgtgtgcatctttatgtgtaaatcaagcaaaggaaaataaaaaaagaaaattccctaagacctacaggaaatcttgagatagtttcaggggcctgaacattctaggggtggtttgtaaagctggcttaatgttaattataagacggacagtaagattccttcaatcacactaccaccaaaaaatgtggaag

SEQ ID NO: 622249 - DNA, 622 bp, Homo sapiens
ccatggttgactgaagaagataaggagtcccttcctcatcagggtcctttggtcagaaaatcagaaatagaggctccttgggaaaacagagatacttcactttcccacggcattttacagttcaccaagagcattttagcaagtgtgatctaatcacaaatttgatctcattaaagcacaaagtatcttcaarataaggagtttatactcatttttccttctgagaactgattctcagaaatgtgaaagaactttgctgagcccatgcagcatgctaaggacagaggccaggctcaaacctatagtatctggaccctgcgctgtggtctgcctgacataaccagactggctagtagactatttatctctcgctatggtggctataagttttgaagccttgtgaaatttgtcactgctttttaaacccacagaaatcccatttcctcactgggacctggaatccagcaacagcatccgcccttgagttcagcattaccctttcctggctgtcatctctttcacagggttcaaaatttctgggagggtgatatggtttggctgtatccccaccaaaatctcatcttgaattatagctcccataattccctcatgttgtaggagg

SEQ ID NO: 622250 - DNA, 555 bp, Homo sapiens
aaaaaatagctggtcctctgaatacacacagctgatgaatgcctctgtttaacttggccacaagcaaaaccacactgaatgtgaataattgcttcagataaaaagacagaacccgtaatttacagggagctaccaaggaatttaggctcgaggtcaaaccgatggcctggcaagtataatattatgcctggcacttcccagtggtcagtactttggaatccagcccgcctagtctgtgaaattcaccatggaggacaagaaacggaattctcctcccaagcctgaaggtgttagtggcatggtgtcaactcttattacctagttaaaaattgattatcaaaatgtctatctgctgagtctatctgactcaaccatcttcactacgcattatcttttgtggatcttaaatgtacaggctattaaagtgggccagctcctcttataaaacaagacagaggaaaagcaggaatgtttccaagatagcttctgtatgagtaacatacaacggtagagtaatraactatgatgctaaattttcattatgaaatttcactt

SEQ ID NO: 622251 - DNA, 511 bp, Homo sapiens
cactcactgtagccttgaactcctgggctcaagcaatcctcccacctcaacctctcaagtagctaggactacaggcacatgccatcatgcccggctmatttttaattgttttgtagagacagggtctcactatgttacccaggctggtctcaaattcctggcctcaagagatcctcctgtctcagcctcctaaagtgctgggattagaggagtgagccactgtgcccagccaggactctttattaaacaattgttttttataagtagacatttcaaaaagctcaggttttcctccttctaaaactagcctctaattgcagattaggatgagggagtaactagattctttgagacattttgttagaaaattactttaaacattcaggagtttgtatgttttgtcaaagggaatattccaaatgctctatttttaaaaattcatattccatagagaatgtaaatgattgaagcagttatttctccaatatttctactttgggaatttcaaagc

SEQ ID NO: 622252 - DNA, 511 bp, Homo sapiens
cactcactgtagccttgaactcctgggctcaagcaatcctcccacctcaacctctcaagtagctaggactacaggcacatgccatcatgcccggctcatttttaattgttttgtagagacagggtctcactatgttacccaggctggtctcaaattcctggcctcaagagatcctcctgtctcagcctcctaaagtgctgggattasaggagtgagccactgtgcccagccaggactctttattaaacaattgttttttataagtagacatttcaaaaagctcaggttttcctccttctaaaactagcctctaattgcagattaggatgagggagtaactagattctttgagacattttgttagaaaattactttaaacattcaggagtttgtatgttttgtcaaagggaatattccaaatgctctatttttaaaaattcatattccatagagaatgtaaatgattgaagcagttatttctccaatatttctactttgggaatttcaaagc

SEQ ID NO: 622253 - DNA, 614 bp, Homo sapiens
ctattccccaccataagccaagcacccaggatgggagaaagctatactgtcagtgtctgatgtgtgagccccttgagtgaggggccatatattctctgtgtcctcagtcccctggcacctactgactgtcaggaaatacttatttgactgcacaaagagatattgtgggaccctaactgtgggaagggaagattgcacggaggaggcatcggaatagtcactcttggattctgtatttgtttcctggggccttcataacaaaataccacaaactgggtggcttaaaacaatagaaattgattctctctcagttctgggggctggaagtctgaagtgaaggtatgggcrgggccatgctccctctgaaggctccaggggagaatccttcctggtctcttccagcttctgggggctgtcggcaatgcttggcgtcccctggcttgtcactgcatcgcgccagtctctgtctctgtcatgacttggccttctctgtgtctccacaagccttcctgtccttttaaacacaccagtcaggtcaggcgtggtgattcatgcctgtaatcctagcactttgggaggctgaggcgggcagatcacagggtcaggagtttgac

SEQ ID NO: 622254 - DNA, 533 bp, Homo sapiens
gcctggggcacagaaggagaggcagatagatggcagccctgaagaacggagttcaaatccagctttgtcactaagaatggaggtgmccttgcgtcatctcttcagttacccctcatctctgtaaaatgggggggttggattagatgactgctatgggacttctagaagtaacagtccatggttatacctgagagtccagacacctgcacttattctaattgtgaacctggcattgacttaccaggtggcctgaacataaccattagactcctcagagctcaacactggaaggcatctgtggtatgaactgattcagcctctgattccccctaaacccctccctagcattcctgaaagatgaccatttggcttctgttggaatacctccaaagatggggagctcacttccctggaccaggaggaagacatcctttctattgccagctcgctccacaagttacaaagtcttttcatagatatgagctcaaatccactttcatgaaacccctgcccaaagggaggcccaggaaagc

SEQ ID NO: 622255 - DNA, 600 bp, Homo sapiens
tgccactgcactccagcctgggcaacacagcaagacttcatctcaaaaaaaaaaaaaaaaaaaaaaagaagaaagaaaaaaaagaaagaaatgattccacaaataccactctgttctaggtgcagaggaaagagttcctggtccaaagagctctcatttcatgggcaagacagacagaaataagcaaattcaccacctgtcatgctcttcagtagaggagggggaaagtgtgagtctaattttgccctaactggggagaacaaagactgggaagacttcccaaagaaggtataatctgaagtcagtttcaaatagtgggcagaaggttttccagatggacaagggattggaggagaytcctgaaggagaaagaacatgcaaagtgcctgatgtatggaaagatgcctgagagtgtgtttggaacatgcagccaactccagctgtgaggtggggtggaggaccttttacagaattacaggagaggatggcaggggttggactggagaactcagggtgacaggtaaaaaacttgaattcttcctactggtgggtgatctcaaactttccctcataagaagaattaaaggcagatagaaggaa

SEQ ID NO: 622256 - DNA, 526 bp, Homo sapiens
agttgatttatactggaatatttttcacagaatcaaccccaatgctcactaacaaactgagaagaaaaaaaagaattacccccaacaacatctgaggaagcacaacagggacagacttgaaggcacctgggcagtcctctggttttggagtagaggtaggacagggctatttgtcctctcagagactggagcaggttctgtgtgtgagtagcaatgggacaaacagtcgtggtctggcaaccagcctgtagcaggaaggaaggttacaactggagaagtccaaagggcagccaggcaagtattctttgagctggggaacaaaaggcatttwaaactttttgctctgcttcaggcagctgacgtctggtgatgattcaccatatcaggaacaccctgtcagtgggctaaggcaagcctgccaggccacttctctaaagacacaacctgaggcctcctgcaataattctcacagagcattctgaacatacatgtaagctgttatgtccctgatcatatagggcccatg

SEQ ID NO: 622257 - DNA, 623 bp, Homo sapiens
gcagccaggcaagtattctttgagctggggaacaaaaggcatttaaaactttttgctctgcttcaggcagctgacgtctggtgatgattcaccatatcaggaacaccctgtcagtgggctaaggcaagcctgccaggccacttctctaaagacacaacctgaggcctcctgcaataattctcacagagcattctgaacatacatgtaagctgttatgtccctgatcatatagggcccatgtgtgcaatgtgtgaaatgggacctgcttaatttctgactagctctttctaattttggtttgcagaagatcacaatggtaagaaaaatgaagacaggcaaaagccactggcttccaggtaactctacatgatgaaggggctgataatggactgaccaaatctagagagaattccagaagcaaggactcaagaggttgaaggtcccagatctagaaaargcagaaactgctgattgttcctttttttgttgactgattatacaatgtgtccttttaaaaatggttctctgttctctttgcagttgttgtattggttcctagttcctagtaatttctcacacttagttaaccagtcagtcttaccgaaaagtaaactaaccaggga

SEQ ID NO: 622258 - DNA, 416 bp, Homo sapiens
cgggcatagagtagtccaggtgtggkggctcacacttgtaatccctgcagtttgggaggccaaggtgggtggatcacttgaggtcaggagttcgaaaccagcctggccaacatggtgaaacttcatctccactaaaatataaaaattagctgggcgtggtggtgggcgcctgtaatgccagctactcgggaagctgaggcaggagaatcacttgaacccaggaagcagaggctgcagtgagccaagatcgcaccactgaactcagcctgggactccatcaaaaaaaaaaaaaaaggcatagggtggcaaattgggaaaaaaaaaaaaatcaaactttccatggcctttaagagagacctatcttacatgttatagcccccagaggctcaaagtaaagtgatagagatctgttatgc

SEQ ID NO: 622259 - DNA, 565 bp, Homo sapiens
ggggcctatttttagccacctaaaagaaaaaaaaaactgcctgtcaaagtttcatactctgccaatttaagcttcataaatgaaggagaaatagtttttcccagacagagaaatgctaagggaattcattaacaccagatagtctctataataaatgttcaaaggagttctaaatatggatggtacttgctaccataaaagcacatgtaattacaaagctcgtacaccttataaagcaatatataattgggtctacaaagcaactagcttaacactatgacagaaataacacctcacacatgaatattaaccttgaatgtaaatggcctgaaagttccacttaacgggcatagagtagtccaggtgtggtggctcacacttgtaatccctgcagtttgggaggccaaggtgggtggatcacttgaggtcaggagttcgaaaccagcctggccaacatggtgaaacttcatctccactaaaatayaaaaattagctgggcgtggtggtgggcgcctgtaatgccagctactcgggaagctgaggcaggagaatcacttgaacccag

SEQ ID NO: 622260 - DNA, 465 bp, Homo sapiens
acttaacatagttgtcattactctttatctcacagtgattctaattagtatctgatattttataaattggagaaggagagacctactggttactgatttaaatatacagttcctaaaagaacgtgatgttgttgagggcaaacagaaacctcactcccacctgctcagaggagaaacttgtctattctttagcccttgataataatccttgaaagggaaagactctaaaacttttctctgaattatggccctgccaccccagctgggtttttctctcaaagggagacagtaatgaagggcccagaggatctggccatgttctcatggcatcattgagctgtaagatgccatgtattttgtgattctacaatcctctatgcaagagtacactagctattctrtggacaggagccagacaatgtgagctgtacataagaattatttttgcagtgtcaaaagccattc

SEQ ID NO: 622261 - DNA, 465 bp, Homo sapiens
acttaacatagttgtcattactctttatctcacagtgattctaattagtatctgatattttataaattggagaaggagagacctactggttactgatttaaatatacagttcctaaaagaacgtgatgttgttgagggcaaacagaaacctsactcccacctgctcagaggagaaacttgtctattctttagcccttgataataatccttgaaagggaaagactctaaaacttttctctgaattatggccctgccaccccagctgggtttttctctcaaagggagacagtaatgaagggcccagaggatctggccatgttctcatggcatcattgagctgtaagatgccatgtattttgtgattctacaatcctctatgcaagagtacactagctattctgtggacaggagccagacaatgtgagctgtacataagaattatttttgcagtgtcaaaagccattc

SEQ ID NO: 622262 - DNA, 465 bp, Homo sapiens
acttaacatagttgtcattactctttatctcacagtgattctaattagtatctgatattttataaattggagaaggagagacctactggwtactgatttaaatatacagttcctaaaagaacgtgatgttgttgagggcaaacagaaacctcactcccacctgctcagaggagaaacttgtctattctttagcccttgataataatccttgaaagggaaagactctaaaacttttctctgaattatggccctgccaccccagctgggtttttctctcaaagggagacagtaatgaagggcccagaggatctggccatgttctcatggcatcattgagctgtaagatgccatgtattttgtgattctacaatcctctatgcaagagtacactagctattctgtggacaggagccagacaatgtgagctgtacataagaattatttttgcagtgtcaaaagccattc

SEQ ID NO: 622263 - DNA, 511 bp, Homo sapiens
ggacagtgttggtaacctcttagatagtgtagggataagatagctgaatttatggcatggtgttgtatacttcagatatctatgctgtaatattaaaatggcatttccttggcccactaaattgtccayttcctggcccaatatgatacacgaaaggagtgaaaatgggaagaaaatagccttctgaaggacttgcctaataaacttctcccttagcattacttggagtgacatcagaaaattggaatgaagtaattgtgtaaaaaagacaaattctctgctgtctttctcccccaatccttaataaacaaaggaggaaacctagactcaggttaggttttctcttcttattctttacataccacgacaagtactgagcttgtttgttactatatggggacttagtatattgtacaaaggggtgtggctattactgtcccttttctaccagagcatcaaaactggtaacttggctggtgttaaggggagcttctaaccttgaattcccact

SEQ ID NO: 622264 - DNA, 511 bp, Homo sapiens
ggacagtgttggtaacctcttagatagtgtagggataagatagctgaatttatggcatggtgttgtatacttcagatatctatgctgtaatattaaaatggcatttccttggcccactaaattgtccatttcctggcccaatatgatacacgaaaggartgaaaatgggaagaaaatagccttctgaaggacttgcctaataaacttctcccttagcattacttggagtgacatcagaaaattggaatgaagtaattgtgtaaaaaagacaaattctctgctgtctttctcccccaatccttaataaacaaaggaggaaacctagactcaggttaggttttctcttcttattctttacataccacgacaagtactgagcttgtttgttactatatggggacttagtatattgtacaaaggggtgtggctattactgtcccttttctaccagagcatcaaaactggtaacttggctggtgttaaggggagcttctaaccttgaattcccact

SEQ ID NO: 622265 - DNA, 511 bp, Homo sapiens
ggacagtgttggtaacctcttagatagtgtagggataagatagctgaatttatggcatggtgttgtatacttcagatatctatgctgtaatattaaaatggcatttccttggcccactaaattgtccatttcctggcccaatatgatacacgaaaggagtgaaaatgggaagaaaatagccttctgaaggacttgcctaataaacttctcccttagcattacttggagtgacatcagaaaattggaatgaagtaattgtgtaaaaaagacaaattctctgctgtctttctcccccaatccttaataaacaaaggaggaaacctagactcaggttaggttttctcttcttattctttacataccacgacaagtactgagcttgtttgttactatatggggacttagtrtattgtacaaaggggtgtggctattactgtcccttttctaccagagcatcaaaactggtaacttggctggtgttaaggggagcttctaaccttgaattcccact

SEQ ID NO: 622266 - DNA, 473 bp, Homo sapiens
gattgttcacctgaaagcctgattctcctttagagaaaaaaaatgctaaaaaaacaaaacaaaacaacaaaaaaaaaaacaaaacattatatatcgcattacaattttattcaacaaatacagagatttccagaatagttaaaayaaagtagaaaacaactctggtgttataagagcagtaggttcatatgcccactgtgcagtaatagaccaatacactaagacagcagtttgcaacaaagaatttaatgatcacagggcagccaaggggagagatatgagtagaccctcaaatccatctcctcaagaacttctgcgttagggtttttaaggggattgtggagggtgaggggttggaaaattaaggttgttgattgggcaggggaagggggatgaaatcattaggatttggaaactgcatactgagtcagttcctcagtggggtccttcagaccagctgacatcagtagttt

SEQ ID NO: 622267 - DNA, 627 bp, Homo sapiens
ctccaggtgtgtgccaccatgcctggcaaatttttgtatttttagtagagactgggtttcaccatgttggccaggctrgtctcaaactcctgacctcaggtgatccacctgccttgacctgccaaagtgctgggattacaggaatggctcttgactctaactgcaaggtccctagatcattagatcatttcctgaatatcttatgcttcaggtattggccatcacttgggttaccattgtcataagtcaaaagcctccacaaccaaggcccttaaacatgggatagcctgtgcagggcagaagtataaagaatatagagaagtgaagcacaaaacttgttgcattggccaggaattaaaccagggtctcctatgcaggcggtgagaattctaccactggaccacaaatccggctcttatgtgtggtcctggagaaacaattgaaatacaatactgaaaaagacagaaattgttccaaaagaagctttttgtagtattgactaaaagctaacagtagacatccaaaaccaaggtttttacagaatacttttactagacaaaactataaatattaaaatagcttatttgatcaaactttaattccgaaaaaggctccttccaactgcgt

SEQ ID NO: 622268 - DNA, 627 bp, Homo sapiens
ctccaggtgtgtgccaccatgcctggcaaatttttgtatttttagtagagactgggtttcaccatgttggccaggctggtctcaaactcctgacctcaggtgatccacctgccttgacctgccaaagtgctgggattacaggaatggctcttgactctaactgcaaggtccctagatcattagatcatttcctgaatatcttatgcttcaggyattggccatcacttgggttaccattgtcataagtcaaaagcctccacaaccaaggcccttaaacatgggatagcctgtgcagggcagaagtataaagaatatagagaagtgaagcacaaaacttgttgcattggccaggaattaaaccagggtctcctatgcaggcggtgagaattctaccactggaccacaaatccggctcttatgtgtggtcctggagaaacaattgaaatacaatactgaaaaagacagaaattgttccaaaagaagctttttgtagtattgactaaaagctaacagtagacatccaaaaccaaggtttttacagaatacttttactagacaaaactataaatattaaaatagcttatttgatcaaactttaattccgaaaaaggctccttccaactgcgt

SEQ ID NO: 622269 - DNA, 627 bp, Homo sapiens
ctccaggtgtgtgccaccatgcctggcaaatttttgtatttttagtagagactgggtttcaccatgttggccaggctggtctcaaactcctgacctcaggtgatccacctgccttgacctgccaaagtgctgggattacaggaatggctcttgactctaactgcaaggtccctagatcattagatcatttcctgaatatcttatgcttcaggtattggccatcacttgggttaccattgtcataartcaaaagcctccacaaccaaggcccttaaacatgggatagcctgtgcagggcagaagtataaagaatatagagaagtgaagcacaaaacttgttgcattggccaggaattaaaccagggtctcctatgcaggcggtgagaattctaccactggaccacaaatccggctcttatgtgtggtcctggagaaacaattgaaatacaatactgaaaaagacagaaattgttccaaaagaagctttttgtagtattgactaaaagctaacagtagacatccaaaaccaaggtttttacagaatacttttactagacaaaactataaatattaaaatagcttatttgatcaaactttaattccgaaaaaggctccttccaactgcgt

SEQ ID NO: 622270 - DNA, 627 bp, Homo sapiens
ctccaggtgtgtgccaccatgcctggcaaatttttgtatttttagtagagactgggtttcaccatgttggccaggctggtctcaaactcctgacctcaggtgatccacctgccttgacctgccaaagtgctgggattacaggaatggctcttgactctaactgcaaggtccctagatcattagatcatttcctgaatatcttatgcttcaggtattggccatcacttgggttaccattgtcataagtcaaaagcctccacaaccaaggcccttaaacatgggatagcctgtgcagggcagaagtataaagaatatagagaagtgaagcacaaaacttgttgcattggccaggaattaaaccagggtctcctatgcaggcggtgagaattctaccactggaccacaaatccggctcttatgtgtggtcctggagaaacaattgaaatacaatactgaaaaagacagaaattgttccaaaagaagctttttgyagtattgactaaaagctaacagtagacatccaaaaccaaggtttttacagaatacttttactagacaaaactataaatattaaaatagcttatttgatcaaactttaattccgaaaaaggctccttccaactgcgt

SEQ ID NO: 622271 - DNA, 556 bp, Homo sapiens
gggaaaaagagtgagacactgtgtctaaaaaaaataaaaattagctgggcatggtggcacactcacttgagcccaggagtttaaggcttcagtgagctatgattgcaccacagcacttgagtctgggtaacagagcaagaccctgtctcaaaaaaaaaaaaatagaaaatgaacagtataccagagggaatttaacacaaggaattatacaggtattggaggtctaagaaggcaaaaggggaactgatgtaacacagagatagtaagtgtagaaagcgaagcagtgatcaaccctagggttgtagaaacaaaggtaaaatggttgggttgttagaacttggtaacttggatgaagggccacacataactgggaggatggcttctgagaaggaggttgctggtggccttggaactcagaggaagtacctagtgtagcagggactcagayctctgaagaagaggtgtccactggctgatgctcatgcctttgagagggggccatgaggctggctccgggattgtaagaaaagaaaagaaatgaaactggaaacaatga

SEQ ID NO: 622272 - DNA, 556 bp, Homo sapiens
gggaaaaagagtgagacactgtgtctaaaaaaaataaaaattagctgggcatggtggcacactcacttgagcccaggagtttaaggcttcagtgagctatgattgcaccacagcacttgagtctgggtaacagagcaagaccctgtctcaaaaaaaaaaaaatagaaaatgaacagtataccagagggaatttaacacaaggaattatacaggtattggaggtctaagaaggcaaaaggggaactgatgtaacacagagatagtaagtgtagaaagcgaagcagtgatcaaccctagggttgtagaaacaaaggtaaaatggttgggttgttagaacttggtaacttggatgaagggccacacataactgggaggatggcttctgagaaggaggttgctggtggccttggaactcagaggaagtacctagtgtmgcagggactcagacctctgaagaagaggtgtccactggctgatgctcatgcctttgagagggggccatgaggctggctccgggattgtaagaaaagaaaagaaatgaaactggaaacaatga

SEQ ID NO: 622273 - DNA, 605 bp, Homo sapiens
ggtaagacccttctgggttctctatcacatgccttgtgaattgtgctctccttttttgggaactggcactatttccagccctgtgtgagtgttgggtactgttctagctaatgctttcaagtggttctttcctggggtagttttttcacacacatgcacctgtgaaattaaaaaaaaagaagaagaagaaactttttatctgaggaatgtgagcccctttaaattatcargcttggagaggcattggaatgaaactgcagtcacatcactcccccttgagtgattatcttgtaaagccacttgctatacgggctccagactaactgatgccaagcagccataaaataccatatgctggacaccacgactcatatcctatagttcaacagtgtataaccaataactaatccatgtcatctctgtaagccaatgaaaatttctatcaaagaactttgtatccatccacttcttcttacttttgcctttaaaaacctgcttgtaacaaaagctgattgagcactccctgagttaacttggaagtgtgtcctgggcagctgtgctcactttggctcaagtaaactctttaaattatatcttgtgcttca

SEQ ID NO: 622274 - DNA, 605 bp, Homo sapiens
ggtaagacccttctgggttctctatcacatgccttgtgaattgtgctctccttttttgggaactggcactatttccagccctgtgtgagtgttgggtactgttctagctaatgctttcaagtggttctttcctggggtagttttttcacacacatgcacctgtgaaattaaaaaaaaagaagaagaagaaactttttatctgaggaatgtgagcccctttaaattatcaagctyggagaggcattggaatgaaactgcagtcacatcactcccccttgagtgattatcttgtaaagccacttgctatacgggctccagactaactgatgccaagcagccataaaataccatatgctggacaccacgactcatatcctatagttcaacagtgtataaccaataactaatccatgtcatctctgtaagccaatgaaaatttctatcaaagaactttgtatccatccacttcttcttacttttgcctttaaaaacctgcttgtaacaaaagctgattgagcactccctgagttaacttggaagtgtgtcctgggcagctgtgctcactttggctcaagtaaactctttaaattatatcttgtgcttca

SEQ ID NO: 622275 - DNA, 513 bp, Homo sapiens
atgtattcttaggtccttcatttttgtgttattgtaaatggtattgtcagaatcttcagaagtaattattggccaggtgcggtggttcatgtctgtaatcctagcactttgggaggccaaggtaggcagacacttgagccaggtgttggagaccagcctgggcaacatggcaaacctcatctttataaaaaatacaaaaattagccagtggcacacgtctgtagccccagctactcaggaggctgaagtaggaggatcaattgagcccaggaggcagaggctgcagtaagccaagrtcgcaccactgcacttcagcctgggtggcagagggaaaccctgtctcaaaaataaataagtaaataaataaataaataaatgattattaccagtctcacagctgaggcagaaatttaaaacaaataaataataagtactgcatttattcactccaagaaaagtaaaagctaaggcccagaatgtggcaagacaagggttaaaaagaagaaaacaagt

SEQ ID NO: 622276 - DNA, 573 bp, Homo sapiens
aattttaaatttccaagatgtgggagcgcccagttacttggcacattttcctgcctccttgaaccaaatgaccacactcactgctggggtcaaagatgtcagtcaccagccagacatggtggttcacacctgtaaacccagcactttgggaggccaaggtcggtggatcccttgagcccaggagtttgagactagcctgggcaaaatggtgaaaccccatctctacaaaaaatacaaaaattagctggttgtggtggtacatgcctgtggtcccgactactggggaggctgaggtgggaggagagcttgagcccaggaggttggggctgcagtgagttgagatygtgccactgcactccagcatgggtaatagagtgagacccggtctctagaaaataaataaaaagacttcagtcaccaaggtaaggagatgggtggatattcctactgtggtacctgaactgtcatcctatcagttgccccaagaccaacttttgtctcctggttccaaaacatgtggatcattttttggtccactcctgtcttctgcagaagtcctccttggcactcttc

SEQ ID NO: 622277 - DNA, 573 bp, Homo sapiens
aattttaaatttccaagatgtgggagcgcccagttacttggcacattttcctgcctccttgaaccaaatgaccacactcactgctggggtcaaagatgtcagtcaccagccagacatggtggttcacacctgtaaacccagcactttgggaggccaaggtcggtggatcccttgagcccaggagtttgagactagcctgggcaaaatggtgaaaccccatctctacaaaaaatacaaaaattagctggttgtggtggtacatgcctgtggtcccgactactggggaggctgaggtgggaggagagcttgagcccaggaggttggggctgcagtgagttgagattgtgccactgcactccagcatgggtaatagagygagacccggtctctagaaaataaataaaaagacttcagtcaccaaggtaaggagatgggtggatattcctactgtggtacctgaactgtcatcctatcagttgccccaagaccaacttttgtctcctggttccaaaacatgtggatcattttttggtccactcctgtcttctgcagaagtcctccttggcactcttc

SEQ ID NO: 622278 - DNA, 617 bp, Homo sapiens
atattgaacctgaaataatttaaataattatyggggacttaccagagctaagttcgtggaccactgggatttctcttatttgggtctcatagtcttccataaagtgatgggactataattgtccatcttcaagtatccttctatgactcatgtataatcccttgactcttttaggagattcctggcagttaacgtcaatactgcccttcataatgcttctgagttagcttaggtaaggtccttaaatacccaatgacttatactctgaggcttctaaactggtatgtggaactcggtggttgcaacttcacccaaatcctcattctgtgttgtgctgtccctaatttagagggcaaaagatttcaaactcaatcatttcttgttaaattcaactcttggagctccacctgtcataaacacaatcccatttcccatgtactcaattacttctgtttctcgaatccatcattcatcccatagatattgagtgcctaatgtattccagatatagttctacataatagggatagagcagtgtatgaaacaaagcacctaccttcataggacttattctgaggaggtaggaggggagacaaatgatataataacttagacta

SEQ ID NO: 622279 - DNA, 635 bp, Homo sapiens
gatcatgtgagagccacgttatgtgtattctttttaccacctcttctgtatccatctggagatagttctcttttctgttttttctagaggaaaaaaacaacgacaaaaaaacagggagatcttagcagaaccaaagcagattagatattagccttgaaaatggtgacagcaatcagtgatattgaacctgaaataatttaaataattattggggacttaccagagctaagttcgtggaccactgggatttctcttatttgggtctcatagtcttccataaagtgatgggactataattgtccatcttcaagtatccttctatgactcatgtataatcccttgactcttttaggagattcctggcagttaaygtcaatactgcccttcataatgcttctgagttagcttaggtaaggtccttaaatacccaatgacttatactctgaggcttctaaactggtatgtggaactcggtggttgcaacttcacccaaatcctcattctgtgttgtgctgtccctaatttagagggcaaaagatttcaaactcaatcatttcttgttaaattcaactcttggagctccacctgtcataaacacaatcccatttcccatgtactcaattacttctgtttct

SEQ ID NO: 622280 - DNA, 617 bp, Homo sapiens
atattgaacctgaaataatttaaataattattggggacttaccagagctaagttcgtggaccactgggatttctcttatttgggtctcatagtcttccataaagtgatgggactataattgtccatcttcaagtatccttctatgactcatgtataatcccttgactcttttaggagattcctggcagttaacgtcaatactgcccttcataatgcttctgagttagcttaggtaaggtccttaaatacccaatgacttatactctgaggcttctaaactggtatgtggaactcggtggttgcaacttcacccaaatcctcattctgtgttgtgctgtccctaatttagagggcaaaagatttcaaactcaatcatttcttgttaaattcaactcttggagctccacctgtcataaacacaatcscatttcccatgtactcaattacttctgtttctcgaatccatcattcatcccatagatattgagtgcctaatgtattccagatatagttctacataatagggatagagcagtgtatgaaacaaagcacctaccttcataggacttattctgaggaggtaggaggggagacaaatgatataataacttagacta

SEQ ID NO: 622281 - DNA, 617 bp, Homo sapiens
atattgaacctgaaataatttaaataattattggggacttaccagagctaagttcgtggaccactgggatttctcttatttgggtctcatagtcttccataaagtgatgggactataattgtccatcttcaagtatccttctatgactcatgtataatcccttgactcttttaggagattcctggcagttaacgtcaatactgcccttcataatgcttctgagttagcttaggtaaggtccttaaatacccaatgacttatactctgaggcttctaaactggtatgtggaactcggtggttgcaacttcacccaaatcctcattctgtgttgtgctgtccctaatttagagggcaaaagatttcaaactcaatcatttcttgttaaattcaactcttggagctccacctgtcataaacacaatcccatttcccatgtactcaattacttctgtttctcgaatccatcattcatcccatagatattgagtgcctaatgtattccagatatagttctacataatarggatagagcagtgtatgaaacaaagcacctaccttcataggacttattctgaggaggtaggaggggagacaaatgatataataacttagacta

SEQ ID NO: 622282 - DNA, 645 bp, Homo sapiens
tcattggttaaaattcaatcctctttactggggcggaagattgttctgctaatctttcttcccttattatttccccctttcctgatttttttctgtaattttatcgatcacggattgyttttgaagactttcctttaaattagtctaacttttgtaaaagcaatgtataaagtgttttgcatcccattttaacagatattttttttttccccgaattcaagcatgcccttctatgagctatcagcctgtttcaggttacctgttactgtagctcttctaccatagctaacatttatttcatgtctggcattttgctcagcaagttagatgcattgtataccatgaatgaccgaagcttagcaaaaaaaatatgtaattgaaggaatgaaaaaattgatcttatttacttgaccttggaacccagccaaagccatttcatgtgggtagtgtgctgacctatattgacctgatattagagcctctgccttcctttagtcttttctccctgcgatgtggttccttcttcctcaccctcacatcaatggccaattaggtcctgcagatgttaagcttctaaatcaaagaaggacaacaccagaaattcatttctcctttacaatgtagaatagtttgtaaattagtgct

SEQ ID NO: 622283 - DNA, 645 bp, Homo sapiens
tcattggttaaaattcaatcctctttactggggcggaagattgttctgctaatctttcttcccttattatttccccctttcctgatttttttctgtaattttatcgatcacggattgcttttgaagactttcctttaaattagtctaacttttgtaaaagcaatgtataaagtgttttgcatcccattttaacagakattttttttttccccgaattcaagcatgcccttctatgagctatcagcctgtttcaggttacctgttactgtagctcttctaccatagctaacatttatttcatgtctggcattttgctcagcaagttagatgcattgtataccatgaatgaccgaagcttagcaaaaaaaatatgtaattgaaggaatgaaaaaattgatcttatttacttgaccttggaacccagccaaagccatttcatgtgggtagtgtgctgacctatattgacctgatattagagcctctgccttcctttagtcttttctccctgcgatgtggttccttcttcctcaccctcacatcaatggccaattaggtcctgcagatgttaagcttctaaatcaaagaaggacaacaccagaaattcatttctcctttacaatgtagaatagtttgtaaattagtgct

SEQ ID NO: 622284 - DNA, 645 bp, Homo sapiens
tcattggttaaaattcaatcctctttactggggcggaagattgttctgctaatctttcttcccttattatttccccctttcctgatttttttctgtaattttatcgatcacggattgcttttgaagactttcctttaaattagtctaacttttgtaaaagcaatgtataaagtgttttgcatcccattttaacagatattttttttttccccgaattcaagcatgcccttctatgagctatcagcctgtttcaggttacctgttactgtagctcttctaccatagctaacatttatttcatgtctggcattttgctcagcaagttagatgcattgtataccatgaatgaccgaagcttagcaaaaaaaatatgtaattgaaggaatgaaaaaattgatcttatttacttgaccttggaacccagccaaagccatttcatgtgggtagtgtgctgacctatattgacctgatattagagcctctgccttcctttagtcttttctccctgcgatgtggttccttcttcctcamcctcacatcaatggccaattaggtcctgcagatgttaagcttctaaatcaaagaaggacaacaccagaaattcatttctcctttacaatgtagaatagtttgtaaattagtgct

SEQ ID NO: 622285 - DNA, 682 bp, Homo sapiens
tttggcaggtggaggcaggtggatcacttacttgaggccaggagtttgagagcaacctggtcaacatagcgagatcccatctcttaaaaaagatacatacacamacatacacacacacacacacacatctgtcttaaagtttgagttcagctaaggggtcagttatgtttcaggaatgtccatgcagaagaaaagtgatttatgtattgaaaatctgtgtctggtcaacatgagaagatcgtttgaagcttgaatggtgtgttcttctgtctaccttgaaaaacttgtcccaaagtgagttttcaagatacaggatgtatgactgtctaatgcttgtgaggagcttagcaagaatgaccagcgaattgcttatgagtctcattagctcatttacagttgccttaaaacatagctgcattgggctaacccaaatgcctcatcaacatacctgtagagattcaaatatatgagaagtcttccctctagagagtgagcccttgcttagtgctgcctttacagcactgtgcatcttctggattgttccattcagtggaagagaagcaatgacccctcataacagagacctagattgagttgctaattattcagccagtatacagtatatactatagtgtggttactgagatactgaatagtttaagagtttctgccataattagta

SEQ ID NO: 622286 - DNA, 682 bp, Homo sapiens
tttggcaggtggaggcaggtggatcacttacttgaggccaggagtttgagagcaacctggtcaacatagcgagatcccatctcttaaaaaagatacatacacaaacatacacacacacacacacacatctgtcttaaagtttgagttcagctaaggggtcagttatgtttcaggaatgtccatgcagaagaaaagtgatttatgtattgaaaatctgtgtctggtcaacatgagaagatcgtttgaagcttgaatggtgtgttcttctgtctaccttgaaaaacttgtcccaaagtgagttttcaagatacaggatgtatgactgtctaatgcttgtgaggagcttagcaagaatgaccagcgaattgcttatgagtctcattagctcatttacagttgccttaaaacatagctgcattgggctaacccaaatgcctcatcaacatacctgtasagattcaaatatatgagaagtcttccctctagagagtgagcccttgcttagtgctgcctttacagcactgtgcatcttctggattgttccattcagtggaagagaagcaatgacccctcataacagagacctagattgagttgctaattattcagccagtatacagtatatactatagtgtggttactgagatactgaatagtttaagagtttctgccataattagta

SEQ ID NO: 622287 - DNA, 575 bp, Homo sapiens
attgctgcctggtttgagttggttccttattccttctccttcaagttgarttacaactagtaattgcttgcctaactttacctgataagattttatatcctgttctgtattctgtatttcagtcatcagtttgtgctcatagcttgacaataaccagaacagtgcaagaacagttacagtattatgtgtagttatcaaacaaggctgtcttaattttcttacattcctaaatactaaattattttctatggtattgatctacagtcttaagcaccttcagagcttcaaggtactgatcatttcttgaagtgcagtttttctgcatgtagtttttggttgacattttttctttatagagacagggtctccactgcaagagtgcagtggcacagtcatagctcactgcagcctccaactcctgggctcaagcgatctttccaccttaaccgcctgagtagatgggactacaggtccacaccaccacattcagccaatctttttattctttgtagagacagagcctatttctgctgcccaggctggacttcaactccttgcctcaagtgatcctccca

SEQ ID NO: 622288 - DNA, 621 bp, Homo sapiens
ttgtgaagtatgatgactccaaagagagcagccatgccttgctgaccattctctckctctccactctagacctgccctcaaacacgaagatagtcttttgctcattcattcatttatgcaacatttatttaacaaatatttattaaacgcctattatgtgttaggaactgtgctaagtgctgacattgcaaatataaaaatgaaacacagaccctgccctgagagggacagtgtttattggggaattgaaaatataaacacatagcttcaaaacaataggcaaaatgctatttagtgggcatattcggagttcagatgatgaatgacagaacaggcagcagatcttcatgtttaagcacacagacgctggagccatgctgctctggattcacatcccagctctgccacgtgatacctgtatgacactcggctagttgtttcattgctctgtctcagtttcctcatccaacaaatgcagattataatattaactatctcatagggttgttacaaacattaagtgagtcaacattttaaagtttcttagtacactacacaaataaaaactctgaagtgaccgtattccccagtagatgtcactactacatagctagttaggtg

SEQ ID NO: 622289 - DNA, 621 bp, Homo sapiens
ttgtgaagtatgatgactccaaagagagcagccatgccttgctgaccattctctcgctctccactctagacctgccctcaaacacgaagatagtcttttgctcattcattcatttatgcaacatttatttaacaaatatttattaaacgcctattatgtgttaggaactgtgctaagtgctgacattgcaaatataaaaatgaaacacagaccctgccctgagagggacagtgtttattggggaattgaaaatataaacacatagcttcaaaacaataggcaaaatgctatttagtgggcatattcggagttcagatgatgaatgacagaacaggcagcagatcttcatgtttaagcacacagacgctggagccatgctgctctggattcacatcccagctctgccacgtgatacctgtatgacactcggctagttgtttcattgctctgtctcagtttcctcatccaacaaatgcagattataatattaactatctcatagggttgttacaaacattaagtgagtcaacattttaaagtttcttagtacactacacaaataaaaactctgaagtgacmgtattccccagtagatgtcactactacatagctagttaggtg

SEQ ID NO: 622290 - DNA, 621 bp, Homo sapiens
ttgtgaagtatgatgactccaaagagagcagccatgccttgctgaccattctctcgctctccactctagacctgccctcaaacacgaagatagtcttttgctcattcattcatttatgcaacatttatttaacaaatatttattaaacgcctattatgtgttaggaactgtgctaagtgctgacattgcaaatataaaaatgaaacacagaccctgccctgagagggacagtgtttattggggaattgaaaatataaacacatagcttcaaaacaataggcaaaatgctatttagtgggcatattcggagttcagatgatgaatgacagaacaggcagcagatcttcatgtttaagcacacagacgctggagccatgctgctctggattcacatcccagctctgccacgtgatacctgtatgacactcggctagttgtttcattgctctgtctcagtttcctcatccaacaaatgcagattataatattaactatctcatagggttgttacaaacattaagtgagtcaacattttaaagtttcttagtacactacacaaataaaaactctgaagtgaccgtrttccccagtagatgtcactactacatagctagttaggtg

SEQ ID NO: 622291 - DNA, 613 bp, Homo sapiens
aagccattttctccctgctttctaaaaaccctggatttgattccktcaactcaggccttatcagggagcacctactcctttctaagatgtgcaagtcgtttctgagaaagcacgtgaataataattgacagaagccaccgaggcctaactcttagaggaactgaaatgggaaattgggacacagtggcataaggaggaactttgtgaagcagcaggaggtaacttaacttgggctagctttatgacagctgaggctgagcctacagctttattttccatcagctgacaaaggtgaaagttcagtatttctgattttgctccatgacttctgtagatctcagcttaggtacagcattgggtgaaggtgttttttttttttttttttttctggttcttgattctgacatgaccagcttttgaggtaaaatgagtaggctaagatcacaagggtaatcatgcactcatttacttgccaggtttttaagaaaaatctcttttggtccaggctttgtgtgaggtgaaaggacgtggagatgcatggcccatttcttcaagcattttaccgtctggacttccgtgggagagagagacatgtaaacatatcagtaaaatg

SEQ ID NO: 622292 - DNA, 613 bp, Homo sapiens
aagccattttctccctgctttctaaaaaccctggatttgattccttcaactcaggccttatcagggagcacctactcctttctaagatktgcaagtcgtttctgagaaagcacgtgaataataattgacagaagccaccgaggcctaactcttagaggaactgaaatgggaaattgggacacagtggcataaggaggaactttgtgaagcagcaggaggtaacttaacttgggctagctttatgacagctgaggctgagcctacagctttattttccatcagctgacaaaggtgaaagttcagtatttctgattttgctccatgacttctgtagatctcagcttaggtacagcattgggtgaaggtgttttttttttttttttttttctggttcttgattctgacatgaccagcttttgaggtaaaatgagtaggctaagatcacaagggtaatcatgcactcatttacttgccaggtttttaagaaaaatctcttttggtccaggctttgtgtgaggtgaaaggacgtggagatgcatggcccatttcttcaagcattttaccgtctggacttccgtgggagagagagacatgtaaacatatcagtaaaatg

SEQ ID NO: 622293 - DNA, 584 bp, Homo sapiens
ggtgggaattgaacaatgagaacacacggacacaggaaggggaacatcacactctggggactgttgtggggtgggggaagkggggagggatagctttaagagatatacctaatgctaaatgatgagttaatgggtgcagcacaccagcatggcacatgtatacatatgtaactaacctgcacattgtgcacatgtaccctaaaacttaaagtataataataataaaataaaatttaaaaaaaatctctttcctatttgaaatcaagagaaatctcagaatcagggaagcccaggtgcatcgctttttttctttttatgaatttaagtaaacattaatccaaggaggattgtgcctaggtaagtggaggcaaagtttggttctgaatgcagaattttctatctgagttattcctggatgaaatctctctgaggaataggcactatggtattatatttcctaagtttataactcacaagttgctgagtgcgtatggttaaaaccctgttattttattttatatttatttatttatttattttttttgagacggagtctcgctgtcacccaggctagagtgcagtgg

SEQ ID NO: 622294 - DNA, 584 bp, Homo sapiens
ggtgggaattgaacaatgagaacacacggacacaggaaggggaacatcacactctggggactgttgtggggtgggggaaggggggagggatagctttaagagatatacctaatgctaaatgatgagttaatgggtgcagcacaccagcatggcacatgtatacmtatgtaactaacctgcacattgtgcacatgtaccctaaaacttaaagtataataataataaaataaaatttaaaaaaaatctctttcctatttgaaatcaagagaaatctcagaatcagggaagcccaggtgcatcgctttttttctttttatgaatttaagtaaacattaatccaaggaggattgtgcctaggtaagtggaggcaaagtttggttctgaatgcagaattttctatctgagttattcctggatgaaatctctctgaggaataggcactatggtattatatttcctaagtttataactcacaagttgctgagtgcgtatggttaaaaccctgttattttattttatatttatttatttatttattttttttgagacggagtctcgctgtcacccaggctagagtgcagtgg

SEQ ID NO: 622295 - DNA, 575 bp, Homo sapiens
ataatgtagaatcagtaggagccctgagcttgttttcctgcaactggacagtcccatctaggggtgaaggaaaacagtgatagatcatcaggcattaggctctcataaggagcacacaacctggatcccacacatgcgcagttcacaagagggatcacgttcctgtgagaatctamcaccaccactgagtcgacaggaggtggaactcaggcagtaatttgagcaatagggagtgtctgtaaatatagatgaagctttatttacccacctctcacctcctgctgtgtggcctggttcctaacgggccatggaccggtaccagtccctggtctggggcttagggatacctaatttaagccacccaatctgggatacacggttatggcagccctagcaactagcaccaagcaagtaccagaataatagctactaacttcatgttacttgttcaatgtctgtctctcccattataccataaggtctatgaaggaaggaattgtacctttcttaggcactctgtattcccagcacttggcatagctcctgttctgtagtaaatgttcaataaacatttg

SEQ ID NO: 622296 - DNA, 563 bp, Homo sapiens
attttctatctgagttattcctggatgaaatctctctgaggaataggcactatggtattatatttcctaagtttataactcacaagttgctgagtgcgtatggttaaaaccctgttattttattttatatttatttatttatttattttttttgagacggagtctcgctgtcacccaggctagagtgcagtggtacaatctcgactcactgcaaccttcatctcccgtaaatcccattcctttaaaacataaccaaaaactatgcactaacagcacaaaagggagatttcaatctaaagagaagtatgtattattttctttcatctaaaagttactaagaaaataagggcaagatgttatattacatgtttgagatcttgaaccacatttatgcattaagtatgagaacttcagaaatatcataaaccaaacttataagtaggattgcttgaaagcataaatgctaaagcttgaactgtcaatgcatatgctccctaggcattttcaataaatatyaatttattaataacctataatattctttttaatgctgatttagttaa

SEQ ID NO: 622297 - DNA, 604 bp, Homo sapiens
tgtgtcagtgtcagttcatcatttgtaacaaatgcaccactctggtgggggatgttgataataaggcaagctatggatgtgtggagatgaaggtataagggaatctttgtacttcttattcaattttgctatcaacgtaaaattgctctgaaaaataaactctatttaaaaaatatgaaagtgatcaacgtaggaagtttgcagtagttcatgtgagaggcagtggtaactaaggggctggaagtaagaaagaagacaaatggataacttggccttttagtgcagtgcttctcakactttaatgtgcaaatgagtgacctaaaaattttgtcaaaatgtagattctgatttactaagtctgcagtgggctctcagaccctattattctaatgagcctctaatgagcaagggcaactactgttcctcaaaccacacttcagatagcaaggttttcaaaactataaaactgcaagaagataacattggataaaatctagatgatctagggtttggcaataacatttgagatacaacaccagattcacggtccatgaaagaaagaattgagaagctacacttaattaaaatttaaaatttttagtgg

SEQ ID NO: 622298 - DNA, 573 bp, Homo sapiens
tacagacataagccaccaagcctggctgggtctccgatatttctaataggagatgccaactaggggatatagagctggataaacagagtttatacagaaaaagttctgggctggagatacaaacttgtgaatcaactgcatacaggtgaaactaaagattyagatgtgtatgcaataacaaatgaaaaatacagagtaggcagtgaagagagcctaagccagccataaggagaaactacacatgaagaaaaaaaaaaaggggtgggaaagcaaaagaaaactagaagccttgtgttgtggacaccaagaagatatttcaataatgacagagagatcaagaattgaatgttgctggcagattaaataggattaaaatcaagttattttgattatttgctttcatctcagctgcttactgggactagagttaagtgccacccttttcactcagcatccctttgtcctctttcccaagactggaccccattagcatgtacttcccccactcccacagcctcagatggattaattgtgttagtccattttcacactgctataacttcccctagactg

SEQ ID NO: 622299 - DNA, 650 bp, Homo sapiens
tcaataaattttaaaaagttgaaatcatatcaaatatctgcccagataactacagaataaaacaataaattaatatcaagaggaacttcagaaactatattcatgcatgggaattaaacaacatgcttctgaatcatctttgggtcaatgaagaaattaagacrcaaatttaaaaattttttgagtcaggcatggtggctcatgcctgtaatcccagcactttgggaggcagaggtgggcggatcacctgaggtcgggagtttgagaccagcctgatcaacatggagaaaccttgtctctactaaaaatacaaaattagctgggcatggtggtacatgcctgtaatcccagctactagggaggctgaggcaggagaatcacttgaacctgggaggcggaggttgcggtgagcctagatcatgccattgcactccagcctgggcaacaagagtgaaactccatctcaaaaaaaaattttttttgaaatgagtgaaaaaggaaatgtaatgtggaaagaaacctctagggtacagcaaaagcagtgctaagaaggaattttgtagcattaaatgtctacatcaaaaaagtagaaagatcagaaataaacgacctaatgctgcacctccaggaactaggaaaacaagaataaa

SEQ ID NO: 622300 - DNA, 517 bp, Homo sapiens
tatacctgatcagcactcctctaaactgtcaaggctatcaaaaataagcaaagtttgagaaatgattatggccaagaggagcctaaggagactttactaaatgtaattctatagcctggatgggacagtgaaccagaaaaaggacattagataacaactaagacactttagataaactatgaactttagttaataataatgttccaatactggctcattagttgttacaaatgcaccatactaaagtaaaatgctaataatagtggggaacctggatgtatggtatatggaaactctctgtactctctgyatttttttgtaaatgtaaaactattctagaataaaaaattgggacagagaaagagagtaagatgcagaataacaagatgaaaataaggagaagaaggaggaggaggggaagaagaagaagaagaaagagatgaaaaatgagaagaggaagaagaaggaggaggaggagaaggagaagaggaggaagaggaggaggaggaagaggaag

SEQ ID NO: 622301 - DNA, 479 bp, Homo sapiens
ttgttaacatgctattggccgacatgttcccatgcttgattaatgctttcttgaatctcatcttacttaaccctcaatagcacttggcaccactgaacgttctctcctttttgaaacatgcttcccttttgagttctgtaactccacactcttmtttttccttttacctcccagacattgccatctcagttttcgttgctggctcattctcttctactttacctctaaatgttggagttttgcatagcttagtcttgattcctcttctcttctttccctttctttttctacattctcacctaagacaatttttttattcctataattgtaaataacaagtcagaaacctgagatttatcattaataccttcttctttctcacttcacgtcaacacccatgggtttcacatgtctcgtagcttcaacttccaagatgtttcaaatctggcttttttttctctatttctattggcaccatc

SEQ ID NO: 622302 - DNA, 596 bp, Homo sapiens
ttctagttgtttttagtaggaggattggtcagaatagacttttttttttttttaattttcagaagcccctcctcttttcactcttcaacccactcaatgtggcttcattcagctgccttgttaacatgctattggccgacatgttcccatgcttgattaatgctttcttgaatctcatcttacttaaccctcaatagcacttggcaccactgaacgttctctcctttttgaaacatgcttcccttttgagttctgtaactccacactcttatttttccttttacctcccagacattgccatctcagttttcgttgctggctcattctcttctactttacctctaaatgttggagttttgcatagcttagtcttgattcctcttctcttctttccctttctttttctacattctcacctaagacaatttttttattcctatarttgtaaataacaagtcagaaacctgagatttatcattaataccttcttctttctcacttcacgtcaacacccatgggtttcacatgtctcgtagcttcaacttccaagatgtttcaaatctggcttttttttctctatttctattggcaccatc

SEQ ID NO: 622303 - DNA, 604 bp, Homo sapiens
tcagctaaatttctagtactgtaattaaaaaaatcagaacttttttccagagtataactatgttatacctgtaagcaccaagtacttactttttagagctttactttatattcaacattagtctactaggctaatgtttactattcattatcaagcttattcctggctcttttgttattctagtcactaagtctgtgtactagtaagaaayagagcatttagtttgcaattaaatgcagacatttaggccagaaaggaagattttgccttgttgggaaattcaaaaaacagaaagtaggtctttcattgtgtgacaacatcaaagaagttttaaaaaagtggggtataaggtagaagataggcataagaatagaactttgtatttatatggctttaacgtttagagatattcttaacctgttttgtttcactttcagtcattatggctgaaatttttgtcatttgcaagtaagaattgttatccatcctgttcaggatcatatatttagtggcagcatctgtttaaggtctggacacagtctgacattaaaaatgacaacaacaataacaaaaaacgtaggaaataaaactcaaattaggatgt

SEQ ID NO: 622304 - DNA, 604 bp, Homo sapiens
tcagctaaatttctagtactgtaattaaaaaaatcagaacttttttccagagtataactatgttatacctgtaagcaccaagtacttactttttagagctttactttatattcaacattagtctactaggctaatgtttactattcattatcaagcttattcctggctcttttgttattctagtcactaagtctgtgtactagtaagaaacagagcatttagtttgcaattaaatgcagacatttaggccagaaaggaagattttgccttgttgggaaattcaaaaaacagaaagtaggtctttcattgtgtgacaacatcaaagaagttttaaaaaagtggggtataaggtagaagataggcataagaatagaactttgtatttatatggctttaacgtttagagrtattcttaacctgttttgtttcactttcagtcattatggctgaaatttttgtcatttgcaagtaagaattgttatccatcctgttcaggatcatatatttagtggcagcatctgtttaaggtctggacacagtctgacattaaaaatgacaacaacaataacaaaaaacgtaggaaataaaactcaaattaggatgt

SEQ ID NO: 622305 - DNA, 536 bp, Homo sapiens
tcaactcccgccccactgcccccatatattatgccaccactttgttacataactaccaagagcaggagcccatcggagggactttaaacaaaataaaagctctgccgaggagtgctttctctttgtttggctgaaagaggatggcagtaatgtaaaacaccttcatactgaaatccaacatccatactcatcaagtggacttagattttcagattatcttctgtcattttgtcacaatgcatttgctttgcaaagggcagcatcagtgggggatgctgttacccacrttcaaaatcaggtcctgctgcaaatggaaattagaggcatctcagaagcaagagtttaacctgatcattgttgtttatcgaggcccatatagtgcctttcacaaacctcagaagctttatggaattctgactgaccccataactctgcctgctggtgaaacatggctgcccttgctgcaggactcatctcttttgtaaaatcaccagcaatccaacaataaatgatttgctttagaatagtgggctgtc

SEQ ID NO: 622306 - DNA, 599 bp, Homo sapiens
agtacaatgcttagtagctccataaatgttgctatcattatttgaattagttttcataaaaaatataactagttgctgacaaaatttctcaaacaaaagccattacatggaaaactgtgcttctgttatctgttaattaytatttccattgtcccaaagtaggattttcagaatgggtatctctcccagccttcactttctctttctctgtatagtgtttgtgtgtgtatgtgtgtgtgtgttgtgcatgaaaatatactctatgaaagaaacttctggctcaataactatttgtatgatttgctcgggattctgtcattatgccagctgaacctgactcgccaccaatcaatgcagcaaaatggtgaacatttgtccattttattggatggtgggcaaggaagactgtctcaacagatagagtcaacatttatgagtgtttggatttcatgaaattatgtcttatccatgaaatatctttgcctcttgagtacttagaaaaaagttctcagctcctgtgtatgttgaaacttggaggcaccaattgagggctgaagtattttaataaggaggtgattactttttcttatgttgtaaaa

SEQ ID NO: 622307 - DNA, 593 bp, Homo sapiens
ttgctcgggattctgtcattatgccagctgaacctgactcgccaccaatcaatgcagcaaaatggtgaacatttgtccattttattggatggtgggcaaggaagactgtctcaacagatagagtcaacatttatgagtgtttggatttcatgaaattatgtcttatccatgaaatatctttgcctcttgagwacttagaaaaaagttctcagctcctgtgtatgttgaaacttggaggcaccaattgagggctgaagtattttaataaggaggtgattactttttcttatgttgtaaaatacacaccttgagactggaagccagcaaaggctttcaagcatcttaagttttgctcattgaaaaagggaaagcagaagtattagtagagcaccaactgtgggccacccacctcacaacaatcctcacaatacctttacaggcaggtattattcatttattacagctaaaggctgtgaaatgaaaaatggccaaaaatcatttacaaattgacagagtgagaagagtgtggctttagccttagagctaacccacaaagactatgttctttgtcacgctacaatatttctttggtg

SEQ ID NO: 622308 - DNA, 593 bp, Homo sapiens
ttgctcgggattctgtcattatgccagctgaacctgactcgccaccaatcaatgcagcaaaatggtgaacatttgtccattttattggatggtgggcaaggaagactgtctcaacagatagagtcaacatttatgagtgtttggatttcatgaaattatgtcttatccatgaaatatctttgcctcttgagtacttagaaaaaagttctcagctcctgtgtatgttgaaacttggaggcaccaattgagggctgaagtattttaataaggagrtgattactttttcttatgttgtaaaatacacaccttgagactggaagccagcaaaggctttcaagcatcttaagttttgctcattgaaaaagggaaagcagaagtattagtagagcaccaactgtgggccacccacctcacaacaatcctcacaatacctttacaggcaggtattattcatttattacagctaaaggctgtgaaatgaaaaatggccaaaaatcatttacaaattgacagagtgagaagagtgtggctttagccttagagctaacccacaaagactatgttctttgtcacgctacaatatttctttggtg

SEQ ID NO: 622309 - DNA, 593 bp, Homo sapiens
ttgctcgggattctgtcattatgccagctgaacctgactcgccaccaatcaatgcagcaaaatggtgaacatttgtccattttattggatggtgggcaaggaagactgtctcaacagatagagtcaacatttatgagtgtttggatttcatgaaattatgtcttatccatgaaatatctttgcctcttgagtacttagaaaaaagttctcagctcctgtgtatgttgaaacttggaggcaccaattgagggctgaagtattttaataaggaggtgattactttttcttatgttgtaaaatacacaccttgagactggaagccagcaaaggctttcaagcatcttargttttgctcattgaaaaagggaaagcagaagtattagtagagcaccaactgtgggccacccacctcacaacaatcctcacaatacctttacaggcaggtattattcatttattacagctaaaggctgtgaaatgaaaaatggccaaaaatcatttacaaattgacagagtgagaagagtgtggctttagccttagagctaacccacaaagactatgttctttgtcacgctacaatatttctttggtg

SEQ ID NO: 622310 - DNA, 541 bp, Homo sapiens
ctaggtactgctgtgattaggtttgaggatataattaaggtcataagtcagctgactttaaggaaaaattgtcctgggtgaacctgacctaattacgtgagatttttgaaaggatcaagttcctcctggtgaaagatttaaagaatgaatgagattttattcatgggaagttcttcattgctagctttggagatgaaagaatgccacatggcaaggtatgtaggccatgaggataatcttgagttgctaacagcaaccattggcagacagctggcaagaaaataggaacttcatttcagaaaccacaaggaactaaattttttcaacaatctaagtaagtttggaagcaggttcttccctagagcatccagacaagagcccactcaggatgacatcttgacttcagcttagtggaacactgagcraagaacctaatcatgctattcctgatcttctaagacctataaaagtgtgagctgaaatgagtgctatttaagctgctaagtttgtggtaatttgttacacagcagtagaaaactaa

SEQ ID NO: 622311 - DNA, 597 bp, Homo sapiens
gctttgaaaaataaacaaggatgatatgatggttaattttatatgtcaactctactgagccatgggatccccagagagttagttaaatatcaatagaaattttggtactataaggggttctagaggaaaagagtttttattttattttattttattttttaattgacatgtaatagttgtacatatttatgagatacatagtgatgtttcaataatgcataacaatcagatcagggaaattagtatatttgtcatctcaaatatttatcatttacttgtgttggtaacattcaatatcagagaaatwgaattttaaggatgagttttctgaactggttttaggatttttggaattggctttataatctgaatgattcagtttccagtagtaaagagagcattgatagtccatggtgtgatttagaaagagagatatgaaaagtacctccattcgatactgttaatgactgataaaaagcaagtagctgtgtggttgtgtttatgatccaatagttccccttgattcatgggggatatgttccaagacgccctagtagatgcctgaaattaagtatagtgctgaacccaattgccatc

SEQ ID NO: 622312 - DNA, 563 bp, Homo sapiens
ccagttgcttaacaattgtagtaaccctaagaatacccaatcacttgatgaaagttgcactgcatagtttttataccagaagatctgtgtgagcccatttccctttccccatgggtggatacgagttttatggagcctgagacttacaaaatttagggggcccagtagaagaaaaaagatgcaaaattatcaacacaaacttcgatgtcagagtattcatttagaatgagaaaagaaattataacaaattaaaataccacaaacaaaacaaaatgaagatataaaatatttttattcaagaatggatggatacatctctatggtatatttttcttaaatattttggytgcaaactcactgatcatcttttcatatgaaagcaattttaataatattttttatctagaaaataaaaagactatttataacttcctccaacatggttgattaaaatttcatttttattattgctggtaaaacataggaccttacccatggacatatacactgtagttttgctacaggtctgtgtctcacaaaaacataagttctatggtggttct

SEQ ID NO: 622313 - DNA, 626 bp, Homo sapiens
aatgcaatatctatcaaaatacaaatgacattcttcacaaaaatataaaaaattctaaaatgtatatggaaccacraaagaccgcaaatagcccaaagcaatcttgtatatttttgggtgacaactatatataatgaaatcctaaacattccttagagtcttacatattacacatatgggaaaagtttagacaacaactgtttgtacaacacattttcctataaccaatatgtggtgacactttggtatgttatgaagatacctgaagcagtaatctggattttcaaaatttactgatgtctatctttaatgccatcagcttaataccattctccttctatatccctcaatacccctgttgcagcctgaattcaaaagcttaggcattgctctgaagagttacgtaaaaataaagcagatcatgacatcaaaagcatacacaaaaaagagaaacaataaatacattggacatcatcaaaattaaaaacccttatgttccaaaggatattatcaagaaagagaaaagacaatccacagaatgagagagcatttttgcaaatcatatatctgacaagggacttgtatctagaatatataaaagactcctacaactcaataaaaagacc

SEQ ID NO: 622314 - DNA, 608 bp, Homo sapiens
aatttgggtggggacacaaagccaaagcatatcaggtaatttcagaaatactggtaaattttgtggaaatgctagaagtcactatataagaggccttaaactcaacctaaggagcaaagacgtaaaaagtttctgcctgtgagtgagactggctttgattccaggttctgccacttaattgtctggcttcaaattttttttaattattaacttttaatttttataggtacatagtagatgtgtgtgtgtatatatatgggatacataagacatcttgatacaggcatacaatgcataataatcatatcagggtaaatagggtacgyatcacctcaagcatttatcctttctttgtgttacaaataatccaattatacttttttagctattttggttatttattgtacatttgtacaataaatgattgttgactatagtcactctgttgtgctatcaaatactagatgttattcattctatctaactatattttgtacccattcatcatccccactccccctaacctctgactacccttcccagcctctggtaaccattgtcctactttatatcttcatgagttcagctgtttccatttttagttcccc

SEQ ID NO: 622315 - DNA, 608 bp, Homo sapiens
aatttgggtggggacacaaagccaaagcatatcaggtaatttcagaaatactggtaaattttgtggaaatgctagaagtcactatataagaggccttaaactcaacctaaggagcaaagacgtaaaaagtttctgcctgtgagtgagactggctttgattccaggttctgccacttaattgtctggcttcaaattttttttaattattaacttttaatttttataggtacatagtagatgtgtgtgtgtatatatatgggatacataagacatcttgatacaggcatacaatgcataataatcatatcagggtaaatagggtacgcrtcacctcaagcatttatcctttctttgtgttacaaataatccaattatacttttttagctattttggttatttattgtacatttgtacaataaatgattgttgactatagtcactctgttgtgctatcaaatactagatgttattcattctatctaactatattttgtacccattcatcatccccactccccctaacctctgactacccttcccagcctctggtaaccattgtcctactttatatcttcatgagttcagctgtttccatttttagttcccc

SEQ ID NO: 622316 - DNA, 446 bp, Homo sapiens
ttcagtctatgtctgtctatataggtgaagtgtgtttttcttgtaggcaacagatgattgggtcttttttttttttttaatcagccactctatttttttttatttgtttgtttgtttttttagttttattttttgagacagagtttggcttttgttgcccaggctagagtgcaatggcatgatctcggctcactgcaacctccacctcccaggttcaaatgattctcctgcctcagcctcctgagtaactgagattacaggtgcccaccaccatgcctgactaattttttgcatttttagtagagatgggtttcaccatgttggtcaggctggtctcaaacccttgacctcagttratcttacccctcttggcctcccaaagtgctgggattacagacgtgagtcactgcactgttttgattggagagattagtccatttaccttc

SEQ ID NO: 622317 - DNA, 619 bp, Homo sapiens
gattgggtcttttttttttttttaatcagccactctatttttttttatttgtttgtttgtttttttagttttattttttgagacagagtttggcttttgttgcccaggctagagtgcaatggcatgatctcggctcactgcaacctccacctcccaggttcaaatgattctcctgcctcagcctcctgagtaactgagattacaggtgcccaccaccatgcctgactaattttttgcatttttagtagagatgggtttcaccatgttggtcaggctggtctcaaacccttgacctcagttaatcttacccctcttggcctcccaaagtgctgggattacagacgtgagtcactgcactgttttgattggagagattagtccatttaccttcaatgttatcactgataagtaaaaattcctgccattttgttatttgttttctggttgttctgtggtcttttcctccttatttcctttcttcctttcttcttttagtgaagatgattttctctggtgatatgttttaatttcttgcttttaaattttttgtgyatctgttgtattttattatttgttgttatcatgaggattgcaaataatatcttacaacctattattt

SEQ ID NO: 622318 - DNA, 388 bp, Homo sapiens
ctccctctctctcttctgagctgcttggatctgaggcatgcgtgacacaagcacccatgtggccaccacccttgagactgcactgggtcagacctgaagccagcacaccactgggtctcacctaaggcctgcagtaaccattgcctggctaccgcctatgtttgctcaaggtactagccctacaatcagtagatggcaaarccagtaagccttgtgtccttcccttcagggcagtgagtttccctggctctgggtgggtccctcatctgggaacaagggcctggagttgaaaaccttaggaatctacctggttctctattctactgcagctgagctggcacccaagccataggacgaagtccttgccgctctttcttctccttttcac

SEQ ID NO: 622319 - DNA, 476 bp, Homo sapiens
ctgggggtatcaaaactgctgtcagaccaaggaggccacacagtgtgatgctttctcctgcctcttctccattctggctatcctgggcacagaggaaatactccatcayagaattagtgagtaaatgtgcagttggacacattcattccatattcctgcataatcaaaccatagctccatgagaaagaaatccttgatgttatgtcttgtgatttagtatacaaaacaaggcagtcttgtaatttccacatatcagggaaatcttagagaaacagctttttatttttactgtctttactgctgctccctctcccaggcaagttttatgagagctggagaaaataattggggagcatctcattgttctcagaagagtgtgtgtgcatgtgcattgttgtattttacctcctccttactccaggtagaaagatactgcattctcagagaactctatcagtcagaaacacaacgaattc

SEQ ID NO: 622320 - DNA, 476 bp, Homo sapiens
ctgggggtatcaaaactgctgtcagaccaaggaggccacacagtgtgatgctttctcctgcctcttctccattctggctatcctgggcacagaggaaatactccatcatagaattagtgagtaaatgtgcagttggacacattcattccatattcctgcataatcaaaccatagctccatgagaaagaaatccttgatgttatgtcttgtgatttagkatacaaaacaaggcagtcttgtaatttccacatatcagggaaatcttagagaaacagctttttatttttactgtctttactgctgctccctctcccaggcaagttttatgagagctggagaaaataattggggagcatctcattgttctcagaagagtgtgtgtgcatgtgcattgttgtattttacctcctccttactccaggtagaaagatactgcattctcagagaactctatcagtcagaaacacaacgaattc

SEQ ID NO: 622321 - DNA, 476 bp, Homo sapiens
ctgggggtatcaaaactgctgtcagaccaaggaggccacacagtgtgatgctttctcctgcctcttctccattctggctatcctgggcacagaggaaatactccatcatagaattagtgagtaaatgtgcagttggacacattcattccatattcctgcataatcaaaccatagctccatgagaaagaaatccttgatgttatgtcttgtgatttagtatacaaaacaaggcagtcttgtaatttccacatatcagggaaatyttagagaaacagctttttatttttactgtctttactgctgctccctctcccaggcaagttttatgagagctggagaaaataattggggagcatctcattgttctcagaagagtgtgtgtgcatgtgcattgttgtattttacctcctccttactccaggtagaaagatactgcattctcagagaactctatcagtcagaaacacaacgaattc

SEQ ID NO: 622322 - DNA, 490 bp, Homo sapiens
gaattcactaatttcaaaagctagtgatatgccctgggggtatcaaaactgctgtcagaccaaggaggccacacagtgtgatgctttctcctgcctcttctccattctggctatcctgggcacagaggaaatactccatcatagaattagtgagtaaatgtgcagttggacacattcattccatattcctgcataatcaaaccatagctccatgagaaagaaatccttgatgttatgtcttgtgatttagtatacaaaacaaggcagtcttgtaatttccacatatcagggaaatcttagagaaacagctttttatttttactgtctttactgctgctccctctcccaggcaagttttatgagagctggagaaaayaattggggagcatctcattgttctcagaagagtgtgtgtgcatgtgcattgttgtattttacctcctccttactccaggtagaaagatactgcattctcagagaactctatcag

SEQ ID NO: 622323 - DNA, 540 bp, Homo sapiens
tctgccatctgtactgtgtggttttgattttatggtcttaagatggcagctgtacttcaagcatcatgtctgcaggccagacagaaaggaggagaaaagagcacaaggcaaaagggtgtgaatcaackttgtcctttttaaaagctttctcagaaacctcaaccagtaattgccactcgtatctcagtgaacagaatagggtcacatgttaatatctattttcaaggaagtctgaggatgaatcttttttaaccaggctgaataccccaccaaataaaatcagtttttcatcatcagggaagaaagagagactggaaactgaataggtaactagcactgtctgccaagaatagtgtttgaagtagtgaatagggtcatcaaagacatttgcataagaaaatttttaggtatgatttctaagaagaacttttgttttaggttgctggcacaatacaaaagcataacaggaaattacaggacattttcataagcaatgacttctaaggtcaaaggtgaaatgacagatttcaaacacaactg

SEQ ID NO: 622324 - DNA, 540 bp, Homo sapiens
tctgccatctgtactgtgtggttttgattttatggtcttaagatggcagctgtacttcaagcatcatgtctgcaggccagacagaaaggaggagaaaagagcacaaggcaaaagggtgtgaatcaactttgtcctttttaaaagctttctcagaaacctcaaccagtaattgccactcgtatctcagtgaacagaatagggtcacatgttaatatctattttcaaggaagtctgaggatgaatcttttttaaccaggytgaataccccaccaaataaaatcagtttttcatcatcagggaagaaagagagactggaaactgaataggtaactagcactgtctgccaagaatagtgtttgaagtagtgaatagggtcatcaaagacatttgcataagaaaatttttaggtatgatttctaagaagaacttttgttttaggttgctggcacaatacaaaagcataacaggaaattacaggacattttcataagcaatgacttctaaggtcaaaggtgaaatgacagatttcaaacacaactg

SEQ ID NO: 622325 - DNA, 523 bp, Homo sapiens
aataaggggaagaatgactaatactaatactaatactaatactaatagtcagaacatcaacatgtcaagtactccttgtttaatactcaccataggtccaaaagcagctaagcacttaatagacgttatctcaaaggaataagaataatgctcgttccacatctgtgacaggctaaataatggccctccaagatgtccacatcctaatacccagaacctgtgaatatattgtatcgcaaatgaggattaaggttgctaagccactgattttaagacagggagattctcctaggttatttgtgtgaacacaaggtcaacacaatgatccttaaaatgggaacgtgtcataagagtcaatgttagagtccactgcawccagtgtgaaaaaaactcaacgggccaccactgactttggctttaaagttggaaggggccacagtcaagggatgtaggcagccttcagaggctggaaataagaaaaaaatggattgtcccctagagcctccagaaggaatacttccac

SEQ ID NO: 622326 - DNA, 599 bp, Homo sapiens
tgtttattttattcaatattttattctctctgtgtttcatttgggatattttctattactatgtcttcaagttcactaatcttctattcctcagtgtctaatttgttttaaatcccattcatgtaattttcatttcaaatatattttcaactctagaaattgttttctttaaataatttctatttctttcaacattagatttatgtttttctcaatttttaagcatatttctaatatttaaaatatctgtttttaagtcttgctgatttaatttttccttcctctctgggtacatttctattgactgatttttgttgtatccttttaaacagcattggttagctgggcatggtggcgtgcacctgtggtcccagctatttgaaaggctgagttgggaggatcacttgagcccagatggttgaggctgcagtgagccatgatggcgccactgcactttagccttggtgacagagcaaggccctatctgaaaaaaagtaarcacataattaaataaataaaagttaaacgccattgggattttttttctgtcaggcaatataattccgtatggatcaagtgattatttgaggcttgtttta

SEQ ID NO: 622327 - DNA, 552 bp, Homo sapiens
aatcaattaattctcctgcagagttccatttacataatgaaaatgcaacgtgctgatattttatacaagtcatttttggtcgtctagactgataatatattgtgtattgattgagggggaaagcctaatggatcttctgttgttgaggttgcaaaattacaattaaagtaaaatgacagamgcaagcatctattggattcatatctatatatctctctttaatataagattctaaatgtctggacctgattaaggctttgctctcatttgagcagaaagggcacataatgtgtaactgttcgtgttctcattgctgtagccaaaatcaatattgtactgtttgcaaacattaccaacgtacaaggctaaatcctgtgtcctccgcataaccagggaagctgtgacttaaatcatacctttactgttgatgcagtggccttttaacctggagaaggaaaggaatcttagtagagcttagaccaaataaataaaaattaagactcctgtgctctacatagtcctatgggaaaataagacttaagttttgatcct

SEQ ID NO: 622328 - DNA, 579 bp, Homo sapiens
ctagtcttagtactagtaccatagtgtgaaaaaaacaataaacaaagaaaatagactagtaacttttcttgatcttgtacctgccaataagcaccaattactttactaacagtragtatcagtgacacccctgggtagaaagatataattatacataacgagaaactgaggcacaaaaaaagccaatgatagatttaggattctggacctacgtggcgatctttaaagatcagagtccagctcgagtgccaagaggatgaagaagccatgccaaagggcagaggctatctacaagacaccttgcatctgccccaaagggatgtccagggaggtggtcccatgagcaggaattatgtttaaatgcatttaattataattctcagcgctcaaagaaaacacatttttccagagatttacattttttccctttagcttatggaggttaaatgtaaaagaacattaaggaggatattttctattcctctggaatttgcaaataagatccaaactattgagctaagagatgccaaataacccatattcaaagaagcctgccaacaactgggacaaacaccactc

SEQ ID NO: 622329 - DNA, 579 bp, Homo sapiens
ctagtcttagtactagtaccatagtgtgaaaaaaacaataaacaaagaaaatagactagtaacttttcttgatcttgtacctgccaataagcaccaattactttactaacagtaagtatcagtgacacccctgggtagaaagatataattatacataacgagaaactgaggcacaaaaaaagccaatgatagatttaggattctggacctacgtggcgatctttaaagatcagagtccagctcgagtgccaagaggatgaagaagycatgccaaagggcagaggctatctacaagacaccttgcatctgccccaaagggatgtccagggaggtggtcccatgagcaggaattatgtttaaatgcatttaattataattctcagcgctcaaagaaaacacatttttccagagatttacattttttccctttagcttatggaggttaaatgtaaaagaacattaaggaggatattttctattcctctggaatttgcaaataagatccaaactattgagctaagagatgccaaataacccatattcaaagaagcctgccaacaactgggacaaacaccactc

SEQ ID NO: 622330 - DNA, 573 bp, Homo sapiens
tacattttttccctttagcttatggaggttaaatgtaaaagaacattaaggaggatattttctattcctctggaatttgcaaataagatccaaactattgagctaagagatgccaaataacccatattcaaagaagcctgccaacaactgggacaaacaccactctcaaggcttcttaagaaccaamgatcaacgcagagtcaaaagctgtcagcttggtgaaaagatacatggctttcttttgccctgtctgctctccaagaaaggaaaaaaaaaggggttctttaccctatcaaaagccaaatgaagcaagttccaaatattagccatgtctatatgaaagatgatcagacatttcaatgtctcaaaggctggcttgttaggtgtgacttgctcctacttaaaagagggaaagggaagaaaacatcagaaagcagccccctttggctctcccttggaccaaatggatcccagggaaagaagcctgcctgaatgttgccagcaccctgctcaagcaggctgatcaccatcagttgaggggaacccagaagctgtgaagtgtgtcattgtgca

SEQ ID NO: 622331 - DNA, 566 bp, Homo sapiens
ataatggtgtaaaacttaaaaaccataagcagtttacagtttttataaagtataaaaaactataatagtgggagcttgatagtagtaaccagcactgggttaagacagctcaataagttggttaaggttggttaaatagatgatttttacgtaatgccttatgttggtactgagacttaaacacagatcatttgacttcagaccttgagtttgttctacattattgaacttctcccataccaaataatttaccctgtcttttataaggaaggaaatgacaagagtgggaaaaaaaactagaaaattgataaggcttttattttcagaactgctttaaaatcaccacctcctccaatttgtttcttaagtaaccagattttaaatcatgtacttgcagtgactagataagattaaaaacaaatgggggttgggatggagacayggtccattgtgcctatcaacttaataaatgacgttatcctcatcagtcaggtccagaggccagcaagtcctgcagtttgctgagtcagacctagcacatttaataaaagggattgaaaaataat

SEQ ID NO: 622332 - DNA, 611 bp, Homo sapiens
ctggctctactactcactacttgcatgaccttggtgaaaatcacttaatctgtctggtctgtgttacaactgtaccatctgttgaattgggggagagggagggagaatgctaatatgtacccttatttacctaacaagcctgggttggggattaaatgagatgtcaatggtgaacatacttttcataaatataaggtcattggtagagcttcagggagaacagagttttagctttcagagtaaagagaaatggtctgttctcttgtctgacatttatagtcattttattttattcytatggtattcatgtcaaaaattccaaccttaatatgactctcataaaaaggcagaacaggaattttaaagttcaaattcaatgtagtgaaataaaatctgagaaagccagagttggaaagaaccttagtcatcaccatcatcatcactgtcatcatcaccaacatcaccttgtatttctctagtgcttacagttcacaaactgtaaagagtccttcacaaacagggtttatctctgggcttcatacttcaggaagaatattgaacaactgcaaatcaatcagatgatggagactctgacatgccacgtaaaaatc

SEQ ID NO: 622333 - DNA, 481 bp, Homo sapiens
cgtgtgtgcgcactctctctctctctgtcactcactgtgtctcctctctatctcccttccttttcttttccccttactcactcaccgcagtacacaagggccrcagtaagcgctcttcctagaaaaagagaataatgggagataagcagcaaatgctgatctataatctgaaatctcctaggcagattctgtgtaagcaaccgggcctggaggtaggggagattggaccctgatttatttggaaggaactctcccatccattgttttaatgatcatccttgaccacctgtgaagtgtgtgttgtaccttccctttggaacgtacaaatctttttcaactagcttcttgctcatagaagtcggggacccaagggttttaaattttgaatagacaagaagatttttttagtatgaacttgagatgatttaagaaaaaaaaatttcattttgttttttgagatggagtctcaccctgtcaccca

SEQ ID NO: 622334 - DNA, 507 bp, Homo sapiens
tccacgcccctgtgataagctcagccccttcccgtcctcaggccaggggttcccagggagcctggctccacaggccagggtgtgggaggaccgcctggccacacctcagccatgtggaggyggcacctgcacacccaagctcgcctgtccggctctctggccctgtgcatccactgtggctcccctcctgcagggccgcccaacttcctcccagggaagcccgccccccggcccccggcttggtcccctcttgggtgtgcccaggctgagctgcccccagggtcgccctcacctggtgcgcagggcctgccaggcggcgtcgatgtcggcatagaggttccactcggaaggcctgcccgcgctggcaccgtagccggagtagtcgtagatgatgttgcagtggaggcgggagttcagcccagtgtagaagctgctcatctggcccaggtccaccgcgttgccgtgcgagaagaagaccgtgtacctggcaccaggcacgcagcgaac

SEQ ID NO: 622335 - DNA, 507 bp, Homo sapiens
tccacgcccctgtgataagctcagccccttcccgtcctcaggccaggggttcccagggagcctggctccacaggccagggtgtgggaggaccgcctggccacacctcagccatgtggaggcggcacctgcacacccaagctcgcctgtccggctctctggccctgtgcatccactgtggctcccctcctgcagggccgcccaacttcctcccagggaagcccgccccccggcccccggcttggtcccctcttgggtgtgcccaggctgagctgcccccagggtcgccctcacctggtgygcagggcctgccaggcggcgtcgatgtcggcatagaggttccactcggaaggcctgcccgcgctggcaccgtagccggagtagtcgtagatgatgttgcagtggaggcgggagttcagcccagtgtagaagctgctcatctggcccaggtccaccgcgttgccgtgcgagaagaagaccgtgtacctggcaccaggcacgcagcgaac

SEQ ID NO: 622336 - DNA, 507 bp, Homo sapiens
tccacgcccctgtgataagctcagccccttcccgtcctcaggccaggggttcccagggagcctggctccacaggccagggtgtgggaggaccgcctggccacacctcagccatgtggaggcggcacctgcacacccaagctcgcctgtccggctctctggccctgtgcatccactgtggctcccctcctgcagggccgcccaacttcctcccagggaagcccgccccccggcccccggcttggtcccctcttgggtgtgcccaggctgagctgcccccagggtcgccctcacctggtgcgcagggcctgccaggcggcgtcgatgtcggcatagaggttccwctcggaaggcctgcccgcgctggcaccgtagccggagtagtcgtagatgatgttgcagtggaggcgggagttcagcccagtgtagaagctgctcatctggcccaggtccaccgcgttgccgtgcgagaagaagaccgtgtacctggcaccaggcacgcagcgaac

SEQ ID NO: 622337 - DNA, 591 bp, Homo sapiens
atctttttcttagtgcctaaggattagacactaaggtaaaggtactgaagcactagtttattaaagtagtcagttaatagaagatgctaacagctcaaatacttttttattcataaagaaagcaaattgaaaaattcaggcaaatataaactattttatttctcaaattaattgttaaatgagattagaaaactaaacctttctaaaccatctgcaagttcccaaagaaaaataatatcactgatgatatgattccatacttagaaaaccctaagaactccacmaaaaggctattagaaatgaaaaataaatgattgtaccaaggtttcaggatacaaaaatcaatataccaaaatctgtggcatttctacacatcaataacgtccaggctgagactcaaatcaagaacacagtcccatttacaatagccacaaaggaaatgaaatatctaggaatacagctaaccaagaaggtgaacaatctctacaaggagaacaaaacactgctgaaagaaatcagagacaacacaaacaaatagaaaaacattctatgcttatggattggaagaaccaatatcattaagatgtccat

SEQ ID NO: 622338 - DNA, 399 bp, Homo sapiens
gtttcatgggctgggcctagcgcccccgctgctattctgtgcagcctcagaacttgttgccctgtatcccagcagctccagcccagcggtggctaaaaggggccaaggttgggctgttgcttcagagggtgtgtggaagtgtggcactccccctccattctctctcttgctccatgattgtgaagatgtgcatgcttccccctcaccttctgtcatgattgtaagtttcctgaggcctcctagtcatgcttcctggtaagcctgcagaactgtgagttaaytaaacctcttttctttataaataactcagtctcaggtagttctttatagcagagtgagaacggactaatataatagccaaaacaacttaagcaaaatgaacaaagatggcagcattgc

SEQ ID NO: 622339 - DNA, 551 bp, Homo sapiens
tatgtgctagtatttggccgaagaaaaccaataggtcaatctagagttattgtggaaggatcgtaccaaagagtgtcttagtgtatttttaaaggaaaggggaatgcctttctctctttctacttcttggtggacagcaattggttttagagtatgagtagatttgtattttctcacattaaaaaggkagaatctacaactgtggaatctatagaagtaaactgggtattttcagttgaatcttgggaaactgactaaagttaacatttttaaaaataataatgctttattttatttttaaactacattttaagatatagttaatatacagaaattataatctatatgtgttacagagagattaatgaaatgggagtaaacttgttattttattaatttgtggcagagttcatatagaaagaattgtttttattgacaaaaatatctcgataagacttaggttttggcaagaatcaaggcaatattatacacttttgagatgtctgtgaaaaagtgaccatgtaaagtcaggtgtatagaaaaaagtgaat

SEQ ID NO: 622340 - DNA, 448 bp, Homo sapiens
gctgaggcgggtggatcacctgaggtcaagagtttgagaccagcctgagcaacatggtgaaactccatctctactraagatacaaaattagctgggcatggtggcacatgcctgtaatcccagctacttgggagactgaggcaggagaatcgcttgaacctgggaggcacagattgcagtgagcagagatggcgccattgcactcctgcctgggcaacaagagccaaactccgtctcaaaaaaaaaaagccaaaaagacaaatatataccagataaagtcctccaaaaaaagagccaggaaaagagaaaggagaccaggagggggttgcatgaagaaaatttagtattattatccagtattgccattgtttaacataatttgagttttaatcaaaatttacatttgcataatttaaaaaaccaaataaaatgtaaagagccctgcctt

SEQ ID NO: 622341 - DNA, 541 bp, Homo sapiens
ctccgtctcaaaaaaaaaaagccaaaaagacaaatatataccagataaagtcctccaaaaaaagagccaggaaaagagaaaggagaccaggagggggttgcatgaagaaaatttagtattattatccagtattgccattgtttaacataatttgagttttaatcaaaatttacatttgcataatttaaaaaaccaaataaaatgtaaagagccctgccttatcattttcctaggaatttccgtgcttagagaaaacaccttcaactcctttagatgtttattctgggctttcatgtctgtaattctgggttttacrtatatttcaccttgatttttaaaatgtagatattatctattgtcttcctcctatagaagatgaatgtttagctcctttcacctcctgcttagcaatccctttatttggttaaatcagtattcagagatttctttattatgactatataaatttactgtacagctatgccatataatatgatttgactatattttctttgctcaaaaaatttgtcttccttagttt

SEQ ID NO: 622342 - DNA, 488 bp, Homo sapiens
agaaatagtttcacttcttcttttcctaattggatgccttttctttttttcacttgactgactgctccagctagcacttccaggactatgttgaataggagtggtaagagtgggcttccttgtcttgttccagttctcagggagaatgctcccagtttttgtccattcaggatgatgttggctatgggtttgtcatagatggatcttattattttgatggatcttattatttgatggatcttataataataataattattattattattattttccttcaatgcctggtttcttgagggtttttatcatgaggggatttggggttttgtgaaaagctttctccgcatccattggggatgatcatatggtctttatttttaatactgtttatgtggtgaatcacacgttttgatttgcatatattgaatcaactttcatcccaggaatcaarcctacttgatcatggtaataaagtttttgatgtgctg

SEQ ID NO: 622343 - DNA, 564 bp, Homo sapiens
taccacattttgttttcagataaatgacatgagggttgcttctacattttagtcattgtgaatagtgctgctatgaacactggcatacaaacatctctttgagatcctgctttcaattcttttgggtacatacacataaatggaattgctggatcatacagtaattctatttttaaatttttgagttgccgccatactgtttgccacagtggctatacagttttacacgtccacgcagtgcacaaggcttccaatttccccacatcctccccaacacttattttctggggttttttaaatagcagtcatcctaatttgtgtgaagtggtatctcactgtagttttgatttgcatttccgtcatgattagtgatgctaagcatcttttcatgtgcttattggcgtatcttctttggaaaaatgtctacttaagtcctttgcccatttyaaaatcatgttgcttttctattgttgagttcttaattatatattttgatattgatccattatcagatataaggtttgcaaatatcttctcccatactctgggttaccttttaactgt

SEQ ID NO: 622344 - DNA, 616 bp, Homo sapiens
atgtcaaatacagtacatagttctcaaaagagaatgtttaatgcaatatttagcaatataaaatcaaaattaaattattgaaataatagtctgagcagtaaaggagagagcctctctgaaaagtaaagggggttaaaggagacttcaattatatgaagamctttggaaacaaaggtagaatcaaatataaaatgtcctattaacactcaatcttctatggatactccattccttctgttgaacttacaattgctacacatgtgacttcatggaatgttaggtgcaggacagcaatatcaccattaaaaaatggaaacaaaaatgctcaataatgttaatctacatggataaactttatgttttaatagaaatgattatgtggactaaatcatattggaagtcaatttatgatttacagtccctaacaaataaattgaaatggtaaaattattttttgaatggatatttgttattacctgtgttgaatattaactgcaagtttaaaaagcactcttctagaaatgttgactgatgacaatagataagtggacacaattcacagctaaagcacaaaaagatatgttgctagtatatgtccaatttacacacaaattaa

SEQ ID NO: 622345 - DNA, 259 bp, Homo sapiens
aggagcaaagaatagaaaagcagattatcactattagctacarggtgggaaccaccatggtccccatcagcctactccactaagaacacaaggatgtcttgccactcaggtaaccaagagctattcctactgggaacccccaaaagggagatgatggttgcacatccctttcctgcccaagaagtggccactgttgagctgctttgggaaaggagtcactgcctctctcatcccatgtgtgctttgatgctagaccatg

SEQ ID NO: 622346 - DNA, 385 bp, Homo sapiens
tcagaaatagaatcaaacaagtagaagaaacaagttcagagcttgaagacaaggctattgaactaaccgaatccagcaaagacaattaaaaaacacacctttaactgtgttttcttatacttcgggctttttgtaggttaatgacttttcttaattcctaagtaccatctgagtaattagtcacatggttataaagaatatcaaatgtcagactaaattcttttcaagcttccctcagcagcttaaagttgaaactttttcattccttcttctataatcttgggtatttgaaatgggtattctcccacttgaacataggcaaaatctaatttcttgtctctaccctatggaatctcrtttagtaattatttctaaacttatcctg

SEQ ID NO: 622347 - DNA, 620 bp, Homo sapiens
cctcaagtttccaaaagggttgtgcatgacttgatagttgccgtgttaattttgttctgagggaatcaacaaccatatctaggagagtattccctattcacttaagtagaaactcaggctaaggcaacagagtcatccaaatggtagactgagttactaggagagctaaaagaaaaattaatctctcttctagccattactaattcttctttgagcacaaattatgcattttgctagctggttccaaccaggggaagcacatgtttctaagaggtttcccgcagagtcaggctgagttttgaactgattttcctgcagggatggccaaatggcccacaagtggcttcacattccaycaaaggctgaatatctgaactcgagatgaaattcccaatgatgggtcatgaataatcaaattctttaaaaaaaattcactcactctaaaaaggccttctcctgaagcagcatccctcttttaataggttttggttttctggtgtgaggtaatatagacatttccccccctcttccatatacagatgatgcatttccagtattttcttatatatgcagaacagggaaggaatgctaacttggaatgaggggctcctaccatatgc

SEQ ID NO: 622348 - DNA, 562 bp, Homo sapiens
gaattcaatcatgacctcatcttaaaatattgtttagccaaaatgttagagtttctctgacagagtggmatcctgaacctgtcctaatattatatcatcctagtaatccactgctacttgggttttttcctcaagtttatttctctaccattttactgatccttcatgtttataagtaaaaataactacagtcgggtgcagtggctcccacccgtgatcctagcactttgggtggccgaggcaggcagatcacttgaggtcaggacttcgagaccagcctggccaacatggtgaaacctcatctctactaaaaatacaaagattaatcgggcatggtggcaggtgcctgtacaatcccagctactcaggaggctgaggaaggagaatcgcttgaacttgagaggcggaggttgcagtgagctgagatcgtgccattgcactccagcctgggggacaagagtaagactttgtctcaaaaaacaaaacaagaaaacaaaaactatagatggtaaagaaatttctgaactcagacgcgacacagcagtatcaaacattccttgaa

SEQ ID NO: 622349 - DNA, 562 bp, Homo sapiens
tgtgtatatatatatatttcaggatgtaaccaataaattgcattctctaaagaaggagatttggagtaaaattaaattttggttttattcaacttctaacaaatttattcctattgcctcctgtttctcatatacatgctaaagatgattattctaacaaagtgccactgtgtaggttgatgagataatgtgtaagtttggagaaccatgttggactcacagtggaattcatagaaagacattgatttcctaaatccccatgttcttcaaatgaaactgaacatatgtggtgaaattttattgttggagccaacattatagttgtatcaatgagcctggaatgaaatttaagagttttrgagaaaattcaaaactgaaatttcactttgttatatgtattcaaagaaaagtgtaaaggttgaggctaaacctccctaatctttaccctcaatggagtgactgtcacttctggatgaaacatatattcaataaacacaaacaacaataaaaataagcaaaaacaagagaagttaaaagatgaagcttacatggcaataaacag

SEQ ID NO: 622350 - DNA, 562 bp, Homo sapiens
tgtgtatatatatatatttcaggatgtaaccaataaattgcattctctaaagaaggagatttggagtaaaattaaattttggttttattcaacttctaacaaatttattcctattgcctcctgtttctcatatacatgctaaagatgattattctaacaaagtgccactgtgtaggttgatgagataatgtgtaagtttggagaaccatgttggactcacagtggaattcatagaaagacattgatttcctaaatccccatgttcttcaaatgaaactgaacatatgtggtgaaattttattgttggagccaacattatagttgtatcaatgagcctggaatgaaatttaagagttttagagaaaattcaaaactgaaatttcactttgttatatgtattcaaagaaaagtgtaaaggttgaggctaaacctccctaatctttaccctcaatggagtgactgtcacttctggatgaaacatatattcaataaacacaaacaacaataaaaataagcaaaaacaagagaagttaraagatgaagcttacatggcaataaacag

SEQ ID NO: 622351 - DNA, 663 bp, Homo sapiens
tgcagaagaatgaaaccagacacctatttcttggcttataaaaaaatcaaaatgatttaaagactttaagacctcaaattatgaaactactaacagaaaacattggggaaactctccaggacattggactgggcaaagatttcttgagcaattcactgcaggcacaggcagtcaaagcaaaggtgcacaaatgggatcaaattaagataaaaagcatttgcagaacaaaggaaacaatcaasaaagtaaagagacaatccacagaatgagagaaaatattttaaaactattcatctgacaagggattagtaaccagaatttataaggggctcaaacaactctataggaaaaagtctaataatccaatttaaaaatgggaaaaagttctgaaaaaattttctacaaagaagacatacaaatggcaaaatggtgtatgaaaagttgctcaacatcatcaattatctgagaaatacaagttaaaacagcaatgagataccatctcatcccggttagaattgcttttatccaaccgtcaggcaataacaaatgctggtgaggatgtggagaaaaagaaacccctgcacacttcataagtatgtaaattggtgcaagcactacaaaaaacagtttagaggttcctcaaaaaactaaaaattggccagg

SEQ ID NO: 622352 - DNA, 663 bp, Homo sapiens
tgcagaagaatgaaaccagacacctatttcttggcttataaaaaaatcaaaatgatttaaagactttaagacctcaaattatgaaactactaacagaaaacattggggaaactctccaggacattggactgggcaaagatttcttgagcaattcactgcaggcacaggcagtcaaagcaaaggtgcacaaatgggatcaaattaagataaaaagcatttgcagaacaaaggaaacaatcaagaaagtaaagagacaatccayagaatgagagaaaatattttaaaactattcatctgacaagggattagtaaccagaatttataaggggctcaaacaactctataggaaaaagtctaataatccaatttaaaaatgggaaaaagttctgaaaaaattttctacaaagaagacatacaaatggcaaaatggtgtatgaaaagttgctcaacatcatcaattatctgagaaatacaagttaaaacagcaatgagataccatctcatcccggttagaattgcttttatccaaccgtcaggcaataacaaatgctggtgaggatgtggagaaaaagaaacccctgcacacttcataagtatgtaaattggtgcaagcactacaaaaaacagtttagaggttcctcaaaaaactaaaaattggccagg

SEQ ID NO: 622353 - DNA, 663 bp, Homo sapiens
tgcagaagaatgaaaccagacacctatttcttggcttataaaaaaatcaaaatgatttaaagactttaagacctcaaattatgaaactactaacagaaaacattggggaaactctccaggacattggactgggcaaagatttcttgagcaattcactgcaggcacaggcagtcaaagcaaaggtgcacaaatgggatcaaattaagataaaaagcatttgcagaacaaaggaaacaatcaagaaagtaaagagacaatccacagaatgagagaaaatattttaaaactattcatctgacaagggattagtaaccagaatttataaggggctcaaacaactctataggaaaaagtctaataatccaatttaaaaatgggaaaaagttctgaaaaaattttctacaaagaagacatacaaatggcaaaatggtgtatgaaaagttgctcaacatcatcaattatctgagaaatacaagttaaaacagcaatgagataccatctcatcccggttagaattgcttttatccaaccgtcaggcaataacaaatgctggtgaggatgtggagaaaaagaaacccytgcacacttcataagtatgtaaattggtgcaagcactacaaaaaacagtttagaggttcctcaaaaaactaaaaattggccagg

SEQ ID NO: 622354 - DNA, 454 bp, Homo sapiens
attgtgtaggggtgaggctaggtcaaaaagtcttttcactaatagagtcccacatcccccaggaagaattcctgggttagcaattaatccaagttgactgggtttaccatgaactttagaagcagcctgtcctttcttgcagagggtgcattgttttcccaagtgaaggactggaatcgtttcttggtatttcatcatgaaaatgtcttactgaatcttggcatctctccagagagattttaaaggcagtgatgtggggataagagcctcgctctaaattgaaaattagattttaaatttctttagaaatagaggctatgacaaactaaaaaagctctttctcaaaagtcactggcctcttgtttggggagaaatctttaaagttataaataagtgtgaaycaaaaagcattggagccaagtctcaatcaatgtagatgtttctggtgccaagg

SEQ ID NO: 622355 - DNA, 576 bp, Homo sapiens
aggggtgaggctaggtcaaaaagtcttttcactaatagagtcccacatcccccaggaagaattcctgggttagcaattaatccaagttgactgggtttaccatgaactttagaagcagcctgtcctttcttgcagagggtgcattgttttcccaagtgaaggactggaatcgtttcttggtatttcatcatgaaaatgtcttactgaatcttggcatctctccagagagattttaaaggcagtgatgtggggataagagcctcgctctaaattgaaaattagattttaaatttctttagaaatagaggctatgacaaactaaaaaagctctttctcaaaagtcactggcctcttgtttggggagaaatctttaaagttataaataagtgtgaaccaaaaagcattggagccaagtctcaatcaatgtagatgtttctggtgccaaggttgaggatgcacctgggaaaaaggaacacaakatgacaggagcatctgagatttgtgcttcttccaaagacggttgggagacttcaatatttaaaagggaaacagtgggcattagaggaaaaaaaagaa

SEQ ID NO: 622356 - DNA, 576 bp, Homo sapiens
aggggtgaggctaggtcaaaaagtcttttcactaatagagtcccacatcccccaggaagaattcctgggttagcaattaatccaagttgactgggtttaccatgaactttagaagcagcctgtcctttcttgcagagggtgcattgttttcccaagtgaaggactggaatcgtttcttggtatttcatcatgaaaatgtcttactgaatcttggcatctctccagagagattttaaaggcagtgatgtggggataagagcctcgctctaaattgaaaattagattttaaatttctttagaaatagaggctatgacaaactaaaaaagctctttctcaaaagtcactggcctcttgtttggggagaaatctttaaagttataaataagtgtgaaccaaaaagcattggagccaagtctcaatcaatgtagatgtttctggtgccaaggttgaggatgcacctgggaaaaaggaacacaatatgacaggagcatctgagatttgtgcttcttccmaagacggttgggagacttcaatatttaaaagggaaacagtgggcattagaggaaaaaaaagaa

SEQ ID NO: 622357 - DNA, 544 bp, Homo sapiens
gcttcttccaaagacggttgggagacttcaatatttaaaagggaaacagtgggcattagaggaaaaaaaagaaaaaggaagtgtgaataaatgaagtagtttccttctytgcaggctttaatcagtgttgactgaattcgcactttagatgtgacaggagagggtttagaggaacactcaactgggcgttcatctcctgctcagtgaatctggattgtatataagataaggtacacagtagaggaagcagtcaaatatgcatttgtttcaggggagtggagggatgactcccaggcctgtctttgtccactgcctgtcaagataagccattcatttacattgtcagcatgacaattcaagagaatggttttcgggtaaagatctttgggccagcaaggaatttccttgctagcagattgtgagggaggtcccttggggaggtatgtagccttctacctgtgtagctgtccattccggaacagtatggaatctgtagccatacagtcgggaacagatatggaatatagttttgcatgacagagtt

SEQ ID NO: 622358 - DNA, 422 bp, Homo sapiens
gaattcaagtaatctgctacattctgatgtacagaaaagataagagtccataactactaagaaacgagattgaattatctaagatttgtatattagtactatccacaagtatctgcagttcaaaatcagatgtatcaaacttcaacattctccagtatttctctggtttgaaccaaaactttctagtaagtccagaatctatttaaagcatcctgcgattgatcagcatcaagactgcaaacttaccttacacagtatcttccccaaacacgatgatctgaatatttagagagaaaccttacagaactaaggtagtacatgcaattgttcagcatttccttttatgtagtaagtatggggaactaagaggcatacatcagactttctaaactggaggtaytctatgttctgtatttcaaact

SEQ ID NO: 622359 - DNA, 512 bp, Homo sapiens
ggtgaatcctttgaagatcgagaaatagaacagcctgaatctgtaaatgcctaatgtcagttgacagcagctgcattatgcaggctgttaagatagagatccagtgacaaatagagcttgcatcatggtgatggctagtactcccattcaggagatacattgacatcactgtctctggggtccttgtccctagcctgcaattacagttcatataaaatgygacagactccttaagaaaaatgtaacctctcaatttacaaagtaaacacccaagataagtcaggttgctggcagctgcaacttaaattgcttttttctcttttactttgttcacgacattgttttgaaagtttctctttttacacttccaactttcaggcatctctcttgaaatagaaatcaatgtttctaaggaagtattgtcttgcaaaagatacattttgggccattccccatcactcaagtattagtatgtaatcatcctgtctttcttgtaacttgtaatacataaa

SEQ ID NO: 622360 - DNA, 383 bp, Homo sapiens
aggtctcactatgttacccaggctggtctcaaatacccaggctaaagcaatccttccacctcagccttccaaagtgttgggattataggcataagctactgcccctggatgatatatatatgatatttatttatattttttatatcaataggtttttggggaaccgktggtgtttggttacattaataagttctttcatggcaatttgagaatttggtgcactcatcacccaagtagtgtacactgtacctgatgtgtagtcttttatccctcacctgcttccaccctttcccccaagtccccaaagtctattgtatcattattatccctttgcatcctcatagcttacctcccacgtgtgagtgagaacatacaatgtttgg

SEQ ID NO: 622361 - DNA, 383 bp, Homo sapiens
aggtctcactatgttacccaggctggtctcaaatacccaggctaaagcaatccttccacctcagccttccaaagtgttgggattataggcataagctactgcccctggatgatatatatatgatatttatttatattttttatatcaataggtttttggggaaccggtggtgtttggttacattaataagttctttmatggcaatttgagaatttggtgcactcatcacccaagtagtgtacactgtacctgatgtgtagtcttttatccctcacctgcttccaccctttcccccaagtccccaaagtctattgtatcattattatccctttgcatcctcatagcttacctcccacgtgtgagtgagaacatacaatgtttgg

SEQ ID NO: 622362 - DNA, 383 bp, Homo sapiens
aggtctcactatgttacccaggctggtctcaaatacccaggctaaagcaatccttccacctcagccttccaaagtgttgggattataggcataagctactgcccctggatgatatatatatgatatttatttatattttttatatcaataggtttttggggaaccggtggtgtttggttacattaataagttctttcrtggcaatttgagaatttggtgcactcatcacccaagtagtgtacactgtacctgatgtgtagtcttttatccctcacctgcttccaccctttcccccaagtccccaaagtctattgtatcattattatccctttgcatcctcatagcttacctcccacgtgtgagtgagaacatacaatgtttgg

SEQ ID NO: 622363 - DNA, 383 bp, Homo sapiens
aggtctcactatgttacccaggctggtctcaaatacccaggctaaagcaatccttccacctcagccttccaaagtgttgggattataggcataagctactgcccctggatgatatatatatgatatttatttatattttttatatcaataggtttttggggaaccggtggtgtttggttacattaataagttctttcatggcaatttgagaatttggtgcactcatcacccaagtagtgtacactgtacctgatgtgtagtcttttatccctcacctgcttccaccctttcccccaagtccccaaagtctattgtatcattattatccctttgcatcctcatagcttacctcccasgtgtgagtgagaacatacaatgtttgg

SEQ ID NO: 622364 - DNA, 609 bp, Homo sapiens
tgcttggtcaaaacatggtaaaggtcacagagtaaagcagatatgtgtgaagagagaggcaaaaaccagaggaacatctggctttatagccacccactctcctaggaactaatctatttttataagaactaatccagtcttgccagagtgagaacccactcactatcacaagaatggcatgaagccattcatgagggatatgaccccatgacccaaatatcttccactaggcaccacctctcaacaccaccacatcgggaatcaaatttcgacatgtatgttggtagagamaaaccatatccaaaccatagcattctgcctctgactccaaaaaccaatggctttcttacatacaaaaatacaatcattccatcccagtagtccctagagtcttgacttgtcccagcaccaactcaaaagtttaaagtacaaagtctcatttgagactgaaggcaagctccttccaactatgagcctgtgaaagcaaagcaagttatttacctccacattacaatggtgggacagacatttggtaaacattctcattccaaaaaggagaatttgaccaaaagaaagaaatgacagaccccatgtaagtctgaaacccag

SEQ ID NO: 622365 - DNA, 429 bp, Homo sapiens
  misc_feature 31, 38, 39, 52, 57, 58, 59: n = A,T,C or G
gctaaactcccgtgaccatctgccactatcnccagtcnnatgctctagcccnagctnnnctcccgtgcccatcggccactatctacagtcaaatgctctagcccaagctaaactcccgtgaccatctgccactatctacagtcaaatgcgctagcccaagctaaactcccgtgaccatctgccactatctacagtcaaatgckctagcccaagctaaactcccgtgaccatctgccactatctacagtcaaatgctctagcccaagctaaactcccgtgaccatctgccactatctacagtcaaatgctctagcccaagctaaactcccgtgaccatctgccactatctacagtcaaatgcgctagcccaagctaaactcccgtgaccatctgccactatctacagtcaaatgctctagcccaagctaa

SEQ ID NO: 622366 - DNA, 597 bp, Homo sapiens
tctctgcgggctgaagccctagaagtcagcggagacaccagccctaaagtgtgggcccaacaaacagaagacagacaccatctggacaaacgttttcatgaaaagacttccgtgacatggtaacatgatcaacatcattctagaacacacgcacagaaaacggttcagaaatacttgtctgcaagatccaagagggtggagttgcttccacctagttacctattttattccaactgtcygctacatggtgtacacttcataaatattcatagtatgaagtcaagacatgaattttaaagttttgtttctatctgaactattacattatggttgatttttaaattttatttgtactagactgtgattttagattttttagtcatatcaatatttaaaataaaaacaaactttaaaattaaatgcatcactaaagtaacagagcttgcaggtgaataacagaagaaagaacataacaagctaatgaagagtgatagcaatgaagatgtgaaaaagacaacctcaattttagtatggagttcattactgatcagcgatactctctttgacacatcaactgaactctgagtttcaaagcct

SEQ ID NO: 622367 - DNA, 597 bp, Homo sapiens
tctctgcgggctgaagccctagaagtcagcggagacaccagccctaaagtgtgggcccaacaaacagaagacagacaccatctggacaaacgttttcatgaaaagacttccgtgacatggtaacatgatcaacatcattctagaacacacgcacagaaaacggttcagaaatacttgtctgcaagatccaagagggtggagttgcttccacctagttacctattttattccaactgtctgctacatggtgtacacttcataaatattcatagtatgaagtcaagacatgaattttaaagttttgtttctatctgaactattacattatggttgatttttaaattttatttgtactagactgtgattttagattttttagtcatatcaatatttaaaataaaaacaaactttaaaattaaatgcatcactaaagtaacagagcttgcaggtgaataacagaagaaagaacataacaagctaatgaagagtgatagcaaygaagatgtgaaaaagacaacctcaattttagtatggagttcattactgatcagcgatactctctttgacacatcaactgaactctgagtttcaaagcct

SEQ ID NO: 622368 - DNA, 580 bp, Homo sapiens
catggctatcaaatatttgtcttttaaaaagggttacccattctattgttattgctggtggtggtatttttggagscaaattgccaaaaataacgaccaaattttctttcaggtttttgtagacccaatatttttctgggtaagtgtttaggattggagagaggaaataccagataatcagatgcaggatgtttttcttcatagcaaattatttccttgatcatatggatcatcttgtgtccttgattcgggtttgggtattttaataaagttctttaaacctgtaatttttttttttttctgagatggagtttcacactgttgcctgagctggagtcaattggcacgatcttggcttactgaaacctccgcctcctgggttcaagtgattctcctgcctcaccttctgagtagttgggattataggcacccaccaccatacccagctaattttttgtatttttagcagagacagggtttcaccatgttggccagggtggtcttaaactcctgaactcgtgattcactgcttacaacctcccaaagtgcgggattacaggcctgagccactgcgcccaac

SEQ ID NO: 622369 - DNA, 571 bp, Homo sapiens
actttttttgtcttccttaaattttattttattttttaagaaacagagtctcactatgttgcataggccagcctcaaacacttgggctcaagtgatcctcccgtctcagcctctttagttgctgggaatacaggaacataccattgtgcctggcaagttgtaattctttacttaaaaaaaatctgatttgggatataaaaacaaccagttgaaatggttacgttttaatcacatttggtactcatgacactgtggattcttgaaaattgtttctcttttttgccctctgtcctctagcttgtgtttttcgatgcaatatataagaacttgttatttctgtatagtgctctaaaagaactcatgcctccccagatattgtgatgagtgatkgtcatgtatgcttgaagtcagtcctattattgaagaaccttctttgacacagagaacaaagggagctgaaagcttgttataccaaaactctaaaattcttgtgtgtctgactagagagctgttggtaaacagcaggcaaaatcttgcccgaaactgttcattccaaagcgtacatcaaagt

SEQ ID NO: 622370 - DNA, 561 bp, Homo sapiens
tcatttgtgttcaccctactccaagaatatgttatacatctcagtaagttgcccattaaataataaagtttgaccaacaaatggcaagcctcagctatttagggaaaccctagcatgcggaacaccttattttctaataatgctattactagaaaatttggaaaacatgcatttcaaaatgaatgaacaaacatacccctataggtaagacgtatcctatagtcattaaaagtcctccctaggtataacaaagaagaccataatgaagaaaayatagctcatattttttagatgacactatttccaaaaatgatgtttttcattttcttttgggaaagtgagcatcatttccacccatcagacttaggaagattccaaccctgataccctggatccttactgaagccaggagatgtgttaaaaagagccattctgtcctctttccagtaccctctggagctttaggacaagcgatctagctacatctctctctccctctccatccacctcctgaaactgccctactgttggccctcataatgttgagttggaactatagca

SEQ ID NO: 622371 - DNA, 561 bp, Homo sapiens
tcatttgtgttcaccctactccaagaatatgttatacatctcagtaagttgcccattaaataataaagtttgaccaacaaatggcaagcctcagctatttagggaaaccctagcatgcggaacaccttattttctaataatgctattactagaaaatttggaaaacatgcatttcaaaatgaatgaacaaacatacccctataggtaagacgtatcctatagtcattaaaagtcctccctaggtataacaaagaagaccataatgaagaaaacatagctcatattttttagatgacactatttccaaaaatgatgtttttcattttcttttgggaaagtgagcatcatttccacccatcagacttaggaagattccaaccctgataccctggatccttactgaagccaggagatgtgtyaaaaagagccattctgtcctctttccagtaccctctggagctttaggacaagcgatctagctacatctctctctccctctccatccacctcctgaaactgccctactgttggccctcataatgttgagttggaactatagca

SEQ ID NO: 622372 - DNA, 561 bp, Homo sapiens
tcatttgtgttcaccctactccaagaatatgttatacatctcagtaagttgcccattaaataataaagtttgaccaacaaatggcaagcctcagctatttagggaaaccctagcatgcggaacaccttattttctaataatgctattactagaaaatttggaaaacatgcatttcaaaatgaatgaacaaacatacccctataggtaagacgtatcctatagtcattaaaagtcctccctaggtataacaaagaagaccataatgaagaaaacatagctcatattttttagatgacactatttccaaaaatgatgtttttcattttcttttgggaaagtgagcatcatttccacccatcagacttaggaagattccaaccctgataccctggatccttactgaagccaggagatgtgttaaaaagagccattctgtcctctttccagtaccctctggagctttaggacaagcgatctagctacatctctctctccctctccatccacctcctgaaactgccctmctgttggccctcataatgttgagttggaactatagca

SEQ ID NO: 622373 - DNA, 606 bp, Homo sapiens
acccatgacaatttagactcactgtatgcaagattgagtcagccattgcatgcactttatgtttgaaatggagtctcgctctgttacccaggctggagtgtagtggcatgatctcggctgactgcaacctctgcctcccaggttcaagcaattctcttgtctcagcctcctgagtagctgggattgcaggtgcctgccaccacacccagctaacttttgtatttttagtagagatggggttttgccatrttggccaggctggtcttgagctcctgacctcaggcgatccacctgccttggccttccaaagtgctaggattacaggtgtgagccaccacacccagaccactgcatgcgcttttatgaggttcttgcttcctcttatatgagcacatagacaataggagagaagaggtaggaaggagggtagagatcccatcttggctacatgttactctgatggtgtcagagtaaatccacaagggagtcatcaaagatcagttatcaagaaacatgtttacaatctatgacttataacctcttttttaagatactgttttctctcagtaaccaattggtttctctcagttaaaggtcaaaaaagag

SEQ ID NO: 622374 - DNA, 606 bp, Homo sapiens
acccatgacaatttagactcactgtatgcaagattgagtcagccattgcatgcactttatgtttgaaatggagtctcgctctgttacccaggctggagtgtagtggcatgatctcggctgactgcaacctctgcctcccaggttcaagcaattctcttgtctcagcctcctgagtagctgggattgcaggtgcctgccaccacacccagctaacttttgtatttttagtagagatggggttttgccatgttggccaggctggtcttgagctcctgacctcaggcgatccacctgccttggscttccaaagtgctaggattacaggtgtgagccaccacacccagaccactgcatgcgcttttatgaggttcttgcttcctcttatatgagcacatagacaataggagagaagaggtaggaaggagggtagagatcccatcttggctacatgttactctgatggtgtcagagtaaatccacaagggagtcatcaaagatcagttatcaagaaacatgtttacaatctatgacttataacctcttttttaagatactgttttctctcagtaaccaattggtttctctcagttaaaggtcaaaaaagag

SEQ ID NO: 622375 - DNA, 559 bp, Homo sapiens
caccttgcatgtcactgctgcagcttagagacctcggtccacctccagggcctgatccctgtcatttgcatactaccaatcaaggaataagaactacatctcaggatctgaagctctaaaatgcatctgttcatgtgcatgttgcagagaccagtcagtattttggtggaaaacatcagcccaatctctacctaaaggactaccatcagcaccaggatccattcagggtatgaaactgaatactgttaggaaacctggtccagaaaagccaaagcaactccaaatttagggaagtaaatgtgttttcattgcgtgtggtttcatgcttgtaaatgaggccacaaagttaaacttcacttaggagtgataaaagttgttcctccacacacacaaaaagcatccaaatagaagatgccttatctgcagacataatcctatcacaaggtaccagttatgtttctactcttgggatgacctccatggagaagcctaggcaaatttcctttatgcccaactgttaggcaactttcagtgctmgtaggctgttgcctctcccttc

SEQ ID NO: 622376 - DNA, 617 bp, Homo sapiens
taatatttaaattaaaacacaaatacattgcacaactgtacaaaagtattttctttatgtccttattctataagctttttactatttaattttttaaaaatatcctttcactttttaaacttttttgttaaaaactaacacacaaacatacacattattccaagcctaccagaatcagaatcatcaatgtctctgtttaccgtctccacatcttgtcccactggaaagttttcaagggcagtaacatgcatggagctgtcatctcctatgataacaatgacctcttctggaacacctcctgaagaatctgcctgaggatgttttacagttaacttatttgtaataagtagatggagtatattctaaaataacactaaaaagtataatatagtagacrgataaactaatagcagtcatttattattaatatcaaatagtatgcactatatataattgtatgtgctatactattatatgactggcagtgcagtaggtttgtttacaagagcatcaccacaatcatgtgaatgatgcattgtactacgacattaggactgctgtgacaacactggacaataggaaatcttcagctccattacaatctaacggggatcaca

SEQ ID NO: 622377 - DNA, 525 bp, Homo sapiens
actttttaaacttttttgttaaaaactaacacacaaacatacacattattccaagcctaccagaatcagaatcatcaatgtctctgtttaccgtctccacatcttgtcccactggaaagttttcaagggcagtaacatgcatggagctgtcatctcctatgataacaatgacctcttctggaacacctcctgaagaatctgcctgaggatgttttacagttaacttatttgtaataagtagatggagtatattctaaaataacactaaaaagtataatatagtagacggataaactaatarcagtcatttattattaatatcaaatagtatgcactatatataattgtatgtgctatactattatatgactggcagtgcagtaggtttgtttacaagagcatcaccacaatcatgtgaatgatgcattgtactacgacattaggactgctgtgacaacactggacaataggaaatcttcagctccattacaatctaacggggatcacagttgtatatgtcgcctg

SEQ ID NO: 622378 - DNA, 545 bp, Homo sapiens
ttaagacagttgtctacatcactcagaaggagtgtgcccctactggaaatcaacaaactttatttataagactagttgtrcttttggatcactttaatccttacaacccaatcaaatctggattacctaatgaaattgattatatttgaaaacttattgtggaattctggtgaaacactccccctttcttcctttctgctccaagcatttattgagcatgtactatgtctcaggcgtggtattaagaaccttatatcaaattgaaatattgagttatttattgatttttgtctcacccttctcctccttctctactcctctttccagcctattcattgacctgctcaagtaacatatctctccagccaaattttaagtaaccaccttcctttattactgttatggaaataaaatactttaagaaacagaagctttgggaggccaaagtgggcagatcaattgaggtcaagagttcaagaccagcctagccaacatggtgaaaccatgtctctgctaaaaatacaaaaattagcctggcgtggtga

SEQ ID NO: 622379 - DNA, 545 bp, Homo sapiens
ttaagacagttgtctacatcactcagaaggagtgtgcccctactggaaatcaacaaactttatttataagactagttgtgcttttggatcactttaatccttacaacccaatcaaatctggattacctaatgaaattgattatatttgaaaacttattgtggaattctggtgaaacactccccctttcttcctttctgctccaagcatttattgagcatgtactatgtctcaggcgtggtattaagaaccttatatcaaattgaaatattgagttatttattratttttgtctcacccttctcctccttctctactcctctttccagcctattcattgacctgctcaagtaacatatctctccagccaaattttaagtaaccaccttcctttattactgttatggaaataaaatactttaagaaacagaagctttgggaggccaaagtgggcagatcaattgaggtcaagagttcaagaccagcctagccaacatggtgaaaccatgtctctgctaaaaatacaaaaattagcctggcgtggtga

SEQ ID NO: 622380 - DNA, 532 bp, Homo sapiens
ctctgctaaaaatacaaaaattagcctggcgtggtgactcagcccctgtaatcccagctactctggaggcctgggcacgcaggagaatcacttgaacctggraggaaaaggttgcagtaagctgagatcacaccactgctctccagcctgggaaacacagtaagagtttgtcttaaaataaaataaaataaaataaatggaaaatttcttttgctgcatttaacaataaaatgataagaaaacaggtaacactcgctgcttctatcaagaattacagcatgtgccttactcctcaggctttgagagagggttgaaaaggaaggactcttcatgtggcatggggtgtaaccaacaactgtgtgaacaaaccccggagggactgagagtcccgtgccattgaaaagtgggcaggcagacctttcgtttctgctccacagcatgtatgtggataattaatgtggcaggtgtgcttggctgactaaccaacaggcatgactttccttgtttcttgataacagaagtttagttctgc

SEQ ID NO: 622381 - DNA, 586 bp, Homo sapiens
gccaccatacccagttaacttttctaatttttgtagagatggagtcttgctgtgttgcccaggctggtctcaaactccagggctcaagcgatcctctcacctcagcctcccaaagtgctgggatttacgggcgagaacaactgcacccagcccatacagcacatttttacctcaaagtcacacgtcccttggggatctaacattcctaggtgttcattctgtgtgttggcactgtgcagggggctttctttccattcaccttatttgcttctcacagtaactgctgaagaaattccattttacaaagaaggaaatgaggttaagtacttgcccaaggtcatacagctaatatgtggccaggatctgaacctggctccatcrtctgcagagcccaggctctcgcaccattgctacactgcactgcctggccctgcagagaccagtccttcaccttctgagtggccatctgcataacctcttcatgctgggggctgggagagggagaggggaaaagaaggccaaagtttactctacctggaccccactaggtcatcctggacatcaaacacggcttgtcccacccttg

SEQ ID NO: 622382 - DNA, 402 bp, Homo sapiens
gtgctaatgaattctggtcctaaatcaggaggtgcagcacgcagcacctaagaaggagaaaagttattcaatgtgatctctagaacaggtggggatgagacagcgagtcaggatgctcctctctaacatgcacccacagagccagcccttggagagcatactgggggagatcgggaaccagtggttgggaagggggcaggacccaaccatatggggtgccactcgtcttgaggyctctgtgatgccaccccctagagttgtccactgctgggggccctaaggatgaggctacaaatacacagatcaaccccttttgcaaagcattcaaagccccttagagttgggccccagcccaccctacagccaccttttcccctgagtggcccctcctggagctaattt

SEQ ID NO: 622383 - DNA, 638 bp, Homo sapiens
ggaagtaaaagatgtatgttatagctaaaggataatggggaacaagamcggtaatgagcctggaaagatggggggcttatcttggaaaggcatggaaagcctttagggtttgaagcaaaggattggcatgctctgatttgctttttagaaggaccattgtgactgcagtgtggagaatggattggagagggaaagcataaatgaaaggtaacagtgtttgtagacatgacccagtgagagctattggtggcctggcctcgaagaggagatgggatggagctagcaaagatagggattcaggaaatatttaacccatgccttctgtctcagggcaggagtgattttcaacccttgaaaatgagggcttgtcctgcctgtctgccatttggagtcttcatctatgttgtacatcatgttgaaaagatgtgtattagcttcctactaatcaaagcatgtttgtggatatggacaccattacaggtttctcatgcttcccttggctcccagacactgggctaaagtgttggattggttgtgcagtatccatacttgtcaactagctatttgtcatttattttgcaccctagaggccaaaaatgttagagcagaatgattccttaagttttatcccatccaac

SEQ ID NO: 622384 - DNA, 585 bp, Homo sapiens
cggtatagctaccatgcctgctgcatttctaggagtagaatataaaccaacttttataaacttgaactaaaacgttcaaataaatttaaaattttctgaaaattttaaactttctgctgttaagtttcttgaggaatgatctgaatgatatgaccatctttggagggcttgagtgtgtacattcagaactttatcccacacaaggatagactatacagaataaatgcagtttttgtagggaatatctcattaccattttttctcaaggatgtrttaaactaaattatggttattttatacttcagttgtgctagccagcctttttgaaatccttcaagatgtcatcaaatgtttcacactctaaaaaaatagtgctgtcatatatgagacaggcaaaaggacagcattatcactgttaggagtcttcaagaggaaactgtttacatgaagtggaggactgtcctgcctgcctggaagatgctggccagtcctcacccctgcgccacactgagggccatccacacagcccctgaggtttccctgctgccagccaggctgctcgcgggcatgagagtgaggaaattt

SEQ ID NO: 622385 - DNA, 554 bp, Homo sapiens
tgatccctgaattccagtttctgtgtctccttttctatgagactgccaaaaatattgctcagctggtgagcctctctgtctctaagatcatcaaagggaaaagtaccaatgaatacaaggttcaccttccactctttccatgatcttgacttttcaagaycttgctgcctcagtggctccttgataccttcaaacagattcttaaaaatacttttttgtctatgttttcctgtttacagcatttcgtgttttcagcagcagataagctgcttggtctgaaataagctactccaccattgctggaagctgaaaatctgctgaagatacagttggccctctaaattcatggcttctgcgttgagtgatctctgctggattgaactggatgcagaacatgtggatatgcagggccagctgtgtttttgatctgcagttgttggaacctgcagatgctggacctggggatttataacccagcgataccatgggctgactgtaagagacttaaacatccacagatgttggtatttgtggggatcctggaactaacgtct

SEQ ID NO: 622386 - DNA, 490 bp, Homo sapiens
cttttttgggggatggtaatgtgaggggaagccctcctcatcttgctgctgtactgaagggctgtgcccagggccacacagggccctctccgtacatcgttgaggactgtctgccccagctcacccagtgctgaagggctgtgcccagggccacacagggccctctccgtacatygttgaggactgtctgccccagctcacccataggcccaggtgatgttcaagacaaggaccagatgtcctcatcaccaggtgtgaattgcagcttcctgctgacctgtgtcacaccattcatccacgcacacatccgcacacacagtcactaacatattttgcacattactgaatcctacttctttcttctcgtttttctctccctttctcatctacatctgcccatctttcagagaaaagtatgtttgcttgtgaattaatcaaatctatatggcgttttactttctagacagatgatgtagtttctttttttttt

SEQ ID NO: 622387 - DNA, 590 bp, Homo sapiens
tggctttactactgaataatttagtatatttaagtgtccatttaagaccctagactgacattggccagtgcttttacaacccacttgggtgagactccatgacaggtctatcatgtaagaagagactgaagcattagctrctgtggagagtccagggagccctgactcaccccaacaaggactagaattaggaataagtcttttctgtttatagcttgaacattaactctctggaaataaggcgtcttatattgcttagggcttaaatagacttaagtctccttttttttgcttattactcacccataattaccattttcatctccagtctttcagcaaacctgcttgaatctctccctccctccctgtttctctccttttgtccctttctttcttcctcaagtatttcatgatgtgagacatatatcataggccaaccatgggaatcctgagattgaaagatgtccccttcctgtaggtggcttccattctaatgtggagatagatacccagacacagtttaatttggtgtggcagtgattttactggaagcctgtttgaagtatagtggcaatgaaagagaaaaaaaa

SEQ ID NO: 622388 - DNA, 602 bp, Homo sapiens
ttactttgtctctcctttctcagagtaaaagttgttacataagtgatctcaatctaataatgtgctgcagtggaaaagccttatggagcaaatgttaaagaaacagagagacatcatcaagatggctgactagaggcagctggcactcatctcctccaccaaaaagaaggaaaacagtsagcagataaccacaggttaaacagagcatctaagagggaacaatggaattcagcacaaaagggacagggactctccaaggcacagagaaagagggaagataagcagcagtctcagccgggattggctcagagccaggaaaggctccccattgtagggaaaaggtaagcaagaaatctccagttgtccacattaccaccacagatgcctgccatcctagccacaggagagctgctcagcttcacaggccctgagcctagtatagggagttgactggagtccatcatggaattgttcccaagggcattcatgctgcattctagtcacccctcaggacccaaggtgctgtggcatggcaccattttaagagcccagcaacaaccagactatatcctgccctggaccccagaagcccctccattcca

SEQ ID NO: 622389 - DNA, 539 bp, Homo sapiens
gaatcatgtcatctgcaagcacagacaatttgacttcctctcttcctatttgaataygctttatttctttctcttgcctgattgtcctggccagaacttccaatactatgttgaataggagtggcgagagagggcatccttgtcttgtgccggttttcaaagggaatgcttccagtttttgcctattcgagctctgataagggttagactacctcctcaagtgggtccctgacccctgtgtatcctgactaggagacacctcccagtaggggccaacagacacctcataccggagagctctggctggcatctggtgggtgcccttctgggacaaaccttccagaggaaggaacaggcagcaatctttgctgttctgcagcctccgctggtgatacccaggcaaaccaggtctggagtggacctcagcaaactccagcagacttgcagcagaggggcctgactgttagaaggaaaactaacaaacagaaaggaatagcatcaacatcaacaaaaaggacgtccactcagagaccccatct

SEQ ID NO: 622390 - DNA, 539 bp, Homo sapiens
gaatcatgtcatctgcaagcacagacaatttgacttcctctcttcctatttgaatatgctttatttctttctcttgcctgattgtcctggccagaacttccaatactatgttgaataggagtggcgagagagggcatccttgtcttgtgccggttttcaaagggaatgcttccagtttttgcctattcgagctctgataagggttagactacctcctcaagtgggtccctgacccctgtgtatcctgactaggagacacctcccagtaggggccaacagacacctcataccggagagctctggctggcatctggtgggtgcccttctgggacaaaccttccagaggaaggaacaggcagcaatctttgctgttctgcagcctccgctggtgatacccaggcaaaccrggtctggagtggacctcagcaaactccagcagacttgcagcagaggggcctgactgttagaaggaaaactaacaaacagaaaggaatagcatcaacatcaacaaaaaggacgtccactcagagaccccatct

SEQ ID NO: 622391 - DNA, 539 bp, Homo sapiens
gaatcatgtcatctgcaagcacagacaatttgacttcctctcttcctatttgaatatgctttatttctttctcttgcctgattgtcctggccagaacttccaatactatgttgaataggagtggcgagagagggcatccttgtcttgtgccggttttcaaagggaatgcttccagtttttgcctattcgagctctgataagggttagactacctcctcaagtgggtccctgacccctgtgtatcctgactaggagacacctcccagtaggggccaacagacacctcataccggagagctctggctggcatctggtgggtgcccttctgggacaaaccttccagaggaaggaacaggcagcaatctttgctgttctgcagcctccgctggtgatacccaggcaaaccaggtctggagwggacctcagcaaactccagcagacttgcagcagaggggcctgactgttagaaggaaaactaacaaacagaaaggaatagcatcaacatcaacaaaaaggacgtccactcagagaccccatct

SEQ ID NO: 622392 - DNA, 595 bp, Homo sapiens
ttactttggttcactacattgatgacattctgctaaattggcctggtgaacagtaaatggcaaattccttcactgatctactaagaccatacatgccaaaatcccaccacagaagtgaagtttctaaattacaatactgtagacaatttgaggttattcccttcaragtgaaagatgagttattgcacctttggaatataccaattagaaagtgacatagcacttggtggactttggatttttcagtgttagagatcccatttgactatgctactctgacccatttactgagtggcatttatcaataggaagatccctggaattttggagcaaaggcactccctcttctgtagataattcttttgagaaatagcacctggtttgcaacagagctgtctaacatgaagtgggtattaactgattcatcaagacccaaaatttggaatatgaacaatcaatccatcaccaaatggaaatggtacatacagaggtcaggttcgaatcagtcatgaaggcgtgagtaagttgcatgagaaggtggctcgggttctcttgacaccagttcttgctgcacggctgtctcacctttaattta

SEQ ID NO: 622393 - DNA, 595 bp, Homo sapiens
ttactttggttcactacattgatgacattctgctaaattggcctggtgaacagtaaatggcaaattccttcactgatctactaagaccatacatgccaaaatcccaccacagaagtgaagtttctaaattacaatactgtagacaatttgaggttattcccttcagaktgaaagatgagttattgcacctttggaatataccaattagaaagtgacatagcacttggtggactttggatttttcagtgttagagatcccatttgactatgctactctgacccatttactgagtggcatttatcaataggaagatccctggaattttggagcaaaggcactccctcttctgtagataattcttttgagaaatagcacctggtttgcaacagagctgtctaacatgaagtgggtattaactgattcatcaagacccaaaatttggaatatgaacaatcaatccatcaccaaatggaaatggtacatacagaggtcaggttcgaatcagtcatgaaggcgtgagtaagttgcatgagaaggtggctcgggttctcttgacaccagttcttgctgcacggctgtctcacctttaattta

SEQ ID NO: 622394 - DNA, 604 bp, Homo sapiens
tcactgtgtcacccaagctggagttcagtggtgcagtctcagctctctgcaacctctgcctcccaggctcaagtgattcttgtgcctcagcctccccagtagctgggaccacaggcatgtgccagcacgccctgctaatattttgtttgtttgtttgtttgtttttggtagagacagagtttcacatgttgcccagtctggtattgaactcctgaactcaagctatccacccgccttggccttccacagtgctgggattacaggcatgaacmccagcacccggtcttattgctcctttgatagtaatctgttttattaccccacatagtaatctgttttctcctcttttcagcagttttattatgatgtttaatttaaaatttcatttattttacttggcatttgtaggggtccttgaatagtgctggtttcatttatctcatctgtaatggaaaattcttagcaaatatttattcaaataatgcttctgacccttctcttgcttcttcaaatattccagttccatgtatattagactttctttctgtgcccccttgtctcttaccctgttctattttttctttcttttgactttataacttca

SEQ ID NO: 622395 - DNA, 604 bp, Homo sapiens
tcactgtgtcacccaagctggagttcagtggtgcagtctcagctctctgcaacctctgcctcccaggctcaagtgattcttgtgcctcagcctccccagtagctgggaccacaggcatgtgccagcacgccctgctaatattttgtttgtttgtttgtttgtttttggtagagacagagtttcacatgttgcccagtctggtattgaactcctgaactcaagctatccacccgccttggccttccacagtgctgggattacaggcatgaacaccagcacccggtcttattgctcctttgatagtaatctgttttattaccccacatagtaatctgttttctcctctttwcagcagttttattatgatgtttaatttaaaatttcatttattttacttggcatttgtaggggtccttgaatagtgctggtttcatttatctcatctgtaatggaaaattcttagcaaatatttattcaaataatgcttctgacccttctcttgcttcttcaaatattccagttccatgtatattagactttctttctgtgcccccttgtctcttaccctgttctattttttctttcttttgactttataacttca

SEQ ID NO: 622396 - DNA, 499 bp, Homo sapiens
gggtctttttttaatcaattcagccattctgtcatttttttttcatcaacatttgttttaagttctggggtacgtgtgcagtatgtgcaggtttgttacatgggtaaacgtgtgccatcatggtttgctgcacagatcaacccatcacctaggtattaagctcagcattcattagttattcttcctgatgctctccctccccctaacccctcaacaggtcccaaagtgtgttgttctcccccaccatgtgtccgtgtgttctcattrttcagttcccacttataagtgagaacatgcaatgtttggttttctattcctgtgttagtttgctgagggataatgacttccagctccacccatggccctgcaaaggacatgatctcattcctttttatggttagatagtattccatggcatatatgtaccatattttccttgtctggtctattgttaatgggcatttgggttgattccatgtccttactattgtgaatagtg

SEQ ID NO: 622397 - DNA, 587 bp, Homo sapiens
ctctcccaatcccgcatctctccttgttgctcagatgttgttagcttgctctctgaggacgcttgtgtcattgtctctgacaacgaagctcattcctagagggcaggctgggtccttggctgttgtatctagtttagaacttttcctaawccatgctcatggagtaggacctagagaacaactcagagccagttctcaccccagaagaagaaataactatctgaacttcatccaacattctttccacgtatgttgtttgccatttattgtctctgatgagatttagagaattatttcacctgataaatgaataaatgttttcttctctgcttattaaagtgaacagtaatcttgtagccacttaatcatgttttccatgctgtagttttcaattaaagtatctttagtggaagaccctcgatacaagactctgagctctgtatgtgcgtgtgttcgtatgtgtgaaatactgaattatctggcatgcctaatcagggcctctttctgtttgctgtccattttgtaaggtttatttcttactgggacactggggccgtgatcacctgcacagtgatgggcgaagggtc

SEQ ID NO: 622398 - DNA, 587 bp, Homo sapiens
ctctcccaatcccgcatctctccttgttgctcagatgttgttagcttgctctctgaggacgcttgtgtcattgtctctgacaacgaagctcattcctagagggcaggctgggtccttggctgttgtatctagtttagaacttttcctaatccatgctcatggagtaggacctagagaacaactcagagccagttctcaccccagaagaagaaatarctatctgaacttcatccaacattctttccacgtatgttgtttgccatttattgtctctgatgagatttagagaattatttcacctgataaatgaataaatgttttcttctctgcttattaaagtgaacagtaatcttgtagccacttaatcatgttttccatgctgtagttttcaattaaagtatctttagtggaagaccctcgatacaagactctgagctctgtatgtgcgtgtgttcgtatgtgtgaaatactgaattatctggcatgcctaatcagggcctctttctgtttgctgtccattttgtaaggtttatttcttactgggacactggggccgtgatcacctgcacagtgatgggcgaagggtc

SEQ ID NO: 622399 - DNA, 565 bp, Homo sapiens
atgaattttctattaaaatgtttttattttaaaaaaatacatataagctgggtgtggtggctcacacctgtaatctcagtgctttgggaggccaaagtgggaggatccctcgaggcaagaagtttgagatcaacctggggtaacataggaagaccttgtcttacaaaaaattagaaaattagctgggcatggtagggtgcacctttagtcccagctcatcgggaggctgaggtggaatgatcacttttgaccccaggagttcgaggtaacagttagstttgattgtaccactgcactccagcctgggcaacagaacaagaccccatctctaaaaaaaagtaaaataaaaattaatataaaacgtggaacttttcaccagtggagatgagtgaatagaatatatagtctgccgatttatagaagtatggcatctggatataagttaagtttcttttctcattaattcccctgttagcagttgctaattattattatcaaagtcggcttgctgttccccagggcctgtagtacaagcatatgacttccttcctgttgagtagtggtt

SEQ ID NO: 622400 - DNA, 544 bp, Homo sapiens
tcaggtgtcgtcttctcctcaactctcaaaaaaaaaaaaacaaaaaaaacattaaatcgatgaggagcttaaaactgatgatgtcttagaatcttagaaataagacaggggtggaatgcattgtcccaaacttaactgcccatggaaccctggagttccatggaacacactttgggaaagattgctccatcctgtttgctgcctgttcatttgatgtcggataaattcccagcctgaaggctgtcagggttgcagccattaaatttcagaaggattgtgctaggcagacatsttttattgagaagatctgaacccagagacactcattatataaacgagccccgaagggtgagacccagcctcttgaccaggcattattgagccaggctttaggttagatgagacagacagatcctttctggactgaatgtggtaaaagatgccccagacctgcccattcattagaaagtaagcccaaaaagcgtggaggtagacaaagttggcaaaggcctcccctccctcctccaagaaaggcagtgagctt

SEQ ID NO: 622401 - DNA, 602 bp, Homo sapiens
tttacaaaccctggggcagctcctgcatgaggagggccagcacattcagggaactgaaataattcaggccctcctgagcacaagcttgtcctctatgcaaaggtgaagcagttcatacactcagaggattttagaattaaaaggaacagttttaactgttggactttagtcctycaatccatccttatggttttctgggagagaaaaaggtccaccgaggtaaagtgagttgcccacacacgtgactggctgatgtggcctgcagactcgtatcccggagatcatgccaatctcaagccaccgaacataattatcacctacttccagaatgacattccatatccctgaaaatggaaaatcaattttgaaacaatctaagcaaagaaagaggaccatcttctgtgctagtgtgttgtatgcagtaggaagaacgggcttcggagtggacacagacccatgttcaaatgtaaattcttccatttactaggtgggtgatttcaggcagcatgcttaacctttcagagcctcagtttatatcatcagtaaaatgaagataacctttcaagaattcatcaaaaagattaatggaacagtatccatag

SEQ ID NO: 622402 - DNA, 602 bp, Homo sapiens
tttacaaaccctggggcagctcctgcatgaggagggccagcacattcagggaactgaaataattcaggccctcctgagcacaagcttgtcctctatgcaaaggtgaagcagttcatacactcagaggattttagaattaaaaggaacagttttaactgttggactttagtccttcaatccatccttatggttttctgggagagaaaaaggtccaccgaggtaaagtgagttgcccacacacgtgactggctgatgtggcctgcagrctcgtatcccggagatcatgccaatctcaagccaccgaacataattatcacctacttccagaatgacattccatatccctgaaaatggaaaatcaattttgaaacaatctaagcaaagaaagaggaccatcttctgtgctagtgtgttgtatgcagtaggaagaacgggcttcggagtggacacagacccatgttcaaatgtaaattcttccatttactaggtgggtgatttcaggcagcatgcttaacctttcagagcctcagtttatatcatcagtaaaatgaagataacctttcaagaattcatcaaaaagattaatggaacagtatccatag

SEQ ID NO: 622403 - DNA, 527 bp, Homo sapiens
tgtcaaggataatacagagaaacttctgccaccagtctgcagttctgtctcactagggaattgtccctgagcagtgtggccctgggaagctcctctgtgctggcctggccaggatcctcttttcattgtcccctttttgtcctggtcaggcacaattgtgcccgcactaggatgttttctgcgtcttgcctcctaaccacgccaagctttcagcctttacttgggaatctaaacaatgccttcctgacgttgcactccttgttctctctcacctgagtgtttttgtctgtatgaccagctgccacacaaaggaacaacagcagggttctcagggaggggcacttctttggttcacaaagttagaactctactccttcctccttttgaactcactgggcttgggaagaaagcrcctctcctgctttctctgtgggtcccaactgaggtgggtgctattggtccctgagggagacacagacaaatccccgaaagcctggcatagcactgtctgtcagtgcaggtttcat

SEQ ID NO: 622404 - DNA, 581 bp, Homo sapiens
tgaggcacactgcagcctcaatggagacaactacacctgcacaacaggcaaacctcaagagcctcagcaagttgagaaggccagtgtgtgcttgagaaaggggaaagtggccagcctcacccggtccaggcggctccctcctgcaccagctctcaagaggccagctccttcctgagtcaggtggttctcagataaagtgaaagtggaggctacgcttatttccttttgaattctcagacctgctgatttccatttttgttggagccttgtgtgattrtgttaccctcttccctttttcctttcaaaaggatgttttggggcatcatggcagcatgtggaagagtatgtgtatatgggtgcccaggtttgtgtatgtgtgttacgtaggtgggggtatgcatgcccatattggtgccaggctctgagagacaaagaaacaagtatgccatctttagatctggttttaaaaaagaaacaccccagccaagggcgtttatctgcttaatgtaccagaactcaactgcaggaaacccatttctatattagcatatcatgaaaatgtgcagtgcagctgcctggga

SEQ ID NO: 622405 - DNA, 584 bp, Homo sapiens
taagtaagacaaatcctagcaatacggatggcaaaaaataagcattcaacaaatataagctgttactgtttttattattgatcatgaaatagaacatcagcatttctcttttttacttctggtatattttaattctgcatccccactttggagtaattttataatatttcctaacagactggaattctttctcttctttctctttcttttatcctctttatgagtagcaaaaaaagttgaacaactggaaagaccccgtcttcttcataactgtcttcccagcagctaacatattctctgacacataktaggcactcaacttgtaatagatggccacagggttgaaaggaatgtccagaattgatcagatgatggggtaggaaagaagagaatcattctggtttctttatccttctatctcaagtcatatgctgcatatactgaagcagtagaaggaacttgggaatataaattatattaaagctgcagattcttcaaataatgtgcccaagcctggattctgaaggcttatttgtcaggtaagacagcagatactgaatctcatattagctcacaggataatg

SEQ ID NO: 622406 - DNA, 584 bp, Homo sapiens
taagtaagacaaatcctagcaatacggatggcaaaaaataagcattcaacaaatataagctgttactgtttttattattgatcatgaaatagaacatcagcatttctcttttttacttctggtatattttaattctgcatccccactttggagtaattttataatatttcctaacagactggaattctttctcttctttctctttcttttatcctctttatgagtagcaaaaaaagttgaacaactggaaagaccccgtcttcttcataactgtcttcccagcagctaacatattctctgacacatattaggcactcaacttgtaatagatggccacagggwtgaaaggaatgtccagaattgatcagatgatggggtaggaaagaagagaatcattctggtttctttatccttctatctcaagtcatatgctgcatatactgaagcagtagaaggaacttgggaatataaattatattaaagctgcagattcttcaaataatgtgcccaagcctggattctgaaggcttatttgtcaggtaagacagcagatactgaatctcatattagctcacaggataatg

SEQ ID NO: 622407 - DNA, 517 bp, Homo sapiens
gatatagtccatttagaggtatttttttgtgacttaaaatatatgtcaaaatcattttttaaaatatatgaagattatattttccagcaccatttttacrtccttcttcactgaataaccttgacagctttgtcaaaaatcagttgtgtatctatgtagatctatttcttcactttttttttttttttttaaatgaagccttgctctgtcgtccaggctggagtacagtggcatgatctcggctcactgaaacctctgcttcccaggttcagtgatactcctgcctcagcctcctgagtagctgggattacaggtgcctgccaccacacccagctaatttttgtatttttagtagagatagggtttcaccaagttggccaggcaggtcccaaactcctgacctcaagtgatccgcccaccttggcctcccaaagtgctgggattacaggtgtgagccactgcaccctgcctatgtaggtctatttctgaactctctgtgctctttaattgatctatg

SEQ ID NO: 622408 - DNA, 517 bp, Homo sapiens
gatatagtccatttagaggtatttttttgtgacttaaaatatatgtcaaaatcattttttaaaatatatgaagattatattttccagcaccatttttacatccttcttcactgaataaccttgacagctttgtcaaaaatcagttgtgtatctatgtagatctatttcttcactttttttttttttttttaaatgaagccttgctctgtcgtccaggctggagtacagtggcatgatctcggctcactgaaacctctgcttcccaggttcagtgatwctcctgcctcagcctcctgagtagctgggattacaggtgcctgccaccacacccagctaatttttgtatttttagtagagatagggtttcaccaagttggccaggcaggtcccaaactcctgacctcaagtgatccgcccaccttggcctcccaaagtgctgggattacaggtgtgagccactgcaccctgcctatgtaggtctatttctgaactctctgtgctctttaattgatctatg

SEQ ID NO: 622409 - DNA, 517 bp, Homo sapiens
gatatagtccatttagaggtatttttttgtgacttaaaatatatgtcaaaatcattttttaaaatatatgaagattatattttccagcaccatttttacatccttcttcactgaataaccttgacagctttgtcaaaaatcagttgtgtatctatgtagatctatttcttcactttttttttttttttttaaatgaagccttgctctgtcgtccaggctggagtacagtggcatgatctcggctcactgaaacctctgcttcccaggttcagtgatactcctgcctcagcctcctgagtagctgggattacaggtgcctgccaccacacccagctaatttttgtatttttagtagagatagggtttcaccaagttggccaggcaggtcccaaactcctgacctcaagtgatccrcccaccttggcctcccaaagtgctgggattacaggtgtgagccactgcaccctgcctatgtaggtctatttctgaactctctgtgctctttaattgatctatg

SEQ ID NO: 622410 - DNA, 577 bp, Homo sapiens
aataaaagtaaactagtgatttttccagcccattcaggtgtaggttattcatgtgatagtaaaagttcatatgcacaattttaaaacactaaaatgggtcaagactgaacaagagattttgtaaaacacacaggtgttgatgatggtatctctttctcttgaaagccaggatggaaagaatgtttttaatcaagaatctggacagcttattggggagtgctggagcagcctcagagagtggcttttaaatttcactttataacattttacaaaaattagatggcagaatagaaaacttctaaagaggtactagaaggcactgattctctttattttatttgattgttttaaatcaaaaygataaacttagagctctattccattatattttaaacctgtcattttgagctaacttgtcatttatctatctttttatgctgtaaagtttattggaaataagttaattcattttaataaatgctttgtgcttttaggagtgaaaaaatcccacttgcattaaataaaaatactattatgattgcatctgtaatcatttctgtcatgggaaaatggtgtt

SEQ ID NO: 622411 - DNA, 576 bp, Homo sapiens
tgaggtcatttattaaattgactatcttactattggctaagtgcaaagaacacctgatttacctaagtgtattaaattgtagtattttctttatctttttctttttagctaatttttaattagtgaatctattttcatgmccttaatttttatgattgaaaatttagactgtatctccaaatactccctcaacaaatttaatatttctctatttccgggatattttgcacttaaaagctattctactgccaatgtgtttagccaactgcattcaaagcataagatagaatatcactatatagggaaaaggctgggcatggtggctcatgcctgtaatcccagcactttgggaggtcaatgtgggctgatcacttgaggtttaagaccagtctggccaacatggtgaaaccctgtatctaccaaaagtacacaaatcagctgggcacaattgcgggcacatgtaatctcagctgctcgggaggctgaggcagaagaattgcttgaacccaggaggcagagcttgcagtgggccaagatggcgccactgaactccagcctggatgacagagtgagacc

SEQ ID NO: 622412 - DNA, 576 bp, Homo sapiens
tgaggtcatttattaaattgactatcttactattggctaagtgcaaagaacacctgatttacctaagtgtattaaattgtagtattttctttatctttttctttttagctaatttttaattagtgaatctattttcatgcccttaatttttatgattgaaaatttagactgtatctccaaatactccctcaacaaatttaatatttctctatttccgggatattttgcacttaaaagctattctactgccaatgtgtttagccaactgcattcaaagcataagatagaatatcactatatagggaaaaggctgggcatggtggctcatgcctgtaatcccagcactttgggaggtcaatgtgggctgatcacttgaggtttaagaccagtctggccaacatggtgaaaccctgtatctaccaaaagtacacaaatcagctgggcacaattgcgggcacatgtaatctcagctgctcgggaggctgaggcagaagaattgcttgaacccaggaggcagagcttgcagtgrgccaagatggcgccactgaactccagcctggatgacagagtgagacc

SEQ ID NO: 622413 - DNA, 623 bp, Homo sapiens
actacctgggtgatgggatcaatcgtatcccaaaccgcagcatcacacaatgtgcccatgtaacgaacctacacatgtacccctgaacttaaaagttgaagtttcttaaaaaatgaaggcaaggatgggcgcagtggctcacgcctgtaatcccagcactttgggaggctgaggcgggcagatcaggaggtcaggagatcgagaccatcctggccaagatagtgaaactccatcactactaaaaatacaaaaattagctgggcgtggtggctcatgcctctagtcccagttactcgggaggctgaggcagcagaatcacttgaacctgggaggcagaggttgcagtgagccgggwtggtgccactgcactccagcctggcaacagagtgagactctgtctcaaaaaaaaaaaaagaaaaagaaaaaagaaaagaaggcaaaataaaggtgttttcaaacaaacagaaaaaatgaaatgaaatttttataacataaacaaataaataaataaagtaaatacatctcccttttggcaccatggtatttttattcagtatcagtcatttttccattctcagatcagcaaatctctaatataataacaaaaaagctaagtacttcta

SEQ ID NO: 622414 - DNA, 561 bp, Homo sapiens
gaccagactaaaaatgcctttctttgaacaacytttgggctcctaaacttgatgaggagaaaatagactacgaaacctgtacaagaccaaggaggatgactctccaacatccactttgaatgtggtcatggaaggtaatggataaggaagaactttccagatgatagagccaggagccatggagaacaatggacaagggaagaatgttgcccctagtgagaagcagcagcatctaatccaggaacttcctccactggcctggcaaaaggatttcataaagtttgcccagtagggtttcatcattgcttaatccagtgagctgtgtctcccattctttcttcttacgaatagaagtattattgtgaacggagttattgcgcaaagtgtccgtacttcatccctgaataccggggggaaagggacaaggaagataacaagtcttttttgtccacaggttgagttgccagctcatgagaagccacatttggacattataaagaaaactgtgtatcatccgggtattaagggcctggaattggactaaagaaggggaggaggtgg

SEQ ID NO: 622415 - DNA, 547 bp, Homo sapiens
  misc_feature 516, 519, 521, 533, 543: n = A,T,C or G
tacgaaacctgtacaagaccaaggaggatgactctccaacatccactttgaatgtggtcatggaaggtaatggataaggaagaactttccagatgatagagccaggagccatggagaacaatggacaagggaagaatgttgcccctagtgagaagcagcagcatctaatccaggaacttcctccactggcctggcaaaaggatttcataaagtttgcccagtagggtttcatcattgcttaatccagtgagctgtgtctcccattctttcttcttacgaatagaagtattattgtgaacggagttattgcgcaaagtgtccgtacttcatccctgaataccggggggaamgggacaaggaagataacaagtcttttttgtccacaggttgagttgccagctcatgagaagccacatttggacattataaagaaaactgtgtatcatccgggtattaagggcctggaattggactaaagaaggggaggaggtggttccagatgacagaggagggatnctncnagagtaaaacgnggacttctgncacg

SEQ ID NO: 622416 - DNA, 604 bp, Homo sapiens
gaatatcagtttttaatgatagaggagtcaatacattaggagaacataacaattctactaatccacatatttttaaaagagcttctaaatgcttaaagcaaaatctgggtaaaaccccaggagaaataaacaaattcataaagtcagagatgtaaatactcctccctcaataattgagagaacaaatagaaaatcatcaaggtatagaagacttgaacaacacaatcagctaattgacatttataggacactctggacatttataggatattcagtcagaatacacattcttttcaagtgtagatggcacaattacctcaatagactgyattctgggccataaaacaacttttcaataaatgtaaaaagatccaactcacacaaagtatgttttctaattagaatggaactaaattagaaaagaataacaaaaagatctctgcaaaattttcaaaatatttagaaatgaaataaccattgctaagtaagccatgtaccaaagaggaaatcaaggaaaattataacgtattttgaactgagatcccactagagcattacttgagagggggaatttatggcactaaatttctgttagtaaagaaaa

SEQ ID NO: 622417 - DNA, 552 bp, Homo sapiens
gggctttacacaggagcctggagttgaactgtaaaggtttgaagtgagaggagattcgcgactgggcatagatttaacaataataaaaaaaggcatgttgtaagttacagtcctcttgggacccaggagttgttttgcatagagcagcagttctcaaagtatgactcagtgacccctggkagcctccatgactctcttcagaggatggatagagtcaaaactattctctaataataataaaatgttatctgctttttaaactcttattttcttatgagtgtacagtggagtttactagaggctacctggcatatttgatattatcacagattgaatgtagaaacagatacaagaatccatatatcttctattaaaccagatattaaagagctttgaaagaaaaatttgaaaagtaaaagaatgctaattttgtcatgaaattgttttgttttggaaactatagttttttaaataaaattatgttatttatattaacatgtaacagggttattgttattttaaaatgagtcaatattgtaaatttttctcaga

SEQ ID NO: 622418 - DNA, 456 bp, Homo sapiens
agaaattatctgccatgtgcctctaattactttcattcctctgttctggccttttctcattatctccttttagagaaggcatctctctctctctctctctctctctctctctctctctctctctctctctctcacacacacacacacacacacacacacagaggaaggaatgagctcatttataccaacttacggatcctaaattgatttcatttcccccaaggaaaaaatatctagaaatgtgcctatagactcccacgstgctgtatattctatatattgcctcatggtagggaattaaatgcatcatttctgcacagagtttttattttgttgaaggtaaactcagaaaaaggtggcttcttcagtcttactttgtcctacaaacagctggatgaagtcttgatccaacagtatggactttggctgggtggacttgggctcattagtgaatat

SEQ ID NO: 622419 - DNA, 456 bp, Homo sapiens
agaaattatctgccatgtgcctctaattactttcattcctctgttctggccttttctcattatctccttttagagaaggcatctctctctctctctctctctctctctctctctctctctctctctctctctcacacacacacacacacacacacacacagaggaaggaatgagctcatttataccaacttacggatcctaaattgatttcatttcccccaaggaaaaaatatctagaaatgtgcctatagactcccacgctgctgtatattctatatattgcctyatggtagggaattaaatgcatcatttctgcacagagtttttattttgttgaaggtaaactcagaaaaaggtggcttcttcagtcttactttgtcctacaaacagctggatgaagtcttgatccaacagtatggactttggctgggtggacttgggctcattagtgaatat

SEQ ID NO: 622420 - DNA, 575 bp, Homo sapiens
tacagtcttgttcttcccttagaaaggatgagaagaaatcgtcagtcccattttaaataaaatcacctgtgtcctttggttaatattctgtgatttcagggaagcacacggtggcaggtacaactgtagggtcccttttcctcttccaaggggactgctcctccctgcactgggtcttctgctgctgttcctgctcatcctccatagaagcctttcaccttcatttttaagccaactggtcctccctaatcttattcttggcgrccttccctttatttccaccttgagtcctcccctcttccagaatggcttctcctcccactgaaaggtgagagaagcaaacatttgacccacagtcttgctctctcatttgtgtggaagctactcttccggttctccaaataaagacaagagatgagtttcagagtggacacctttcctattgctctttttctcccttgttaacagttcaggttttgccttctgttagtttaattttaggattattccttttttcccaccagctgtaaggttaggaagtgtcttctgagttctgaaataatcttccttctcct

SEQ ID NO: 622421 - DNA, 585 bp, Homo sapiens
actctccacccaaaaacaacagaacatactttcatctcatcgccaaatggaacatactctaaaattgatgaaattatcagaagtaaaacactmttcagcaaatgcataagtactgaagtcataacaaacagtctcatggaccacagcacaatcaaattagaaatcaagactaagcattttttcatatgtttgttggccatttgtatttcttcttttgagaactgtctattcatatccttagcccaattttgatggattgttttattcttgctgatttgttgagttcattgtagattctggatattagtcctttgtcagatgtatagattgtgaagattttctcccactctgtgggttgtctgtttactctgctgattgttccttttgccatgcaaacactctttagttcaattaagtcccagctatttatctttgtttttagtgcatttgcttttgagtccttggtcatgaaatccttgcctaagccagtatctagaagggtttttccaatgttatcttctagcatttttatagtttcaggtcttagatttaagtctttaatccatcttgagttgatttttgtat

SEQ ID NO: 622422 - DNA, 356 bp, Homo sapiens
atattttaatgtcaatcagggcaaacagaactatgcaggatatgacatgaggacatttattgattcatttgtcktttcatgtggtctaaaggaataaaatgttaaaaattagttactccatgtgaaatagtttattcctataggactgtttggtgtcctaaattgtgttcctcataagattttcaagctttctcttgtctcctttaaatgttcaggtcagtttgatgtgtgaattatgtatccttctaaaccctgattatataatctggtcattctgtctttcctgatttcctaatgcccagatgaaagtaatctttcccttatctaaattcttatagtattatgtccatgaaact

SEQ ID NO: 622423 - DNA, 403 bp, Homo sapiens
tattaattatgcctttatggtaatyacttagtttcagatcatacatccaaatgcccatggagcacactcacttagatgtacttactcgtaagcatggcaaacacaacatatttaaataggtctctccatcattccctttatgccagattcttctaacccatttcttatttactttgatcacactggaaccctcaatatctgcagcaaaaaactgagagaatttttgttcaggaagcacgggggatgggacaatctccagtctcttcctccagtgaaaacatcaaactcctccctctaagagtagtttttgtttttaaataacgataaggtggttgccctctttcttgttacgttttagacatgatttccttcacacattaacacagcatcatttacattgaac

SEQ ID NO: 622424 - DNA, 620 bp, Homo sapiens
acctaaaactacacaataagcaagttgcaaggttttcccttttacacctccagatgactacaayatgcaccatttctgtgaggcagaggagaatgaatcttattttctgcgttagacaaaaggtaataagccctgcaagtacttacacagtcttggtggaaatacactgaaattttcttttcttaaaaaagaaatatattctaaaagaagtctatcctcctttttaaactacagctgtttgtaatgccaagggttatttagcaacatacattagtttgtttatttgttttctgatataaaaatctttgttaaacatcttatggtgtgctgctataaagacacatgcacacgtatgtttattgtggcactattcacaatagcaaagacttggaaccaacccaaatgtccatcaatgatagactggattaagaaaatgtggcacatatacaccatggaatactatgcagccataaaaaaggatgagttcatgtcctttgtagggacatggatgaagctggaaaccatcattctcagcaaactatcgcaaggacagaaaaccaaacatcacgtgttctcactcataggtgggaattgaacaatgagaacacttggacacagga

SEQ ID NO: 622425 - DNA, 620 bp, Homo sapiens
acctaaaactacacaataagcaagttgcaaggttttcccttttacacctccagatgactacaatatgcaccatttctgtgaggcagaggagaatgaatcttattttctgcgttagacaaaaggtaataagccctgcaagtacttacacagtcttggtggaaatacactgaaattttcttttcttaamaaagaaatatattctaaaagaagtctatcctcctttttaaactacagctgtttgtaatgccaagggttatttagcaacatacattagtttgtttatttgttttctgatataaaaatctttgttaaacatcttatggtgtgctgctataaagacacatgcacacgtatgtttattgtggcactattcacaatagcaaagacttggaaccaacccaaatgtccatcaatgatagactggattaagaaaatgtggcacatatacaccatggaatactatgcagccataaaaaaggatgagttcatgtcctttgtagggacatggatgaagctggaaaccatcattctcagcaaactatcgcaaggacagaaaaccaaacatcacgtgttctcactcataggtgggaattgaacaatgagaacacttggacacagga

SEQ ID NO: 622426 - DNA, 620 bp, Homo sapiens
acctaaaactacacaataagcaagttgcaaggttttcccttttacacctccagatgactacaatatgcaccatttctgtgaggcagaggagaatgaatcttattttctgcgttagacaaaaggtaataagccctgcaagtacttacacagtcttggtggaaatacactgaaattttcttttcttaaaaaagaaatatattctaaaagaagtctatcctcctttttaaactacagctgtttgtaatgccaagggttatttagcaacatacattagtttgtttatttgttttctgatataaaaatctttgttaaacawcttatggtgtgctgctataaagacacatgcacacgtatgtttattgtggcactattcacaatagcaaagacttggaaccaacccaaatgtccatcaatgatagactggattaagaaaatgtggcacatatacaccatggaatactatgcagccataaaaaaggatgagttcatgtcctttgtagggacatggatgaagctggaaaccatcattctcagcaaactatcgcaaggacagaaaaccaaacatcacgtgttctcactcataggtgggaattgaacaatgagaacacttggacacagga

SEQ ID NO: 622427 - DNA, 587 bp, Homo sapiens
ttggaaatataattatagaaatgaagcttgtaaaatttgtagcagagaaaaatcaaaagagaaaaaattaatttatataaggcaaaaaggatgatgagagattaaagaaaatatgcaaaaggtrtaacaaattggaagcataaagaaatatggtagatataagctcaaatttatattatatatatatttttttgaaacacagtctctctctcccaggctgaagttcaatggtgcgatctcagctcactacaaccttcatctcccaggttcaagtgattctccagcctcagcctcctgagtagttgggactacagatgtatgccagcatgtctggcgaattgttgtattgttagtggagacggggtttcaccatgttggccgggctggtctcaaactcttgacctcaagtgatccatctacctcagcctcccaacatgctgggattacaaccaggcataagccactgcacctggcccattatatatatataaaataataataatgaaataaataaataaataaaaactttggagacagacatattatacttgataaaaaaacaaaatcaagctgcatgcttatatttg

SEQ ID NO: 622428 - DNA, 587 bp, Homo sapiens
ttggaaatataattatagaaatgaagcttgtaaaatttgtagcagagaaaaatcaaaagagaaaaaattaatttatataaggcaaaaaggatgatgagagattaaagaaaatatgcaaaaggtataacaaattggaagcataaagaaatatggtagatataagctcaaatttatattatatatatatttttttgaaacacagtctctctctcccaggctgaagttcaatggtgcgatctcagctcactacaaccttcatctcccaggttcaagtgattctccagcctcagcctcctgagtagttgggactacagatgtatgccagcatgtctggcgaattgttgtattgttagtggagacggggtttcaccatgttggccgggctggtctcaaactcttgacctcaagtgatccatctacctcagcctcccaacatgctgggattacarccaggcataagccactgcacctggcccattatatatatataaaataataataatgaaataaataaataaataaaaactttggagacagacatattatacttgataaaaaaacaaaatcaagctgcatgcttatatttg

SEQ ID NO: 622429 - DNA, 587 bp, Homo sapiens
ttggaaatataattatagaaatgaagcttgtaaaatttgtagcagagaaaaatcaaaagagaaaaaattaatttatataaggcaaaaaggatgatgagagattaaagaaaatatgcaaaaggtataacaaattggaagcataaagaaatatggtagatataagctcaaatttatattatatatatatttttttgaaacacagtctctctctcccaggctgaagttcaatggtgcgatctcagctcactacaaccttcatctcccaggttcaagtgattctccagcctcagcctcctgagtagttgggactacagatgtatgccagcatgtctggcgaattgttgtattgttagtggagacggggtttcaccatgttggccgggctggtctcaaactcttgacctcaagtgatccatctacctcagcctcccaacatgctgggattacaaccaggcataagccactgcaccyggcccattatatatatataaaataataataatgaaataaataaataaataaaaactttggagacagacatattatacttgataaaaaaacaaaatcaagctgcatgcttatatttg

SEQ ID NO: 622430 - DNA, 437 bp, Homo sapiens
tgaagccagccaggagagcgaggcgtgtggaagccaaagtttakcaggaaaaactgagtgttggctgctgctaaggataaggaggaaacagattaaacactgccctttgcatttaacaacagggtcattggcagttttgttgaacacttttgatggaaccgtaggcgcagaaaacaaatttcagggtgagtgtcttgtaaagctgtagagggaacaactagacatgtcttttaagaagcttggctgtgaagaggagaaggagaaggctacaggcagctaaagaggaaagatcggcatttagaccaactcatggggtgttttctttcttcctctctctcttttacttttggacatatattgtttatgtttctggtttttattaagctgcagagttacaaacatatttaaatgttgacaagaaacagctaatagagagg

SEQ ID NO: 622431 - DNA, 596 bp, Homo sapiens
attttagttcaagttatatataaaatagtcaagtcttatatcctgttttattgcaaattgtaaagaaaaatttgatcctatttgcatttcagaaaataaaaacagagatcagaaacacagtataggcactcccagggaggaggacggcctcgtcttccaaaagccagattgccaagcaccctggtctgctctgacaaatcacaaatcatccccttgcaaagctaataacatttcccagaaagtgagatagttactttcctttgtaaattcatatttcttggccagaagccctggccagttcgggaatttttattacaaaatttaagtatcgtaccaatactttttaaccaccatgagttctgttaagtttttcactaatcatataggaaaaaaatatgtgtacattttagatcaaatatgtccagtgttayggttttcttgagccaaccaaatgtaatgtaaacaaaatggaaattaagtatgactttcattatgagtttctatcacatagatctttctatggataagaatatcttagagttatggtttttacatttaaattcttcattcggtgtcagttttaatatatcttctct

SEQ ID NO: 622432 - DNA, 575 bp, Homo sapiens
gttttattagtttcaaggtaaaacagcaattttttcaaacatcagaaaatatgtgttcttttctatatrcttagataaaggttcagctgaatcaccagatctgactgccaatttatgtggctatgaattttttatatacttttttttagatcagttttaggttcacagaaaaataagcaaaagatacagagattttccatgtgttcgccacccccacacaagcctagcctcctccattatcaacattccccaccagagaggtacatccaaaagtccacagtttacattagagtccactcttggttttactgagtttattagactgggttttagtattccttagggcttggtaattctaagacgtctactatgattggtcactaaagaccacaaaatatcatgagcattgttttattcatgcattaaacaaacacttttaaaatccatgttgagttcaaggtctcgtgctagttgtcattgtaccaagacctgcccccttgcccctcaacacacactgtaatcaaacatgtaccactccatccccaatctgcctgtgtcatgaccaaagcctgagc

SEQ ID NO: 622433 - DNA, 590 bp, Homo sapiens
gcttccccttccaccatgagtgtaagtttcctgrggcttcctcagccatgctgaactgtgagtcaattaaaccgctttcctttataaattagccagtcttggatatgtctttattagcagtgtgaggatgaactaatacatcctgtcttcttcctgtaaaatggggttgctgtgagcactggaatcctttactgcctgcccactatgtgtcctgtagtgtgctgggtccagaggcctctgctctgtagcaacttatagtctaaaggggcaaatagattgcataaacagatagtgataataaatgtccatcagtgctataatagaggtaagtataaagtgatctgggagcaccaatgaggcaaagcgactggtcctcagcaacctcgttacaaggaaacagatggatagtgttctatcaaaactaatagaatggaagatattgcaaaggcaatatgtgctgaggtgcttggtaaactaaagcaccaaacacatggagagtttatgatttgcacaaaggaaggaattgctatctagaagaacagctatcttgccagcaggggaatatttttaggggaaatacttccctaaaa

SEQ ID NO: 622434 - DNA, 558 bp, Homo sapiens
gcaaatctaagactttttggtcttaaagaagtggttgagaaagagatatgggtagaatgttttttcaaaggaacaagaccagagaacttcccaaacctagagaaagatatcaatatgctagtacaagaaggttatagaacaccaagcagatttaacccaaaaaagtctacctcaaggcatttaataatcaaactcccaaaagtcaaggataaataaaggatcctaagagcagccagagaaaagaaacaaataacataaaatggagstccaatatgtctggcagcaaacttcaggggaaactttacaaaccaggagagagtggcatgacatatttaaagtgctgaaggaaaacaaaaacaaaaacaaaaacaaaaatatttcaccctagaatagtatatcaggcagaaatagccttcaaacatgaaggagaaataagtattttctcagacaaacaagacctgagggattccatgaataccagacctttcctaccagacgtgctaaagggagtagttccatcagaaagaaaaagacattaatgagcaataaataatcacc

SEQ ID NO: 622435 - DNA, 530 bp, Homo sapiens
aggagcatacccaaacatactaacagccatgtatgacagacccacagttaatatcatactgaataggaaaaaaatgaaagccttttctctaagatctggaacacagcatgggttcccactgtcaccactgttattcaaaacagtactggaagttctagctaaggcaatcaggcaagagaaagatataaagggcatccaaattaaagagaaaaaagtcarattatccttgtttgcagatgatatgatcttatattttgaaaaacttaaagactcctcaaaaaaactattgaactgataaaaaaattcagtgaagttgcagaatacaaaatcaacatacaaaaatcagtagcatatttatatgttaatagtgaacaatatgaaaaagaaatttaaaaggtaatcccatctacaatagtcacacatgaagttaaatacatagggattaacttaaccaaagaagtgaaagatcttgataatgaaaactacagaacactgatgaaattgaagaggacaccaaaaaatggaaaaat

SEQ ID NO: 622436 - DNA, 569 bp, Homo sapiens
gccagcttcctcaattagaagtccagggcataaagaaaatgaggacgaggccgtttgcatttctgaagcttgacaagggaagattaaaatcttttatgagttctcccccatcatatgtggaacgtggcgctcgcatatttcattttctcaggaaaaaatagtgtttgcattatttggagaaaatcattacgaatgcgactagtcagcagccgtggtgggccctgttacattaccatttctgagttatgctttgtacttggctttctctacatactctttcattttgttagagtttgtgcatcaggaaagggataaaacacggcagctcaggcactgtgagtgcaccggacacacaacatggagaagcacttcttgcaaactggagaacmctgagaaatgtgaacgggggtctcctggagtgggaaacccagccatcaaaacctacattaaattgcagccaagtctcctcaccttctttccctacagatgcctctcacccctaatctgagtgaactctcgggaaaagaaggcaacccaagagactggcttttcacatggtttgaccacat

SEQ ID NO: 622437 - DNA, 601 bp, Homo sapiens
  misc_feature 310: n = A,T,C or G
gagggcccatatttagaagagaaggcattgtgacattttttgaagagcaagtatgggtgttacagtcacatagaactggcttcatatcccagttcttccactatggctgtgtaacctggagaaaactatataatctatctgtacctcagttactgcaygcataaaatggggcaatgattttttaaaaacttgtgaggattagtgatattgtatgtaacttactaggcacaataggcattcacaaaatgttatttgctgagtggctttctaacattataataaagggattcttgggggttttctgtttgcntgttttcatttttaggaatttttaaattttgaaagaaagagacaccactctgttaggccacagcatcttgtgctaacttcaaaatgagcactgatcacgttgtaacataagcgtaaacccacctgcctctcctgttcaatgataatccccagaagatagaaactctgtttttatttgccactgccactccagtgtctggttagcagcatctggagcacagcagccactcagtaaataattgtggaaagaaagaaaaaaaagagagagagagaatggaagaaaaagagggaa

SEQ ID NO: 622438 - DNA, 596 bp, Homo sapiens
tgatgcaatgtaaatgttatgcaaatagttgttctactgtgttggcttttatatttgtattactttttattgttgtattgctattttgtcccgaatattttcaatctcagatggttgaatccaggggtacagggagccagctgtatactttactattagatatataaaagcagctaaggaagtcatatgctattcaacttgtaggatacttttcagctcttaaattgggattcctgagtgttttagtttttgttttaggatgacctggggaaaagataaaaattgatggaagtgggaaaagagtaaaagagtgaattgtgctaaacagaaggataatagtcttttttcttattccccaaagttctggaactgaagaaatagaatatccctggacactgaaggtgggtggagatgtagaggaaagagtgtgacattggagcrtgtggacctgacttaccaaccatggccagggaaacaggatccagaagacatatgggcaccaccagtagactcatgactcagcccctcttcagtctaatgttttaaaagcacttgttcaaccatacttaaaggagaagctgaccaagggaaggaca

SEQ ID NO: 622439 - DNA, 550 bp, Homo sapiens
ggggacagccagctgctattttgtgagcacactcatgcagccctaaggagacccaagaaactaaggcttcctgccaatagccagagaggaactgaggcctcctgccaaagctgtgggagtaatcatcttggaagcccattctccagttccagttaatccttcaggtgactggaacttcatctgacatcttgactgcaaccccaagaaggtccctaagccagaaacacctagttaagcctccctcaaattcytgatccatagaaactatgacataataaatgtttattgttttaaacttctaagttttggggtaatttgcaatcgagaattaaacaaaagcagatgactatatctaaggtagatgacatatccaaaacatttgccggtggtagcagctgtagtcccagtgggcaggcctccgggatgatgtcagctctagcctaccttattcacactagtttgtccattctatttcccacatctcagtctcgtctttatcacttggtacggggttagtagcctcatgtttcccagttgccatctggaatag

SEQ ID NO: 622440 - DNA, 630 bp, Homo sapiens
cggcgcgaggggccggcgccccgcacttccaaaccgcagccagcccagcagcgccgctgccgagggcgccctccccgcccgggcgcggagtcgcgcctccttcatcgctcgccaccccccctcgaggagtcgcggcgcggggaccgcaaacggctcggcgcggcttccaggggcttcaaagacaacaataagaaaatggctacaactcaattgcctctccgcaccccctccgagggccaccgcgccggggggtgggggtgatggcgggcgggctgctcccggcgcggggcgccgatttcgggcggctctccacgcccctccggccaaaagacacaactcggtgcgcagggggcgacgcggggaatcccccagcacccggcgagcccgcgccccgccgcccgcactcacygggtgtctggtctgcgggtacatcttgctcaggtcgcgaatcatccaagccgatttagttggctgcgctcggcagaggcgcgcggctcattggctttaatgaccccgaagaggaggcggccgcggcagcggaggcggccggctcggtctgaggggcggctcgggcggtcccggcccccgccgggtctcgcgtgacacgggcggcaggaacgcgcggcggcg

SEQ ID NO: 622441 - DNA, 645 bp, Homo sapiens
ttgaaaacatgactggctgctcactggaaaatgagtgggccactgggcatttgtaagaggtgggaggggagctgagttgaggaagatgtttagaaattagcgagaccctgccagtaatctctgtttgggattttactgaggaccaggtgatagtgattccctgtgctagagtatattttggcttcttgatgtttcagaggcaagacctgttcgctccacaagtcagtgatcatttgagctggaagagatactaaagagcatctagaccctgcttcctaaatrtgctctgtaaaacactagctctagtggatttttacaggtatttcataatagataatacttacagatatcattcaaaattttagggagcacatgaatgagaaatcttgggttaaacatctaagacatcaagaagccaacttgcttgcttgaggatgaacttctgatctaggatccattagcactacccttattatgcctcaactacatacacctaagaaaatattattaaggatgctactctcctccaaaagactgcactagccttatactcttctaagctaggccagatcttttctaatttgtggtaaacactgtatgtaacagtacatcaagtaacttgatgactattaaaagataagttac

SEQ ID NO: 622442 - DNA, 455 bp, Homo sapiens
ggcttttatctatgaatcaatgtttttccctcacataactgagatcatattgcattttaaaaattgtattttacttactttgcttatcataagaatttctagtatcgtttaaaatttcttgtgagtattgtgaatggctatactcccatttctttctctttttagagacagggtcttgctatgatgcctaggctggagtgcagtagctattcacaggtgtgatcacggtgcactacagcctcaaagtcctaggctcaagtgatcctcagccttctgaggcctcagcctcctgagtagctggggccatgggcagaagccaccacacctggctttcccaattcttttcaaatgctctgaaatacttggtcatttagaaaactattcctatgttctatctgtgtctttttaaaatatrcatttcatatttcttcctctaaatcctaaattcctgtctt

SEQ ID NO: 622443 - DNA, 551 bp, Homo sapiens
tcaacaaggtcaagtaattcaacaataaatcaagccctggtttcttcctcacaagaagcccaggatgaaaggaaatgagaagggrctaggaagctgtttgtcttccccacccctcttcagctccatcatgcctctatgcctaagtctaggtgttcaaaccaactcctagtaatgcagctgtgtgtggtgagtcatgaagggatgccctgagcatggaaaggcatatggtaagttatgagtgagaagatgagtgaaaaatgcccttatcaaagggttaagtcaaatccaaatttaaaggattgttcactagttaataggtgctcatctcagccaggcaaacataaaaacgtggctatgaccaccagtagaatttcctccttatcaaggaaactgatgagtattaaaggtagtgaaaaatgctctttcatatcagatatactaaagcaatggtttttgccttcatgagtcctatttatacacagttgaatctcacttctctgtgataagggggcaaggaacagagtaactctggtctgcagggttcagtggat

SEQ ID NO: 622444 - DNA, 551 bp, Homo sapiens
tcaacaaggtcaagtaattcaacaataaatcaagccctggtttcttcctcacaagaagcccaggatgaaaggaaatgagaaggggctaggaagctgtttgtcttccccacccctcttcagctccatcatgcctctatgcctaagtctaggtgttcraaccaactcctagtaatgcagctgtgtgtggtgagtcatgaagggatgccctgagcatggaaaggcatatggtaagttatgagtgagaagatgagtgaaaaatgcccttatcaaagggttaagtcaaatccaaatttaaaggattgttcactagttaataggtgctcatctcagccaggcaaacataaaaacgtggctatgaccaccagtagaatttcctccttatcaaggaaactgatgagtattaaaggtagtgaaaaatgctctttcatatcagatatactaaagcaatggtttttgccttcatgagtcctatttatacacagttgaatctcacttctctgtgataagggggcaaggaacagagtaactctggtctgcagggttcagtggat

SEQ ID NO: 622445 - DNA, 551 bp, Homo sapiens
tcaacaaggtcaagtaattcaacaataaatcaagccctggtttcttcctcacaagaagcccaggatgaaaggaaatgagaaggggctaggaagctgtttgtcttccccacccctcttcagctccatcatgcctctatgcctaagtctaggtgttcaaaccaactcctagtaatgcagctgtgtgtggtgagtcatgaagggatgccctgagcatggaaaggcatatggtaagttatgagtgagaagatgagtgaaaaatgcccttatcaaagggttaagtcaaatccaaatttaaaggattgttcactagttaataggtgctcatctcagccaggcaaacataaaaacgtggctatgaccaccagtagaawttcctccttatcaaggaaactgatgagtattaaaggtagtgaaaaatgctctttcatatcagatatactaaagcaatggtttttgccttcatgagtcctatttatacacagttgaatctcacttctctgtgataagggggcaaggaacagagtaactctggtctgcagggttcagtggat

SEQ ID NO: 622446 - DNA, 591 bp, Homo sapiens
agactttactcttcccctggaagaggctgctagtgaatgaggccttggcatggagacaatattttattcatgsgcactgttcccagagccaatggagagtacagtgtgagcaggtgagggaacctggagaggagaaattgcagactgtcacagccatcagtcatttccatcgttctttccatctattggctccacactgaggtgggtggggtgtctggaactcctctctctgagtgcagtggggaggtctcaactctgagatcccacagccgactcccaaccccaccccggccacctttcctactgctaggttttgagaagagaccatccttgctcttccttgaaggtctcaaaggccaaagggagatatcaacgtggaatctcctccaagctaggcaggacaagagtcctgagtaagagaagaggcgttaggatcaggtagaactggattcaagtcccagtgtcagcactcactagatgcgtgaatgtgcagcaatacttagctcctctccccatgtcttcatttttttgaaattgcatatagaattcttctgaggattccatgagctgttgtgtggaatgtcctggcat

SEQ ID NO: 622447 - DNA, 591 bp, Homo sapiens
agactttactcttcccctggaagaggctgctagtgaatgaggccttggcatggagacaatattttattcatgggcactgttcccagagccaatggagagtacagtgtgagcaggtgagggaacctggagaggagaaattgcagactgtcacagccatcagtcatttccatcgttctttccatctattggctccacactgaggtgggtggggtgtctggaactcctctctctgagtgcagtggggaggtctcaactctgagatcccacagccgrctcccaaccccaccccggccacctttcctactgctaggttttgagaagagaccatccttgctcttccttgaaggtctcaaaggccaaagggagatatcaacgtggaatctcctccaagctaggcaggacaagagtcctgagtaagagaagaggcgttaggatcaggtagaactggattcaagtcccagtgtcagcactcactagatgcgtgaatgtgcagcaatacttagctcctctccccatgtcttcatttttttgaaattgcatatagaattcttctgaggattccatgagctgttgtgtggaatgtcctggcat

SEQ ID NO: 622448 - DNA, 592 bp, Homo sapiens
aagcttgccctatttctttttttttttttttttttatactttaagttttagggtacatgtgcacattgtgcaggttagttacatatgtatacatgtgccatgctggtgcgctgcacccactaactcgtcataaacatggtttgtgtttgcaatagtgcactcctcattttatgctgactctgatgggaatgtaggactcaattgctgaagttgtcattacagcagactttccwggaggcctttgttgtttgtcaggttgccttctccaaaaggggacagtttgcccatgtgggatgtcctgccccaagcatttctaactgctcttccatctctgtcctccctctgcaggctggccttgggtgaccctctctgtcctgggattcctgtactgctactcccacgtgggcattgcctgggcccagacctacgccacggactaatgctgttgggcccaggccagtccttgttgctggcctccaaggcaaatagtgcttcaccctgacctctcactccaggacagcctctaagggatttgatctgctcatcttcagttgaatgccctcactccaagactggatgctggatctcatag

SEQ ID NO: 622449 - DNA, 559 bp, Homo sapiens
attaataaatgattactgtgtttagctctgtatttgaggctgattaattaatatgtggattatccaggaccattgttttgcttaacctcttcctactccccacttgtaatatgaaaatgataatgcttctctcctcatgcatattcactaaaatcttgtagttactctgaatggtggtgcctgggcgcacagaggagttcaggcaatgacactggacatgtcatcagccctgggcaacttcaggcgcagtgttgggaaaagaatagacaaggtcccaaggtcaattccagcgcctggatcctctgatcccagcctcgctctgcaggcaagcccaagarctccaagcacaatcgccaagatgctacccaaggagggaagcaagatacctgaaggacacccaaacctcagtcattctaattcttgggaccacacaagaagactgaaaggtattattttttcaaattaatttgaagtgtcagcagaaaacattttgtttcattaaagacagcaggcctcaagaaaaaataaatcaatgaacaaataattgtattataatcta

SEQ ID NO: 622450 - DNA, 570 bp, Homo sapiens
gttgcaacaattattatactgctccaaggccaccaggaatgacaaacacactaagaggcttatggaagcactgagcagggaatgaaacactgctatctttggtatagggagcagataattactgcctactgacacaactcacaagcttccaccacattccctgctgcaggtatggagtgtccgagccagcttcatgctctcatctgggcccctctagccaggagtgtgaggccaaggctggggtatagagcacacctgggtccaagtaccttctgactcctttaaagttgctctgcctgggtttcaacagcaccacaatctgctgcctttctttccaccttaaccctgtattctctttgtctttttcttattgayttgtcatctctctgtatgtattttaggtcttaatttgttgctatttacatctgtggaaaaaaatcttttcctaatccagcagttggcaagctgcttctgtaaagggccagatagtaaatatttttggctttgcaggctgctcaattctgccacgatagcacaaaaacagacaaaatgtaaacaaatggtcatgga

SEQ ID NO: 622451 - DNA, 542 bp, Homo sapiens
caaagagaccaagtgtccaaatcatgctttcagcactgaagatgcagttctgctctgactttggggaatgtggtctgttctctcctttcttccatcaatattaaatgagcatcttctaattgccaggactgtggtaggctctggggataaaacagacatcaagatgtgatctctttccttgctctccataaagaaatagatcgtcttcctaattgttcttggctttgggtggtgagtttttgtatagaggtgtcaggggttagggaagggatggggggaagaacrtcccatccgtctgcgattttttcttccctcaacctgcaattcatgatccttcattttcagccccaataagtccttacacttcacagcccaattcaaatgccacctcctcctggaagccgttccatatatttccaggctgaattatgtctgctcatgttgtattaaagacaatatattttcatggagtgggaaattcagaggtcaactacacaaaagttaatttcattgcagactgaggcatctctgagtggagctaa

SEQ ID NO: 622452 - DNA, 368 bp, Homo sapiens
acctgcctgcctggcctcacccatagccagtgtctctcgtggtctctcaaattcctttccttcctgaaaagaaaaaaaatgataccttacattttttaacttaagatttaaaaatatgttatatagagtaaaattgggcttctctcatcctttagccatgagaaaaaaaatgttcttttgttaggaggaccatggtcaccatgaaggtcagtcataggcatccatggagtcaattgtggcagccatgtccccccagcagcagatccctactacttaratccagccactcctcagaggtggagaaggggaagtgagaaaaggtccatcctggcccctaggaaactctccccaaagaaaaaccaagaaga

SEQ ID NO: 622453 - DNA, 565 bp, Homo sapiens
ggccaatgtcaccctcatacctcatctgttcagacagatgcgtcctgctgccaattccaatgaatgcttcagttaatagtcctcattttctagggcaacatcatcaggattgaaacatcttctgctggctgctatgtggaacagaacrtcccatctccctgacttctcctgtcatgaggaaattattgaaaataattttccctattaaaatgcctgttttcctgagggtaggagccaccatggacactttagctgagacatcttagttgagacataaaagcttggctaatcagaaccatcagcttgtcactgccattcaattaaccctttcttctatgtcagactgtggcttctaactgcattaagaccttcctggctagcattccctcttgtgaaactgctgttgataatggcatcccaatgcccatagcccgtagctgcactacacagacacatttcactgtcagaattacctatgaaagtatttctgaacccctagatgtgacacattaggctccatcttacaaggagctttaaggtattcattcagttttttatacattaa

SEQ ID NO: 622454 - DNA, 565 bp, Homo sapiens
ggccaatgtcaccctcatacctcatctgttcagacagatgcgtcctgctgccaattccaatgaatgcttcagttaatagtcctcattttctagggcaacatcatcaggattgaaacatcttctgctggctgctatgtggaacagaacatcccatctccctgacttctcctgtcatgaggaaattattgaaaataattttccctattaaaatgcctgttttcctgagggtaggagccaccatggacactttagctgagacatcttagttgagacataaaagcttggctaatcagaaccatcagcttgtcactgccattcaattaaccctttcttctatgtcagactgtggcttctaactgcattaagaccttcctggctagcattccctcttgtgaaactgctgttgataatggcatcccaatgcccatagcccrtagctgcactacacagacacatttcactgtcagaattacctatgaaagtatttctgaacccctagatgtgacacattaggctccatcttacaaggagctttaaggtattcattcagttttttatacattaa

SEQ ID NO: 622455 - DNA, 583 bp, Homo sapiens
aaattggggtaaatgaacaggatcctggtatcagctcctgacaagccaaggagcagcacttgcccaacttctgaaaaggaagttatttggtgactcgctgatgtgcaataacaccataagcaagcagaaacaaatggggagacttgggagcaaattgattattcatgaatccaattacaactaatagctcaagaaagacccctctcagatgcctataataattcatgcagaggacagaaggaaccctgccaggttggcatctgggtcctgaagtgtcagggagcttggacaggtatgtagcaaatcatctcagggaggcaarctcaacttcttagactcaatgctgacaggaccagggtcatgctcaggtccccttgggctagttcacagcccagagacaaattttctgtggacagagcctgtgctcccttacctaagccagtcacccacaacatttatcttattttaaagtcagcaacctcagatgcaggatcaggtaattaagcagagggatttaataaaacctttttattaaatgagcagtgtgtgagttctcctgctcacatactgtagtgaaccccaa

SEQ ID NO: 622456 - DNA, 582 bp, Homo sapiens
ggaaacccttcccatgtcttttattatgaatgtagtgagaaaccagaatgagctcagggaggtggaggccatccctttgtcaccactctcagtctggctgaccctacttgggcatgggttaaaaagtcaacaattgctaatgatgatgaatgattacttatgtcttgatggtgtgtgggattaggaagagcacaaatgtcttttcttactctatcacgagttcctcatacygtaggagaaactattctggccacagacagagatgtgtatttcaatgggagaaaaagagaagtatgtagaagtatatactttggtattaaagccccatatttgatcagcaaggcaaaggcatattcccactaagtctccttcatggtaagtatttgacagttctaatgtgctcatagaggcttatcttactcaataagcccacaggagaaaggcctctgcttaaaatatatacatattttgatagcgatacagtctccctatgttgcctagtctggtcttgaactcctggcctcaagaaatcctccaccttggcctcctaaagagctgagattacaggtgtgagccaccaaa

SEQ ID NO: 622457 - DNA, 573 bp, Homo sapiens
cacattttcatcccctttccaatattcaaaacagtccacaaggcactcatggaataggaaggagtaaagctttaaaagaaaaaacgctgaagcacatctcctgtctctgcattgtctgcacagctaatctcaagggatctcagtaawcctccaaacaaaagagactgatctaaactacaaagcaactgtgaatgaaccactgaatcaggacaaatgagaccaggaggttctaaccctgtgttctctatggtcagcagacaacctgcaccagaatcaattgatacttgttaaaatgcagactcctagggaacatcaaatatctactgaatcttaatctctcgggttgttatcagaacctacattctaaaataggctcttcctgaaggaaggttggtaaacaactgctctaagccataatgaatgtaggcttaggagtctgaagactcttggcccccttgtctgagttctgatgagttgtgtgttttcagaatgtcattgtgccctctttagtgacaatcttggagcctgagaccacatgaaagagactgtgagttactttcatttccagtgcct

SEQ ID NO: 622458 - DNA, 621 bp, Homo sapiens
agtggcttcttctttaggttttcttttatgtccttatccctcctcctgctgacccaaactttggttaagaaattatcaagaaaaaaaatgcagctgtcctttccttgtgcttcaaaaccaaagggaagcttctggtagaaataccccaagtctaactttcaatacttacggcaataatgtccaccctgacatgcggcagaggaagttcaaatataccatgcattgccaggtggccctcccagcttgtgagctgtgacaccacatttctcttcactcaagaaagcatattgaaactcaagtgagtaagaatggcattattataggtagaattttgartatggtataatttttaaagtaaatcatataaaaacatttgcaattgactgtcattagtaataaattacttgcaacacacctcacaacttattatgaaaagtaaatcaatctaccttgttcaataacagattccttgttcctcaggctgtcagagaaaaatcctaggaaactgataaaacctttcatcctggatgaagatgatgacccctctcaaaaatatgttatcagtactttaaaaatagctctcaaaattttaagtgcagggtttaagtcaacacaagagcc

SEQ ID NO: 622459 - DNA, 637 bp, Homo sapiens
tctccgatagagttcccaggtaaagcagcagagctctaggtacatttattaagcccacaaaccattacctgaataaacactgagcaagtgagagaatcaacatatgaagtttgccctgcctaattccttctcccagcttggcagggtgctctaccacccacactgagaaggagagctcatgcctcttacctcaaccatttctgattttctgtgcaaagctgacatgttaggtcggagcaaatgaaacaaatgagtattcttgggaagcctgaggcccagtgtgccacagaggcatgcaggcccctgagcatctcagaaagtcatttaggaattcatccgatgggagggagcccaggccagctgtggccatgagaacatcccasataacactagctgcaacccccaccatcaggtcacagcactgacagaagtgaggtggctaaggataaatttgttttacaggaactgctccccaaatctcacccccacaagcagaaccaggcagcccagtgtggctcctctgggggtacaccaccagctcgggcatcaactcagcatcatcacattcagaaagtaagtggcccacggtgagatcatgagcaaaaggctggtagaggtacctgggagatagtgggtc

SEQ ID NO: 622460 - DNA, 539 bp, Homo sapiens
ttatactctttctactcaggattcagactctgacctcttcccttgtctatctgtattcatttctcagatcatctcacccagtctcatggatttaaatactatcaataggctaatggctcctgaatttatatagttagcccagaactcccctttgatctctcaatctgaactctcaattcctacatgccctctccccctgcacatacccctcaaactccatcctccaaaagtcctcatcaactcagtagcaacttcatccttccagttcatcaggccaaaggccttgcaactgtccactctcaaacacccacagaaagtactgttgtagcatctggccatttctccccacaactccattgctaccaacttagactaagtcaccattgtttcttaamcggattattacagtctgctcctgactcatctccctgtttctacccttgtcccactctgttctcaacatagttaccaaatttatctttcaaaatttaaaacagaacatatcactcccctgctcaaaaccctccaaagattctatc

SEQ ID NO: 622461 - DNA, 562 bp, Homo sapiens
tgcccccacacccagctaatttttgtatttttttgtaaaatgatcttgctatgtttcccaggctgatcttgaactcctgggctcaagtgatcctcctgcatcagcttcccaaagtgctgggattacaggcatgagccattgcgcctgacctcgattctattgtttctcagcctgattcatcagctataccttaaattctgtgagcagctttacctccttccaataaattctcctttttcttaagtagctagtgtcactttctggtgcttaaaatgtaataactgcaattgataggctgtttcactcccaattcctatactatcctgtgctcaataaaagtattacatgctccatgagagttctagtcagacagattgtctttctactgatattctaggaatgatcctcartctaaagttctacaatcttattaaaaataatattgacaggtgcccatattactttgtatctctaaaatgtgagttaacccctcattttactgaaaaggaaatggaagcccaagaagtgaagtaggagactgtatgaaaagagtccagacgtt

SEQ ID NO: 622462 - DNA, 556 bp, Homo sapiens
gaggacccaggccaaaccattcctccktggcagtcttgttcctcagtccttctgcttatatgggtggggaggcgaaaggagaaaggaatgaggacaggaaaaaagcaacagctgtgaaagatggggccaagcagacgtgaaaactgaagctgtactcaggccattttccttctggggaatcttaacaccaagctgcacctaacaattgttctacccaagcaacactgcaagaaagcagacatgaggaggatagaggcacaggaggttaatggaaggccctcactgaaagccctggcccacagaatgtgcctcccaaactgtgtgaggcctgcgagcgttctgtgtacaagagaccagccctgtctcaggtaccaagcggaaatagtcaatagcccatcaaccgacaggggcagcctggggcacctgctgattcttgcagtgatgatctgtgttacttaacttgacatcagtgtggggatattctaaaggactacagaaaggaagtgtgctgggggatgggcagaagagccccgctagattaaagagcatggatggg

SEQ ID NO: 622463 - DNA, 438 bp, Homo sapiens
gccaaaccattcctccgtggcagtcttgttcctcagtccttctgcttatatgggtggggaggcgaaaggagaaaggaatgaggacaggaaaaaagcaacagctgtgaaagatggggccaagcagacgtgaaaactgaagctgtactcaggccattttccttctggggaatcttaacaccaagctgcacctaacaattgttctacccaagcaacactgcaagaaagcagacatgaggaggatagaggcacaggaggttaatggaaggccctcactgaaagccctggcccacagaatgtgcctcccaaactgtgtgaggcctgcgagcgttctgtgtacaagrgaccagccctgtctcaggtaccaagcggaaatagtcaatagcccatcaaccgacaggggcagcctggggcacctgctgattcttgcagtgatgatct

SEQ ID NO: 622464 - DNA, 532 bp, Homo sapiens
gaggacccaggccaaaccattcctccgtggcagtcttgttcctcagtccttctgcttatatgggtggggaggcgaaaggagaaaggaatgaggacaggaaaaaagcaacagctgtgaaagatggggccaagcagacgtgaaaactgaagctgtactcaggccattttccttctggggaatcttaacaccaagctgcacctaacaattgttctacccaagcaacactgcaagaaagcagacatgaggaggatagaggcacaggaggttaatggaaggccctcactgaaagccctggcccacagaatgtgcctcccaaactgtgtgaggcctgcgagcgttctgtgtacaagagaccagccctgtctcaggtaccaagcggaaatagtcaatagcccatcaaccgacaggggcagcctggggcacctgctgattcttgcagtgatgatctgtgttacttaacttgacatcagygtggggatattctaaaggactacagaaaggaagtgtgctgggggatgggcagaagagcccc

SEQ ID NO: 622465 - DNA, 586 bp, Homo sapiens
tcctggttacagcctgagcagtgggctgaggaaccctccatccctcgcaagaagccagggtgaccgcatggaagtgaggaatctggaagtctaggacaagaacgcctatttttagacttggggacaggactgggactgacacagcctctggcctgcctatcaagagaaatctttactgtttaaatatttcaacagccacaagtctgcaggtgatccatctaaactgtgaagcagaatcagcatcagagttggaagtgactctactcattgaccccsaaaatatcaagtgcctactctgtgtcaggtttgttagcagagctgtcccataataactctgggagcccgctctgcaacatctgggcactgagctagctgggactgggagcttccccttctccctgtgggagggactacactcaagctccacttcccaggggctgggggcttctactgtccattgaggtgggtggtttacagcttctcatgggccttagggctctccggtgccaggcagaaggctttcctagaccactcctgtaagcagctggcatcccagatccagcctgcctgtgcctttctatggccc

SEQ ID NO: 622466 - DNA, 548 bp, Homo sapiens
atggtacctgtagaatgtgagccttggcttcaagtccagccctcttttaatccatcccagtgcctctcaaagcctctcttctactccccatagcaccaggacagcacrggggctgcaatacacagactatgatgtcacacaatcttttctttctttctttctttttttttttaaatagagtcttgctctgtcacagtggcatgatctcagctcactgcaacctccacctcatgggttcaagcgattatcctgcttcagcctcctgcgtagctggattacaggtgcctgccaccatgcctggctaatttttgtatttttagtagagacagggtttcaccatgttggccaggctggtcttgaactcctgacctcaagtgatccacccgcctcagccttccaaagtcctgggattacaggcgagagccaccatgcccggctattacaaccttttcttaactaacagtcccttatgccctgggtagagggcacaccaaggttttctgcagaatgggacagaggaagggggaaattgttgacttcagcacagc

SEQ ID NO: 622467 - DNA, 562 bp, Homo sapiens
aggttttctgcagaatgggacagaggaagggggaaattgttgacttcagcacagccctctctggctttgggaatcttctgtccagtaatatagtcagagtagaccgttcattaccattcattagggaaactccagaaacttataagatttcacactgcaacaggggaagagaaggccagagaaaccaccaccttgtgggttggaggaagggactaggttttaagtagaaaataatggatttattaagcagagaggaattaccaaactgatttctataaaatgagtccacatctatagttgcccgattcctgtgtgcctatctcccctgatgttactgagctcagggcagtcttagagagccacagggaggtatgaccacagcactggcttatgtccctctgccaacmtgggttgtgcagctgctcggcaaccgagatagaaatcagggtctaaggaggtaggaattcagtgagggtcacacacttcagtcctcctctgggagctttcacttcattccccagtttctgagtgtaaagtgaggaagggaaagggaagggtgcat

SEQ ID NO: 622468 - DNA, 539 bp, Homo sapiens
cccagcccctcaaaaagaatcctaataagaaagttcttcagttcccttggctggatgggaaagctacctcaggccacctcagagcccaggcaggctcactgcctgcaaacagagaggcagaaacatatagaactcccaagagaggcttctgggagagattttacctgagcttttaagtaaaaggagataatggatggccagattttcactagagagagaaaaccttgtatgggggaaacctaacagcaaagaacagacagcatgagcaatacccacagggccctagtggtaatgaacagttctatatcatgcccaagtcctcagtgtcagggtgttcaatcagcaacacagcatcacctgggcgcttattagaaatgcagaattttgacccctctcctgacctamtgaattggaacctacttggaacctgatttttaacaagatcccagatgatttgtgtgcagattacaggttaagagacaccagtttatagaaataacttgggacataggcaacttcccttggccacctctgtcagt

SEQ ID NO: 622469 - DNA, 586 bp, Homo sapiens
aattaaaactcttttctttataaattatccagtctcaggtatttctttatagcaacataaggagggcctgatacacaagtacacacgggcacacacacacacacacacacacacacacacacacagacacatacaaagacacacacacagagcagcagcaacattgctggcagacacaacagtccatggggaaagcaagcaaacttccagccatgggtrtgggagcatgcatgcacatgtacaagtgcaaacagggcctgcttctgcagaaggagacattagtagtcgaagctcatgcagtgacaaaggggcagctgcttacgctttagtcccctctgtgacccctgtgcatgcaaagcagtcaccgacagtggcagagagggaagtaggaagcacagagtggtcggggtgggggtgggctgcccctgctcatgggcacagaatgcagctttgctaacagattaggtggggctggtggaaatggaaaagctgcttaaaatgattacttatagagagaatccaaggagttttgttgcttgtgaccacagataatcaggggctgcctccagcaccagtccaacaagct

SEQ ID NO: 622470 - DNA, 592 bp, Homo sapiens
gataaggcacaatcttcagtatgctgcctgttgcaagaggttttttaaaaattaaatctmtcatggaaaatacactggcctttgctactataggcagctcagggacagtcagatggatgtaaaagcctgggaagtgaaaagtttgaggagccactgggactctataacattgcctggtactgggaattaggatggaagggatagtgaactcactggtggccccctgggaatattgcttcccagtccatgctgatccacttgttcttggggtccctagacacttctagaaaaggctaatcctgaaggttggcctaccctgaaagtctgagacgattcccttctggtgtcttcaagcagccttctcttaggtaaaacaaggtcaggaaggagctagaaacaaatttgggggagagggaagctggatagtgatttctctcagaaggctctcttcctaggttcttactgattagcaattcagattcactgttctcatatcagcccatcctggcaaaggcaccttcctgattgagtatcagccatttaatcaatcatcttgcttttgtgctgcacctcttccaattggtgactctat

SEQ ID NO: 622471 - DNA, 409 bp, Homo sapiens
acatgtaccctagaacttaaagtataattatatatatatatgaaaaaaatgtctcaaatctcatcatctcaatcagrtatgggtggggcgcagtggctcatgtctgtaatcccagtactttgggagtccgaggtgggcagatcacttgagatcaggagtttgagaccagcctggccaacatggtgaaaccctgtttttactaaaaatacaaaaattagcccagcatgttggcacatgcctgtaatcccaggtccatgggaggctgaggcaggagaataacttgaacctgggaggcagagattgcagttagccgagatcgtgccactgcactccagcctaggtgacagagtgactccgtctcaaaaaaataaaaaaataaaaagtcaggtatgggtgaaactctgggtgt

SEQ ID NO: 622472 - DNA, 409 bp, Homo sapiens
acatgtaccctagaacttaaagtataattatatatatatatgaaaaaaatgtctcaaatctcatcatctcaatcagatatgggtggggcgcagtggctcatgtctgtaatcccagtactttgggagtccgaggtgggcagatcacttgagatcaggagtttgagaccagcctggccaacatggtgaaaccctgtttttactaaaaatacaaaaattagcccagcatgttggcacatgcctgtaatcccaggtccatgggaggctgaggcaggagaataacttgaacctgggaggcagagattgcagttagccgagatsgtgccactgcactccagcctaggtgacagagtgactccgtctcaaaaaaataaaaaaataaaaagtcaggtatgggtgaaactctgggtgt

SEQ ID NO: 622473 - DNA, 485 bp, Homo sapiens
tgcatcttgattgtgtatgtgaacctggtgtccattataattgcaactcagataaaacttctaacttaacattcttttacaaagacattaattaagctaatacatcaaaaactagggcaagaggttctgagttatagaagtaggcagttagtgaaacaatgaacagaaattaggatgtgttaattccttcaatagacattgaatctttatcatataacagcttcagaaaaaggcatcaggggtagagagaagtagaaaacatacataggcactgcattcatggagcttatagtctaaatacagagagcaatattaatgaaataatcagacaaaataatacagtcgacccttgaacygcacaggtctaaactgtgcaggtccactcacatgtggattttcttttatatctctcacccttgagacaagaccaaccccacctcctccttctgctcttcctcagccttctcaacatgaagacaatgagg

SEQ ID NO: 622474 - DNA, 485 bp, Homo sapiens
tgcatcttgattgtgtatgtgaacctggtgtccattataattgcaactcagataaaacttctaacttaacattcttttacaaagacattaattaagctaatacatcaaaaactagggcaagaggttctgagttatagaagtaggcagttagtgaaacaatgaacagaaattaggatgtgttaattccttcaatagacattgaatctttatcatataacagcttcagaaaaaggcatcaggggtagagagaagtagaaaacatacataggcactgcattcatggagcttatagtctaaatacagagagcaatattaatgaaataatcagacaaaataatacagtcgacccttgaactgcacaggtctaaactgtgcaggtccactcacatgtggattttcttttatatctctcacccttgagacaagaccaaccccwcctcctccttctgctcttcctcagccttctcaacatgaagacaatgagg

SEQ ID NO: 622475 - DNA, 576 bp, Homo sapiens
gagcttgaaacatcatagttcatcattctgctattatcgcaagctcctatgtcyttttaataaactccaattatcaccgatagcattgttttatttttgcaggtgttaatctcatcttgagcattttctccttcagacctggtagcagtgatttctataataagctgtggttcttttcagtgggaaatggtatttagagaataaaatctgattcctagagggtgctcattttactgagttgttattgattctagggcatttttagtggacagagataaaaaatgtgtaattttacagcaataaatacagatcagaagtctatactgatatttccatttcaaaaatttgattacagatttctaatgtaactttctataatattattattgtatctgtattctcttcaacttagtattttggttccaaaaatatgaacaaatttcctgcttattttatcctacaataacttcaaaagagaacaaaaatgatgcattttaaagtcattggaggttattatagcaattttataaacatctagtccattccttttagtttattttcactttatagaaattg

SEQ ID NO: 622476 - DNA, 430 bp, Homo sapiens
tggcatgtagtacatctccgcatragtcatattttgtaccttatctttaggggtctgctgagacttgagtcttgttacaagtctagaagaaaagagcggtagcagggtggatactgaggataatcagcattatcttacgtggcagctgcctcaggggaggccattacccttttcctcagtattagtactctcagatggtggcggaaaagctgataccactgtggtagcggggacccaattccacctggggtagggcagccacttccattggtgtggggagactgctttcaatgtcaaagaagattcatcataattcaggggcttagtgtccccagctgcgtcagggtatttccacaggcccccatcccaacttacattttttccccaataagttgccctcactttaacagcagtcaccctgtagagctgg

SEQ ID NO: 622477 - DNA, 610 bp, Homo sapiens
ggaaaaacccttctagacattggcttaggcaaagactttatgatcaagaacccaaaagcaaatgcaataaaaacacagataaatagatgagacttaattaaaataaaaagcttttgcacagyatataataataataataataataataataatcgcagagttaacagacaacccacagagtgagaaaaaatcttcacaatctgtacattcgacaaaggactgatatccagaatctacaaaggactcaaacaaatcagcaagaaaaaaacaaacagtcccatcaaaaagtgagtaaggatgtgactagactaagcgtgtagaaaaatgctcaacatcactaattatcagggaaatacaaatcaaaaccacaatgcgatactacctcactcctgcaagaatggccataatcaaaagaacaaaaaataatagatattggcatggatgcagtgaaaaaggaatacttttacactgctggtgggaatgtaaacatagtaccactgtggaaaacagtgtgacgattccttaaagaactaaaagtagatctaccatttgatccaggaatcccaatactggctatctacccagaggaaaaaagtcattatatgaaaat

SEQ ID NO: 622478 - DNA, 388 bp, Homo sapiens
gaattccatagtcatgacggaaggcaaaggagaagcaaagttacgccttacatggcagcaggcaaagcgagagtgaaagccaagcagaaagggaaaccacttataaaaccatcagatcttgtgagacttattcactaccaagagaacagtatggggtaagacccgccscctgattcagttacctcccacttggtccctcccatgacatgggaattgtgggagctacaattcaagatgagatttgggtaggaacacagccaaaccatattatatatgcaatggaatattattcagccacaaaaaggaagaaaattttttcatctgcaggagcatggatggacctggagaacattaaactgggtaaagtaagtgagtctgagaaagacaa

SEQ ID NO: 622479 - DNA, 418 bp, Homo sapiens
cttgacgtcgtgatcctcccgcctccgccttccaaagtgctgagattacaggtgtgagccaccacgcctggccataaaatttttaaataatttttatttsatactttcacactaatttaaaagaggataaaaagattacgagtctcttatgggtgtacacctgtaccagttgtcagtttattgtctctcagccacaaaaccagtgttcattgccctgctgaggatactggagctggagttactaaatattcttcctttgccgttagagggtctggaagggatgctgcaggaagaagattcttcccgtaaagtgcctgctttttttgttgttgtttttgttcctacagtgcaaggctaggctgtgggacacccagtggaactcaccaccagctggtttcaatgacgtccccatgggtac

SEQ ID NO: 622480 - DNA, 580 bp, Homo sapiens
acacacacacacacatatatggtttctataatggaaatgttatatttcagatgctcttagacttatgatgaggttggatttagataaatccatcgtacattgaaaataccataagtcaaaaatgcatttaatacccctaacttttaaccaaacttcatagcttagcttagcctaccttaaatatgcacacaatacttacattagcctaaaattaggcaaaatcatctaacaacatccagctttataataataaaaggtagtatttttaactttaaacaaacttttattacacaaaagttgtcacataattggatatttgtctactttgtacacgattattctcactctccacagaaaggcwgcttaacttctcatctggtggtggcaagcaccaaaatcctgattttaagaaaatagtagtaaaaatacctcagcgatttaagttgaaagcagtacattgtacgtggctcttgtactcagtatcaggaatatacaaatgtctttttattcaaaaatacaaaataaattatctgtaggcatgaacaatgacagcagtaaaccattatacagtttgtcaact

SEQ ID NO: 622481 - DNA, 580 bp, Homo sapiens
acacacacacacacatatatggtttctataatggaaatgttatatttcagatgctcttagacttatgatgaggttggatttagataaatccatcgtacattgaaaataccataagtcaaaaatgcatttaatacccctaacttttaaccaaacttcatagcttagcttagcctaccttaaatatgcacacaatacttacattagcctaaaattaggcaaaatcatctaacaacatccagctttataataataaaaggtagtatttttaactttaaacaaacttttattacacaaaagttgtcacataattggatatttgtctactttgtacacgattattctcactctccacagaaaggctgcttaacttctcatctggtggtggcaagcaccaaaatcctgattttaagaaaatagtagtaaaaatacctcagcgatttaagttgaaagcagtacattgtacgtggctcttgtacycagtatcaggaatatacaaatgtctttttattcaaaaatacaaaataaattatctgtaggcatgaacaatgacagcagtaaaccattatacagtttgtcaact

SEQ ID NO: 622482 - DNA, 643 bp, Homo sapiens
aattatctgtaggcatgaacaatgacagcagtaaaccattatayagtttgtcaactgaaaccagtaactgatggttacagtgatttcttaaacatcagccagcctttccttcattttctccaactgacttctctgaagttattggtgaggaactctgccttgggcttcctgtcacagttcattaataaaggtaaagcactattctaggagttagaacatgccacctctcataccacctcccattccacccattgcacccattccagggtccttctctttttttaggaatttttgtgactacaatttctgctgtagttaatggagaggccacaccagcagcatccgataaagcagctctcacaatctttgttgggtcaataattgctttttccaccatattcacaaaatctctgaccatagcatcgtaaccaacttctgaggaactttgcataattttctcaacaatcaaagatctttcaacacttgcattcttagcaatggtcattgctggaattttgagtgttcttttaataatttccataccagtttttttatctcagtcagctggagtctatgagtccaaggctggaatacaccaaagaaggggaaaattttataataataataataaattaaaataata

SEQ ID NO: 622483 - DNA, 643 bp, Homo sapiens
aattatctgtaggcatgaacaatgacagcagtaaaccattatacagtttgtcaactgaaaccagtaactgatggttacagtgatttcttaaacatcagccagcctttccttcattttctccaactgacttctctgaagttattggtgaggaacwctgccttgggcttcctgtcacagttcattaataaaggtaaagcactattctaggagttagaacatgccacctctcataccacctcccattccacccattgcacccattccagggtccttctctttttttaggaatttttgtgactacaatttctgctgtagttaatggagaggccacaccagcagcatccgataaagcagctctcacaatctttgttgggtcaataattgctttttccaccatattcacaaaatctctgaccatagcatcgtaaccaacttctgaggaactttgcataattttctcaacaatcaaagatctttcaacacttgcattcttagcaatggtcattgctggaattttgagtgttcttttaataatttccataccagtttttttatctcagtcagctggagtctatgagtccaaggctggaatacaccaaagaaggggaaaattttataataataataataaattaaaataata

SEQ ID NO: 622484 - DNA, 643 bp, Homo sapiens
aattatctgtaggcatgaacaatgacagcagtaaaccattatacagtttgtcaactgaaaccagtaactgatggttacagtgatttcttaaacatcagccagcctttccttcattttctccaactgacttctctgaagttattggtgaggaactctgccttgggcttcctgtcacagttcattaataaaggtaaagcactattctaggagttagaacatgccacctctcataccacctcccattccacccattgcacccattccagggtccttctctttttttaggaatttttgtgactacaatttctgctgtagttaayggagaggccacaccagcagcatccgataaagcagctctcacaatctttgttgggtcaataattgctttttccaccatattcacaaaatctctgaccatagcatcgtaaccaacttctgaggaactttgcataattttctcaacaatcaaagatctttcaacacttgcattcttagcaatggtcattgctggaattttgagtgttcttttaataatttccataccagtttttttatctcagtcagctggagtctatgagtccaaggctggaatacaccaaagaaggggaaaattttataataataataataaattaaaataata

SEQ ID NO: 622485 - DNA, 643 bp, Homo sapiens
aattatctgtaggcatgaacaatgacagcagtaaaccattatacagtttgtcaactgaaaccagtaactgatggttacagtgatttcttaaacatcagccagcctttccttcattttctccaactgacttctctgaagttattggtgaggaactctgccttgggcttcctgtcacagttcattaataaaggtaaagcactattctaggagttagaacatgccacctctcataccacctcccattccacccattgcacccattccagggtccttctctttttttaggaatttttgtgactacaatttctgctgtagttaatggagaggccacaccagcagcatccgataaagcagctctcacaatctttgttgggtcaataattgctttttccaccatattcacaaaatctctgaccatagcatcgtaaccaacttctgaggaactttgcataattttctcaacaatcaaagatctttcaacacttgcattcttagcaatggtcattgctggaattttgagtgttcttttaataatttcyataccagtttttttatctcagtcagctggagtctatgagtccaaggctggaatacaccaaagaaggggaaaattttataataataataataaattaaaataata

SEQ ID NO: 622486 - DNA, 576 bp, Homo sapiens
ttgttattaccgaccttctgaagcctacttctgtcagctcatcaargtcattctctgtccagctttgttctgttgctggcaaggagctgtgatcctttggaggagaagaggtgctctggtttttagaattttcagctttctcctctggtttctccccatctttgtggttttatctacctttggtctttgatgctggtgacctgtgggcttttggtgtggatgtcctttttgttgatgttgatgctattcctttctgtttgttagttttccttctaagagtcaggtacctcagctgcaggtccgttggaatttgctggaggtccactgtagaccctgtttgcctgggtatcatcagcagaggctgcagaacagcaaatattgcagaacagcaaatattgctgcctgatccttcctctggaagctttgtcccagaggggcacccacctgtgtgaagtggcagttggccactactgggaggtgtctcccagttaggctacacaggggtcacagacccacttaaggaggcagtctgtccattctctgagttcaaatgccatgctgggagaaccactgctc

SEQ ID NO: 622487 - DNA, 576 bp, Homo sapiens
ttgttattaccgaccttctgaagcctacttctgtcagctcatcaaggtcattctctgtccagctttgttctgttgctggcraggagctgtgatcctttggaggagaagaggtgctctggtttttagaattttcagctttctcctctggtttctccccatctttgtggttttatctacctttggtctttgatgctggtgacctgtgggcttttggtgtggatgtcctttttgttgatgttgatgctattcctttctgtttgttagttttccttctaagagtcaggtacctcagctgcaggtccgttggaatttgctggaggtccactgtagaccctgtttgcctgggtatcatcagcagaggctgcagaacagcaaatattgcagaacagcaaatattgctgcctgatccttcctctggaagctttgtcccagaggggcacccacctgtgtgaagtggcagttggccactactgggaggtgtctcccagttaggctacacaggggtcacagacccacttaaggaggcagtctgtccattctctgagttcaaatgccatgctgggagaaccactgctc

SEQ ID NO: 622488 - DNA, 576 bp, Homo sapiens
ttgttattaccgaccttctgaagcctacttctgtcagctcatcaaggtcattctctgtccagctttgttctgttgctggcaaggagctgtgatcctttggaggagaagaggtgctctggtttttagaattttcagctttctcctctggtttctccccatctttgtggttttatctacctttggtctttgatgctggtgacctgtgggcttttggtgtggatgtcctttttgttgatgttgatgctattcctttctgtttgttagttttccttctaagagtcaggtacctcagctgcaggtccgttggaatttgctggaggtccactgtagaccctgtttgcctgggtatcatcagcagaggctgcagaacagcaaatattgcagaacagcaaatattgctgcctgatccttcctctggaagctttgtcccagaggggcacccacctgtgtgaagtggcagttggccactactgggaggtgtctcccagttaggctacacaggggtcacagacccacttaaggaggcagtctgtccattctctgagttcaaaygccatgctgggagaaccactgctc

SEQ ID NO: 622489 - DNA, 566 bp, Homo sapiens
gacttttccttcagaaaaaaaactttccttcagggaaaaattcagccaggctgacaccttgatttcagcctcataaaatgctaaataaaggggattccatgataatcaagacaaggactctgtcctcatagagcttaaaaacctatcaaggaatagccaggtgtggtggtgtgcatctgtaatcccagatacttgggaggctgaggcaggagaatctcttgaacccgggaggcggaggttgcagtgagctgagatcgtgcccctgcactccagcctgggggacagagtgagactccatttcatctcagatgagcctgggcaayacagcaagactccactccatcccatctcagctgtctatgctctcaaagcacttctgaataacaccaaagtaatccatatcacattgtcccaaaattgcttattcatacattcatctcctcactgttttgagcttcttgaggagagacaccatgcatagcacttggcacatggtaggaggcaacaacaatattcactgaacgaactgaatgaataaatactgatgccttaagaggcaatgaatt

SEQ ID NO: 622490 - DNA, 543 bp, Homo sapiens
tctttgctattgtgaatactgctgaaatgaacatacacatgcatgtatctttatagtagaatgatttatattcctttgggtatataatggccagtaatgggccagtaatgacccagtaatgggcttgctgggtcaaatggtatttctggttctagatctttgaggaattgccacaccatcttccagaatggttgaactaatttacattcccactarcagtgtgaaagcattcctatttttctgcaacctttcccacatctgtttcttgactttttaatgactgccattctgactggcataagatggtatttcgttgtggtcttgctttgtatttctctactgatcagtgatgttgagctttttttcatgtttgttgggcacatgtatgtcttcttctgagaagtgtctgttcatgtcctttgcccactttttaatggggttgtttttttcttgtaaatttgtttaagttccttgtagttgctggatattagacctttgtcagatggatagattgcaaaaatgttctcccattctgtaggttgt

SEQ ID NO: 622491 - DNA, 543 bp, Homo sapiens
tctttgctattgtgaatactgctgaaatgaacatacacatgcatgtatctttatagtagaatgatttatattcctttgggtatataatggccagtaatgggccagtaatgacccagtaatgggcttgctgggtcaaatggtatttctggttctagatctttgaggaattgccacaccatcttccagaatggttgaactaatttacattcccactagcagtgtgaaagcattcctatttttctgcaacctttcccrcatctgtttcttgactttttaatgactgccattctgactggcataagatggtatttcgttgtggtcttgctttgtatttctctactgatcagtgatgttgagctttttttcatgtttgttgggcacatgtatgtcttcttctgagaagtgtctgttcatgtcctttgcccactttttaatggggttgtttttttcttgtaaatttgtttaagttccttgtagttgctggatattagacctttgtcagatggatagattgcaaaaatgttctcccattctgtaggttgt

SEQ ID NO: 622492 - DNA, 623 bp, Homo sapiens
ttccttaaaaccgtgactttcttattgctcttttcacctttcaaaaatgttttatttttaattgatacataattatagatatttatggggtacaatgtgatatttttatgtgtacattgtttaatgatccaatcagggtaattagccaattcactacttcaaactcatcttctttgtatgcatctctttagcttcagttcttggagtcagtctacagatgagctgcccttgtgttaaattcccttctctgactggagctgcctggatgtggggaacaggctcatgtgaaataaaacaaggctgaatttgttccstctataacatgatgctggacagtcttgcttagaagaactattggacatgacaagtcctatggagaacaaagcccatttttattttattttattttattttattttttggagacagggtctggctctgtcatccagggtagagtgcagtgatgttatcttggctcactgcaaccctcacctcccgggctcaagccgtcctcccacgtccgcctcctcagtagctgggactacaggcatgtgccacaatgcctggctaacttttgtaatttttgtagagatggggttttgccatgttgcctaggctgatct

SEQ ID NO: 622493 - DNA, 623 bp, Homo sapiens
ttccttaaaaccgtgactttcttattgctcttttcacctttcaaaaatgttttatttttaattgatacataattatagatatttatggggtacaatgtgatatttttatgtgtacattgtttaatgatccaatcagggtaattagccaattcactacttcaaactcatcttctttgtatgcatctctttagcttcagttcttggagtcagtctacagatgagctgcccttgtgttaaattcccttctctgactggagctgcctggatgtggggaacaggctcatgtgaaataaaacaaggctgaatttgttccctctataacatgatgctggacagtcttgcttagaagaactattggacatgacaagtcctatggagaacaaagcccatttttattttattttattttattttattttttggagacagggtctggctctgtcatccagrgtagagtgcagtgatgttatcttggctcactgcaaccctcacctcccgggctcaagccgtcctcccacgtccgcctcctcagtagctgggactacaggcatgtgccacaatgcctggctaacttttgtaatttttgtagagatggggttttgccatgttgcctaggctgatct

SEQ ID NO: 622494 - DNA, 298 bp, Homo sapiens
catgatgaatgaaatggtacctcacatttcaatactaacattggttgtaaatggaacaaatgctccacttaaaagatacagaatcacagaatggataagaactcaccaaccatctgctgccttcagtagactcatctagcacaaaagtactcacataaacttaaagtaatggggtaaaaaaaggcatttcrtgcaaatggacatcaaaagcaagcagggttagctattcttatatcagacaaaacaaactttaaagcaacacagttaaaacaggtaaagagggacattatataattat

SEQ ID NO: 622495 - DNA, 274 bp, Homo sapiens
atgtgggggagggagtcaacatgtttcaagtaaaattgttgtggggcaaaatccacaaaaacttggtgtcacacattaaccagtggggttatttatgtagatagcagctctcaggactctctatcaaatgagacaatgktcttcattgtagtagaattgtttcccaaactttcttagggcacattctcttctttcttcttttttatttttttctttcttttttttttttagacggagtcttgctctgtcctccaggctggagtgcagtggcgct

SEQ ID NO: 622496 - DNA, 396 bp, Homo sapiens
gattgtgaagattttctcccactctgtgagttgtctgtatactctgctgactggtcctttcatcatgcaaaagctctttagtttaattaggtttcagctatttatctttgtttttattgcatttgcttttgggttcttgggcatgaaatccttgcctaagccaatgtctagaagggtttccaatgttaccttctagaatttttatattttcaggtcttgggtttaaatccttaatccatctcgagttgatttttgtataaggttagagaggaggattckttttttttttttttcttgcatgtggcttgctaattatccgagcaccatttgttgaaaagggtgtccttttcccactttatgtttttgtttgctttgttgaagatcagttggctgtaa

SEQ ID NO: 622497 - DNA, 539 bp, Homo sapiens
gtattttgggttaaataaaatataacgtccagtttgtaaaagtcaaaaatagatattcacatgaatgtttttatcagcttcattaataactgtcaaaatctgagagtaactaaggcatccttgaagagatgaatgaatataaaacaccaaaaactgatatcaaaatttkgaaactaacttctaccgccaaaagatgaaaacattcaaataatgttaataaaagcaccaatgtaatagagctgaaattgaactcaaagtacagaaaaatcataatcagaatttttaatattaatagaaataaaagtattaagcacatgaaactaatagcaatgcagtaaaatgaaataataaagaaaacaacagaaatgtattagacattcgtatattaggataaaaataaaaagaaataaatcaatacataagatccctttttaaaagtctgagaattttttcaaagttctatctaacataatagggaaaataaggaaaagtcacaaatacacaaaacaagatattttagggtaactaacaacagacaa

SEQ ID NO: 622498 - DNA, 556 bp, Homo sapiens
ggtcctgactgttagatggaaaactaacaaacagaaaggaatagcatcaacaaaggacatccacagacaaaccccatccaaaagtcaccaacatcaaagaccaaaggtagataaatccatgaagataaggaaaatccagcacaaaaaggctgaaaattccaaaaacmagaaagcctcttctcctccaaaggatcagaactcctctacagcaagggaacaaaattggatggagaatgagtttgatgaattgacagaagtgtgcttcagaagctgggtaataagaaactcctccaagctaaaggagcatgttctaacccaatgcaaggaagctaagaagcttgaaaaaagttagagggaaggctaactagaataacgagtttagagtagaacataaatgacctgatggagctgaaaaacccagtatgagaacttcttgaagaatacacaagtatcaatagctgaatcattcaagcagaagaaaggatatcagagatcgaagatcaacttaatgaaataaagaatgaagacaatattagagaaaaaaagaatgaaaagg

SEQ ID NO: 622499 - DNA, 474 bp, Homo sapiens
gggtacatgtacaggtttcctgtataggtaaattgtgtgtcatgggggttttgtgtacagatgatttcattgcccaggtgttaagtatagtacccaataggtagttttttgatcctcatcctccaccctccctccacacttaagtacaccctgatgtttgttgttctcttccttgtgtccatatgtactcaatgtttagttcccatttataaatgagaacatttgctatttggttttctgttcccatattagttgcttaggataatggcctctggctccatctgtgttgctgcaaaggacatgatctcattctttttatggctgcatagtattccatggtgtgcatgtgctayattttctttattcagtccaccattgataggcattaaggttgattccatgtctttgctattgtgaatagtgctgtgaggaacatatgcatgcatgtgtcttagtggtagaacaatttctatt

SEQ ID NO: 622500 - DNA, 555 bp, Homo sapiens
gtgggactgtaagtccattaaacctctttcttttgtaaattgcccaggcttgggtatatctttatcagcagcatgaaaatggactaatacacttagaaaatcatcttcttgtgcccttcaatgtcctccagaacctgaaatttgaattyggttttttggcatcataagtggcttctatggaaattgtcctgctatgctaaatttagcattagaacagcactgctggggagctttgctatatttgcagccactcattccagactgatagagcaagggatgtgagtaccatttaaacacatgtatgcatccacactgtacacacacgggccatttctgtacatggaacagtgggcagaacagtagaacctgcaaaatagtatgaacctttatacaaggagaacttgtcccatttgtcagaaattaatctttgaattcttatttttatgatttaatatctatctatctatcatcaggttgaatgaacctatttacactgactgataactttgaaggttatagttattgtattcacatgaaatagattttaaataattg

SEQ ID NO: 622501 - DNA, 555 bp, Homo sapiens
gtgggactgtaagtccattaaacctctttcttttgtaaattgcccaggcttgggtatatctttatcagcagcatgaaaatggactaatacacttagaaaatcatcttcttgtgcccttcaatgtcctccagaacctgaaatttgaatttggttttttggcatcataagtggcttctatggaaattgtcctgctatgctaaatttagcattagaacagcactgctggggagctttgctatatttgcagccactcattccagactgatagagcaagggatgtgagtrccatttaaacacatgtatgcatccacactgtacacacacgggccatttctgtacatggaacagtgggcagaacagtagaacctgcaaaatagtatgaacctttatacaaggagaacttgtcccatttgtcagaaattaatctttgaattcttatttttatgatttaatatctatctatctatcatcaggttgaatgaacctatttacactgactgataactttgaaggttatagttattgtattcacatgaaatagattttaaataattg

SEQ ID NO: 622502 - DNA, 632 bp, Homo sapiens
gagaggatggcagattgagtgtttcgtgaagacccattcctcatatgcagacatctcactgtgacctcgcatggtggaaaggatgactgagatccctcaggcctcttttgtaagggcattaatcccattaataatggttccaccctcatgacctaatcacctcccaaagtccccacctcctgataccattaccttgggagttaggatttcaacatattaattgtgggggaaaacaaacaatcaaaccatagcacttatctctaattcaacccataattttagacagaaataatcagagattcaggccaggcacagcggcttttacctgtaatcccagcactttgggaggctgaggcaggcaaatcacttgagctcaggagttcaagactagcctgggcaacakggcgaatccctctctctacaaaaaatacaaaaattagccaggcatagtggtgtgcctattgtcccagctacttgggaggctgaggtgggaggatcacttgaacccaagaggttgaggccacagtgagctgttatcacaccagtgcattccagcctggacagcaaaatgaaaccctgtctcaaaaaaaataaaataaattagagattcagaaaggttaaataacttgcca

SEQ ID NO: 622503 - DNA, 632 bp, Homo sapiens
gagaggatggcagattgagtgtttcgtgaagacccattcctcatatgcagacatctcactgtgacctcgcatggtggaaaggatgactgagatccctcaggcctcttttgtaagggcattaatcccattaataatggttccaccctcatgacctaatcacctcccaaagtccccacctcctgataccattaccttgggagttaggatttcaacatattaattgtgggggaaaacaaacaatcaaaccatagcacttatctctaattcaacccataattttagacagaaataatcagagattcaggccaggcacagcggcttttacctgtaatcccagcactttgggaggctgaggcaggcaaatcacttgagctcaggagttcaagactagcctgggcaacagggcgaatccctctctctacaaaaaatacaaaaattagccaggcatagtggtgtgcctattgtcccagctacttgggaggctgaggtgggaggatcacttgaacccaagaggttgaggccacagtgagctgttatcacaccagtgcattscagcctggacagcaaaatgaaaccctgtctcaaaaaaaataaaataaattagagattcagaaaggttaaataacttgcca

SEQ ID NO: 622504 - DNA, 631 bp, Homo sapiens
ggaaaactgggcaacagtcaactgatttcaaacatttcattcatctccattgtccatatgctaccgctgacggctcatgagttttggatacctcttccacgagggctgagaatcgtccccgagtaccagatataaatgtagttccaggcactaaggtctgctaagggtttcccaactgtaagacaggctctacatttgacactctgaactcattttcccacaggaaaaaattatgtagatcaggtttagttctcagactgggcttagaaaattcatatagtgacwcacgtactacaagaagcataatgccaaacaatcttgaaagctgtttatagcaatattttctaggagaaatgtaggtgaagctctaatttgaaatactggcaagtttggtatggaattcaggggaacatgtgtaataaagaaccacagatatctatgactgctcaaaaatgtactttctctgcctccttgtcatttccagcatcaatctgctaacctaattggaatacttttaggactagataaatgtaaactagaaaagagttctgatagctatttctattactctccatttccttctccttattcctagctgtaggactttggtgagtgttggttcttattaata

SEQ ID NO: 622505 - DNA, 631 bp, Homo sapiens
ggaaaactgggcaacagtcaactgatttcaaacatttcattcatctccattgtccatatgctaccgctgacggctcatgagttttggatacctcttccacgagggctgagaatcgtccccgagtaccagatataaatgtagttccaggcactaaggtctgctaagggtttcccaactgtaagacaggctctacatttgacactctgaactcattttcccacaggaaaaaattatgtagatcaggtttagttctcagactgggcttagaaaattcatatagtgactcaygtactacaagaagcataatgccaaacaatcttgaaagctgtttatagcaatattttctaggagaaatgtaggtgaagctctaatttgaaatactggcaagtttggtatggaattcaggggaacatgtgtaataaagaaccacagatatctatgactgctcaaaaatgtactttctctgcctccttgtcatttccagcatcaatctgctaacctaattggaatacttttaggactagataaatgtaaactagaaaagagttctgatagctatttctattactctccatttccttctccttattcctagctgtaggactttggtgagtgttggttcttattaata

SEQ ID NO: 622506 - DNA, 501 bp, Homo sapiens
ttccaagcaatttttgtccttaaggatgtcaatttgtctctgactttttattagtaattttgcttctggtggtaaattgaaaggttggagcatgaagtctgctgtaattttagagttcaagaaatcagaatgtgctcaaaattatggctgtctacactggggcaaattataaatggatatttgtacattaaggatctagattttaattgtattaaatgagtttactgatttctttaaattcataaaacagatgattttttctattaaatgaccttggaaataattgtattttaaaatttgacattttggaatcattatgaaaattttgagttgatttaaatatgctatatatccttcatgtttaaacatgcagataatggcccmaaaatattccctttctgtactgctgatgttgtcataatttatgtcaatatgtcagttctttgtgtcttattctgtgctcttaagccatatgcagaaacatctgatattgttttgtat

SEQ ID NO: 622507 - DNA, 586 bp, Homo sapiens
atgtgctctcaacactctgatgaatgagacagcagcttcactgctgccacctagaaattaaatagagagagctaactgctggagatgctctttgggttgaacatattggtgttccaggaaaaatgctgtcatgtagagattacacgtcaccaaacttttatatcatgttattgttttagacactatatttaataaggtactcatgaggaatcaaagcaaccgattacatctgcccttgtaaaagaaagaaattttacctgaacaagggtgtataggaagtctaggtcattatactaatactttttttcttatgaatttaagttttctataaattattgtgaatttagcataaggcccacatggtgtatttacagatgttaagctcgaaatgaatgcttcaaacagartcacagaattttgttgccaaaaagaactacagattatgttgtctactacaaaatcctcactttattggcaaataaactgaggcttagaaaaccaaaatggtttatctatggtcatatatctagcaggtgacctcggaaccagatcttttaatgtctggaggaattttactcccagtgtg

SEQ ID NO: 622508 - DNA, 519 bp, Homo sapiens
aacaaaagagcagaatgaataaaagtttcmaaagatccacctattagtaattcaaataatacatgaccagcaaaaaaatgtagcaactgacaattttttattttattttatttttatttttttgaaacagagcctcgctcggtcacccagactggagtacagtggcgtgatctaggtttaccgcaatctccacctcctgggttcaagcaattcttctgtctcagactccagattagctgggcttacagatgccggccaccacacctggctaatttttgtatttttagtagagacagggtttcaccatgttggccaggctggtctcaaactcttgacctcaggtgatccacctgctttggcctcccaaagtgctgggattacaggcaattttcataaaatcaagatgttctgaaaatgaagtatgtttccccaatactgagagaattccattgttcccccaatactgagagaattccatgtatatggacagactaggagctttacaaagttatgagagtt

SEQ ID NO: 622509 - DNA, 646 bp, Homo sapiens
aggagggtaaagtcacttgcataaggtcccacattgaagaactaacgagttaggattcaaactcaggtccagctggcaggtctgggttctttctgctgtccctggtcctggcccaccaagccacctccacccaaccagctggtaggaagtacagacaagaagagacaagtaggggccagtctttgaggcccaggttctragctgtcagctgggaaggagagggggtgttagaactttactgtggtgcactgtcagagctgccatatgagaataagaaagaggtcacccttgctaaggtaacctcacctggttcacggcctccccagtctgctttcactgcccaggctgacgaaaccttgctccctgcccaggatcccctcctctgcacgtcctctgtctggaaacctctctccatctaccagctgacactcccctttgcacctggctgtagaggctccttccctcaggagaactctgagccatggactgcaagggtcccctgctaagtgcccccaaagcacctgacacttcccaggccaggtactccccattttattactaacactcgtccttcccgcttgaggatgaatgctctgaggtcaggcaaatcctctgacttgatgttgactatgttcccagagtgcag

SEQ ID NO: 622510 - DNA, 593 bp, Homo sapiens
aaggttatgggccaggcacaatggctcctgcctgtaatgccaccactatgggaggctgaggtaggagaattgcttgagttcaagagtttgagaccagcttgcacaacatagtgagaccgcatctctacaaaagattttttttttttttaattagctaggtgtggtggcatgcacctgtagtcccagctactgragacactgaggtgggacaatcacctgagcccgggaggttgaggcttcagtgagctgtgcttatgccaccacactctagcctgggtgatgaagtaagaccttgtctcaaaaaaaaaaaaaaagtttatgcatagaccagtgatgatagtacgacatgtaggaagcattactataaaaagtattcaccagtatatggcctagtctcaattttatttaaaaaacacacatacatataaatatataatcaggtgccacatactgatgtttttgttcaatacagtccacatatgcaacagtgattccgtaagattatatttttaatatgtaaaatttttattttattttacttttttatgtttagatatgttgagatacacaaatatttaccactgtgttacaat

SEQ ID NO: 622511 - DNA, 435 bp, Homo sapiens
gagaggagtcctggagaagctgctcattcccacaacccccggcaggtctcgcagtaccatgtggtaacagcataaccctgggcaagtcacttaataacacagaaatctttctccaatgtgagctttccttgaagaacttacaaataataattatcattctagtagttctcacttttcaagacacactgtcaagtgcctgatttgtcttatcttacccactctttacaacatccctatcagctctctgcctccatatmcccagcttgtaggccaggaaacggaggttcagagatactaaataccttgtccaaggccacacctgggttaagcagcagagttgggacttaattctaagtcaggcttctcccagagcccttggtcttgacattgtctcaaaattgagttctctagctcaaaatgctggtatttgagttc

SEQ ID NO: 622512 - DNA, 587 bp, Homo sapiens
tttctcatcatgctacagaaaccagcaccaccgctggcctcaaacaggcatatgaatgcctgctgaaggaatgaatctgggcagggacargatgaagctacatcagagggagacataaaacccaaggatcagtcattcacagttccaggccccacaaacagtagcagctcgtctggaagggcaactctcagtgggtaccaataacaggcctggctgtatgctgatgtccagattgtcatcattggggacacagtgatgtaggccacctttgcatgggtatacatagccaggtgcatattaatagccaatattgaactgctatacaaacaattacaattaccagttataaatacatgaactgttatcctgatattcacctgcctacataattggaactttggtccaggtctgtagataagaaattgttagtagtaaatttattagtgccacatttgcactatagttatctacactactcccttgattatttaaactggtgtttttatgccttaatttattaatattataatccttatctctataaaagaaaatgcatataaatttaaaaagtatttgtgaagggcagg

SEQ ID NO: 622513 - DNA, 296 bp, Homo sapiens
caagccaaaaaaaaaaaaaaaaagggaaggagggaggaaaagaggaagatagcaaggcaggaacaaagaraacaaccttgcttctacagtagataaataaacttacacggatttcccatcaaaaatgtactctttatagcaacatgagaacaaataatgaggggaaaaaatatcaattctcataagcacaaagccttaacattttcacttacaacctcaaactgaatagcatccagccatttcccataatttcagtaatggccgagacattggaacatgcagtaataacaaacaaa

SEQ ID NO: 622514 - DNA, 389 bp, Homo sapiens
tgggcatggtagctcacgcctgtaatcccagcatgttgggaggctaaggcaggagagaatcacttgagcccaggagttcgagactagacagggaatcatagggagatcccgtctctacacataataaaataaaataaaataaaaaattagtggggcatggggtggcacgttcctgtagtcctcactactcaggaagcatccgtcttgtttctccagataaactgaacatttgctgayagcacagaccctgtcttattcaccttcatttgccagtactttagagcatggtagctgctcattaagtttttgtgaaataattatgaaattattcctatttcataattaatagtgaaataaatatttcactaggagtgaaataattatgaaat

SEQ ID NO: 622515 - DNA, 259 bp, Homo sapiens
tttcatcctttactctaatttcagcgtctaaaatcctcgctaccatgaacaatctgagtatttgatgagacagggctgaatagtgcagtttttctcctagcaaccatttgggggcatttgctttaaatcgattggaaaaatatggcataaccatttgcacaaacttgggacaaatgatattkggataacgatctaccagaatagggaattttacccacagtttctgggacaaaaaccaaggaatctctgtggtgatcag

SEQ ID NO: 622516 - DNA, 437 bp, Homo sapiens
cttgctcactgacccatcccttktctgggcttccaagtggaactagagtttcattcaacctacatatgcctataggtcctccctgtggcaatgacatctctcagctcagtaagggccacttgcagtaggaatatgaccctaaccagaagactcagtggatccttatcaccttcatagaaaggtactcaccatccatgtcaacagccaagccaacacgctgttgctccaatacataaaaggcacttctgtagggctggcatgagtcacacagttcaagacaacctgaaggagttgaataacatctatccagtgagtcctgcaagactttaggccctttctcatccagcagctccctgctgagcctggaaaagtgggaaaaagtaaagaataagccagggggaatcagaaaccacacagccccagctagatttcatggc

SEQ ID NO: 622517 - DNA, 437 bp, Homo sapiens
cttgctcactgacccatcccttttctgggcttccaagtggaactagagtttcattcaacctacatrtgcctataggtcctccctgtggcaatgacatctctcagctcagtaagggccacttgcagtaggaatatgaccctaaccagaagactcagtggatccttatcaccttcatagaaaggtactcaccatccatgtcaacagccaagccaacacgctgttgctccaatacataaaaggcacttctgtagggctggcatgagtcacacagttcaagacaacctgaaggagttgaataacatctatccagtgagtcctgcaagactttaggccctttctcatccagcagctccctgctgagcctggaaaagtgggaaaaagtaaagaataagccagggggaatcagaaaccacacagccccagctagatttcatggc

SEQ ID NO: 622518 - DNA, 374 bp, Homo sapiens
cctacatgtgcctataggtcctccctgtggcaatgacatctctcagctcagtaagggccacttgcagtaggaatatgaccctaaccagaagactcagtggatccttatcaccttcatagaaaggtactcaccatccatgtcaacagcsaagccaacacgctgttgctccaatacataaaaggcacttctgtagggctggcatgagtcagtcagttcaagacaacctgaaggagttgaataacatctatccagtgagtcctgcaagacttcaggccctttctcttccagcagctccctgctgagcctggaaaagtgggaaaaagtaaagaataagccagggggaatcagaaaccacacagccccagctagatttc

SEQ ID NO: 622519 - DNA, 327 bp, Homo sapiens
ggcctgaaagctggtcatgatattctttggtttacatctcagaaccaagggtgaaatatccccattctggtacatcgttatcccaaaatcatttatcccaagtttgtgcaaacagttatgctttattgttcccatcagttcaaagaaaatgycccagatgatttccaggaggaaaactaaagtattcagccctgtctcatcaaatgcccagctcgttcatggatgcaagaattttagacactgaaattagaatgaaggaggaaatctacaaacccttgagtccaaatcatacttctgtgaattttttacatctgcctgggtccaatg

SEQ ID NO: 622520 - DNA, 610 bp, Homo sapiens
tatggctgctaagtatgaactcagttacctccagttataagctagtgtgaggttccatggtgtaatggtgagcactttggactctgaatacagtgatcagagttcaagtctcactgggacctttctgtataattccagtgaggttcctctctattgctccataagcagaatgggggaaattgcccaatcgtggtcacagaccctccatgccactggctgtgtgcaattggagtcscggacccagcgaccagcaagacccctcccctctcagggtgaccctgggcctccaggtcacaggtctccactaaaaaggctgcctcccctcaatcctagaccccgagttttcttttgttcacgtcattgggccattgccctatgtctctttggaagaaatgacctatatgaaaaactttacttccaggattccctaattctttcatcccttaggacagtgcagtttttcatctcctgatcttgggtccagtactaatggcgcgtttcatcttgttttcatgggatcccctccaaccggctaccagtggattcctgtccttggggtctctgtggatgacaactagatgctgctcttgtcccaaatcctgacacctcc

SEQ ID NO: 622521 - DNA, 610 bp, Homo sapiens
tatggctgctaagtatgaactcagttacctccagttataagctagtgtgaggttccatggtgtaatggtgagcactttggactctgaatacagtgatcagagttcaagtctcactgggacctttctgtataattccagtgaggttcctctctattgctccataagcagaatgggggaaattgcccaatcgtggtcacagaccctccatgccactggctgtgtgcaattggagtcccggacccagcraccagcaagacccctcccctctcagggtgaccctgggcctccaggtcacaggtctccactaaaaaggctgcctcccctcaatcctagaccccgagttttcttttgttcacgtcattgggccattgccctatgtctctttggaagaaatgacctatatgaaaaactttacttccaggattccctaattctttcatcccttaggacagtgcagtttttcatctcctgatcttgggtccagtactaatggcgcgtttcatcttgttttcatgggatcccctccaaccggctaccagtggattcctgtccttggggtctctgtggatgacaactagatgctgctcttgtcccaaatcctgacacctcc

SEQ ID NO: 622522 - DNA, 610 bp, Homo sapiens
tatggctgctaagtatgaactcagttacctccagttataagctagtgtgaggttccatggtgtaatggtgagcactttggactctgaatacagtgatcagagttcaagtctcactgggacctttctgtataattccagtgaggttcctctctattgctccataagcagaatgggggaaattgcccaatcgtggtcacagaccctccatgccactggctgtgtgcaattggagtcccggacccagcgaccagcaagacccctcccctctcagggtgaccctgggcctccaggtcacaggtctccactaaaaaggctgcctcccctcaatcctagaccccgagttttcttttgttcacgtcattgggccattgccctatgtctctttggaagaaatgacctatatgaaaaactttacttccaggattccctaattcyttcatcccttaggacagtgcagtttttcatctcctgatcttgggtccagtactaatggcgcgtttcatcttgttttcatgggatcccctccaaccggctaccagtggattcctgtccttggggtctctgtggatgacaactagatgctgctcttgtcccaaatcctgacacctcc

SEQ ID NO: 622523 - DNA, 443 bp, Homo sapiens
ttggggttcaaaataactaaagaaatgcagctacattrtctttttactttttttgaacccaaaatatctcttctcctttttgttgtgtgatttgtggtgatatggactatgtgaaggagacaggtcagttgtcctgctcagtgttctacattctgcagttgtctggtgattacctcctatgaaactcaggctaagcgttttctgcaagaacatggcattgttcatattctgcaccggcagagtcctgggtgacatgctgtctcctgccagcggctcctgactcctgttctctacaggatggaattgagaggagcagggctaaggcctcccaatgctgtttgtccatctagctgtggtcttcctaagtactgacaccaattggaggctgaaggactgtggcttctctaaccaaaggagtctagcgggttaacaattgtcaagag

SEQ ID NO: 622524 - DNA, 577 bp, Homo sapiens
ataaactcttatcatagcaagccrctgagatttgggttaaattattttaatgcattgcaatagtattcacttcttatcatttgcctctttaaatatcatgttactgcccaagagtatctttcatctcattcctaagcacagtgatctcagagacaatccagagcaatggaaaaattaatttgttttcagatcagaagaacacaggttacctaaaaaaaaaaaaacatggctggcatcattttctgaggagccagagacaacaaactgttcttttctttcctatgaattcactcaaaaccattttatttctttatttttaacattttattatgggaaatttcaaatcttcacacagtgcaaataacagaataataaacctctacgtatccatcatctagcttcaagtgtgtgtgtgtgtgcatgcatgtgtgcacatttgaggtctacagtatgttaatcgttgagccacgtgctatggttaggactcaaaggtgaataattaatgatctttgaatatgtagtaggaagaagagagtctgaatctcaaatcccagaaattacttagctctgagggtga

SEQ ID NO: 622525 - DNA, 628 bp, Homo sapiens
aggtttgcacagtaaaagggtatggttgagaggttttaaaaaaaattcctttcagtctttcttgccacgttttgaaattttacttattttctgttgtattagtgttttgcagtaaaatgttcttgaggtattttgctagtccctgacaccttagttcgaagtaatcattgttttctaaaatagctgagagaaagagraaatggatatgaggaactagaatggcctaaataaaacctggatcccgttcaggcgaggacagatgtacggggtgtgtgtgtgtgtgtgtgtgtgtgtgtgtgtgtgtagaaggtcttgggcaggaaggcatcaacatgctgtttctgggcactcaggagaagaggtgctagaaacaatatcagaaaggtaccatatgagagacaagttctttaataaaatataaatagaactaacaatgtattaagtgccaggccctattacatatattagactttttaatcctccaaactgaggtaactgctagtgttaacctcattgggagatcaggacactgaggcacagagagcttaagtaacttgtccaaggtcacacagctagtcagtggtggagccaggatggaaatctatggttataagctactgtgatatgg

SEQ ID NO: 622526 - DNA, 628 bp, Homo sapiens
aggtttgcacagtaaaagggtatggttgagaggttttaaaaaaaattcctttcagtctttcttgccacgttttgaaattttacttattttctgttgtattagtgttttgcagtaaaatgttcttgaggtattttgctagtccctgacaccttagttcgaagtaatcattgttttctaaaatagctgagagaaagagaaaatggatatgaggaactagaatggcctaaataaaacctggatcccgttcaggcgaggacagatgtacggggtgtgtgtgtgtgtgtgtgtgtgtgtgtgtgtgtgtagaaggtcttgggcaggaaggcatcarcatgctgtttctgggcactcaggagaagaggtgctagaaacaatatcagaaaggtaccatatgagagacaagttctttaataaaatataaatagaactaacaatgtattaagtgccaggccctattacatatattagactttttaatcctccaaactgaggtaactgctagtgttaacctcattgggagatcaggacactgaggcacagagagcttaagtaacttgtccaaggtcacacagctagtcagtggtggagccaggatggaaatctatggttataagctactgtgatatgg

SEQ ID NO: 622527 - DNA, 603 bp, Homo sapiens
ggtaaattactaaaatattgaattttctcttttatcaaatctgcctgatgtgattaaataaataaaattaacattaatatcctctttgtctcttgaggctgaaacaccaccagtgaacatctggtaaagatcagagtgagtgtagcttccaagtcatatcccacaaggcatsggtctgtcagatattaaaagcaaactccttgatttaaaaaataaaaccaaatcttaagatttctttcccagcgattttacgtaagagatacaaacatatgtatctgtgtaagcacatgttcaacatagtgtagacacatatatgtcaccataaattacaaatcccttagtataggtaaaagtgaaaccacagaaatcctcattagatggggcattgaccacagtctataaggcatctgtcaaataggatttcatatcccaaaacacagtttagaaacctgccatttggtaaaggtttaatttggtttccctttagaaggcatttaattcagtttacctggggaactgacctttcatgaactttgtccttaaaataaattcgtagcagatttgggcaaacatttcaaagctaatcgtggtttatgtttcttt

SEQ ID NO: 622528 - DNA, 603 bp, Homo sapiens
ggtaaattactaaaatattgaattttctcttttatcaaatctgcctgatgtgattaaataaataaaattaacattaatatcctctttgtctcttgaggctgaaacaccaccagtgaacatctggtaaagatcagagtgagtgtagcttccaagtcatatcccacaaggcatcggtctgtcagatattaaaagcaaactccwtgatttaaaaaataaaaccaaatcttaagatttctttcccagcgattttacgtaagagatacaaacatatgtatctgtgtaagcacatgttcaacatagtgtagacacatatatgtcaccataaattacaaatcccttagtataggtaaaagtgaaaccacagaaatcctcattagatggggcattgaccacagtctataaggcatctgtcaaataggatttcatatcccaaaacacagtttagaaacctgccatttggtaaaggtttaatttggtttccctttagaaggcatttaattcagtttacctggggaactgacctttcatgaactttgtccttaaaataaattcgtagcagatttgggcaaacatttcaaagctaatcgtggtttatgtttcttt

SEQ ID NO: 622529 - DNA, 543 bp, Homo sapiens
tggcaagctccgtcgctgggcttggagctccccctaagcctcagtttccccataatcaaaacagagggctggatgagatgatcccacagcccctttcagtgcctcgtcctgccgtgccactcatctaacacatctctgtggaaggcggtgttccccgctccttcagcttttctccaaggctgcatctcacagcctttcctcatgactaaccttgaatggagggatgccatgctgctggcttgcgttccctcatcatcaggagccttttgtcagccacacttctctcagactcatgctgcttgcttggcctttggcctttgtggctgagctcttcctttctccaggccccatgacgaagactagagcatgcaaactcctggagcctgaggccagtgcgcagcaagaggaggacacaggacrttggggcattttgggggatcgtgtgcatggtgacaactgcaggactgtgaactgtatccctgctcctcctgtaatttgagccctctctgtgataacatagaacctcaaaaacccatcccttgt

SEQ ID NO: 622530 - DNA, 613 bp, Homo sapiens
agatggtgtggatgtagttaaaagggaatggttatatcccgctggtgggaatgtaaattagtacaacctctgtggaaaacagtatagagatttctgaaagaactacaagcagatgaaccatttgatccggcaatcccactactgggtatcaacctaaaggaaaagaagtcattatatcaggaagacaacwgtatgcatatgtttattgtagtacaattcacaattgcaaagatatggaatcaacctaagtgcccatcaagagatgagtggataaagaaaatgtaatatacatataccatagaatactactaagcaataaaaaagaaagaaagaatgtcttttgcagcaacttggatagagctgaaggtcattattccaagtgaaggaacttgggaatgaaaaaccaaataccacatgttgtcactcataagtggaagctaagctatgggtatgcaaaggcatatgcaaagatataatggacatcgaagactcagaaagagggggtgggagggggtgagggattgaaaaactacatattgggtacagtgtacactacttgggtgatgggtactaaaatctcagacttgaccactgtacaattcatctatgtaac

SEQ ID NO: 622531 - DNA, 613 bp, Homo sapiens
agatggtgtggatgtagttaaaagggaatggttatatcccgctggtgggaatgtaaattagtacaacctctgtggaaaacagtatagagatttctgaaagaactacaagcagatgaaccatttgatccggcaatcccactactgggtatcaacctaaaggaaaagaagtcattatatcaggaagacaacagtatgcatatgtttattgtagtacaattcacaattgcaaagatatggaatcaacctaagtgcccatcaagagatgagtggataaagaaaatgtaatatacatataccatagaatactactmagcaataaaaaagaaagaaagaatgtcttttgcagcaacttggatagagctgaaggtcattattccaagtgaaggaacttgggaatgaaaaaccaaataccacatgttgtcactcataagtggaagctaagctatgggtatgcaaaggcatatgcaaagatataatggacatcgaagactcagaaagagggggtgggagggggtgagggattgaaaaactacatattgggtacagtgtacactacttgggtgatgggtactaaaatctcagacttgaccactgtacaattcatctatgtaac

SEQ ID NO: 622532 - DNA, 613 bp, Homo sapiens
agatggtgtggatgtagttaaaagggaatggttatatcccgctggtgggaatgtaaattagtacaacctctgtggaaaacagtatagagatttctgaaagaactacaagcagatgaaccatttgatccggcaatcccactactgggtatcaacctaaaggaaaagaagtcattatatcaggaagacaacagtatgcatatgtttattgtagtacaattcacaattgcaaagatatggaatcaacctaagtgcccatcaagagatgagtggataaagaaaatgtaatatacatataccatagaatactactaagcaataaaaaagaaagaaagaatgtcttttgcagcaacttggatagagctgaaggtcattattccaagtgaaggaacttgggaatgaaaaaccaaataccacatgytgtcactcataagtggaagctaagctatgggtatgcaaaggcatatgcaaagatataatggacatcgaagactcagaaagagggggtgggagggggtgagggattgaaaaactacatattgggtacagtgtacactacttgggtgatgggtactaaaatctcagacttgaccactgtacaattcatctatgtaac

SEQ ID NO: 622533 - DNA, 613 bp, Homo sapiens
agatggtgtggatgtagttaaaagggaatggttatatcccgctggtgggaatgtaaattagtacaacctctgtggaaaacagtatagagatttctgaaagaactacaagcagatgaaccatttgatccggcaatcccactactgggtatcaacctaaaggaaaagaagtcattatatcaggaagacaacagtatgcatatgtttattgtagtacaattcacaattgcaaagatatggaatcaacctaagtgcccatcaagagatgagtggataaagaaaatgtaatatacatataccatagaatactactaagcaataaaaaagaaagaaagaatgtcttttgcagcaacttggatagagctgaaggtcattattccaagtgaaggaacttgggaatgaaaaaccaaataccacatgttgtcactcataagtggaagctaagctatgggtatgcaaaggcatatgcaaagrtataatggacatcgaagactcagaaagagggggtgggagggggtgagggattgaaaaactacatattgggtacagtgtacactacttgggtgatgggtactaaaatctcagacttgaccactgtacaattcatctatgtaac

SEQ ID NO: 622534 - DNA, 557 bp, Homo sapiens
gtgagctgatcatgaggtcaggagatcgagaccatcctggccaacatggtgaaactccatctctactaaaatacaaaaaaaaaaatacccaggtgtggtggcacacgcctgtagtcccagctactcgggaggctgaagcaggggaatcacttgaacccaggaggtggaggttgcagtgagccgagatcgcaacactgcactccagccaggcaacagagggagactctgtctccaaaaaaaaaaaaaaaaaaaaaaaggtagaaagaagaatggtggttactaggggatgggctgattataggggtagcgggaaaggttgtcaagatgctggtcaaagraaataaaacttcagttggataggagaaataggttcaagagatctattgtataaaatgattattataggtaataatatattgcattcttgaaaaatggtaaaatatttctaattcatatacagcaaaaaagttagaaaaaaattcaaataacacatattaaaagaacacagctacattattccaaaaaagttgtaatataggaatatattaataggattg

SEQ ID NO: 622535 - DNA, 550 bp, Homo sapiens
gtgggcaattgagttataaaattcagagatttccctcacacttgtagggcatgaataggaaatcatttaaaaaaaaaaagtaatagatttagctgctgcttcagcacctscttcttgctaatggtgaaataagcctgctaataatttcaaataatattgagtaaacttatcaaacttgccattaatgacaatgaaaaataaacttaactgatgtcttcagaataactatgggtctaaaatgtttctagagttttgggggaggatattaattgttttagtttagttttgttttattccccacccaaatctgattttgttgtgcactctcaattgtatgcttcataaatattaatatttctctatactagaattattataatatttccatggaataaatgttgatatggtttggctgtgtccccacccaaatctctttttaattgtagctcccttaatatacaggtgttgtgggagggacccagtggaagataattgaatcatgggagtggtttcccccatactgttctcatagtaatgaataagtctcatg

SEQ ID NO: 622536 - DNA, 543 bp, Homo sapiens
ttcttccccttaactccagatagatcaggaaaaggacaaaataaattttggtgcttgttcataagtgttgataactgcaaactgaatataataaattcctcaaaaatactgytttaagaaattaaacttggtcaaacattgatggtaaatgtcttattcttaaagagatcttattctgaaacaacttgaatctttgtttttatgctgtgatattagtggctgtggcagtgcctagaattgtttaattgcctaatgcacaaaggtgagcactttgattgatgtgtattccgagaagttctttaataattttataaataaagaactctccagatgactgaatgtgtctgtgtgtgtatgtacatgaagagtgtgttctgtaaaaataaggtatgctttcttaatttgagttaaattatggatggttatataattcatttttctatacccagtttccatcttaaatctatttagagaaagaatagttcagggttggcgataaaatgtacttttacatttcctgatagtatttgaattatgcttctg

SEQ ID NO: 622537 - DNA, 543 bp, Homo sapiens
ttcttccccttaactccagatagatcaggaaaaggacaaaataaattttggtgcttgttcataagtgttgataactgcaaactgaatataataaattcctcaaaaatactgttttaagaaattaaacttggtcaaacattgatggtaaatgtcttattcttaaagagatcttattctgaaacaacttgaatctttgtttttatgctgtgatattagtggctgtggcagtgcctagaattgtttaattgcctaatgcacaaaggtgagcactttgattgatgtgtattcmgagaagttctttaataattttataaataaagaactctccagatgactgaatgtgtctgtgtgtgtatgtacatgaagagtgtgttctgtaaaaataaggtatgctttcttaatttgagttaaattatggatggttatataattcatttttctatacccagtttccatcttaaatctatttagagaaagaatagttcagggttggcgataaaatgtacttttacatttcctgatagtatttgaattatgcttctg

SEQ ID NO: 622538 - DNA, 543 bp, Homo sapiens
ttcttccccttaactccagatagatcaggaaaaggacaaaataaattttggtgcttgttcataagtgttgataactgcaaactgaatataataaattcctcaaaaatactgttttaagaaattaaacttggtcaaacattgatggtaaatgtcttattcttaaagagatcttattctgaaacaacttgaatctttgtttttatgctgtgatattagtggctgtggcagtgcctagaattgtttaattgcctaatgcacaaaggtgagcactttgattgatgtgtattccgagaagtwctttaataattttataaataaagaactctccagatgactgaatgtgtctgtgtgtgtatgtacatgaagagtgtgttctgtaaaaataaggtatgctttcttaatttgagttaaattatggatggttatataattcatttttctatacccagtttccatcttaaatctatttagagaaagaatagttcagggttggcgataaaatgtacttttacatttcctgatagtatttgaattatgcttctg

SEQ ID NO: 622539 - DNA, 543 bp, Homo sapiens
ttcttccccttaactccagatagatcaggaaaaggacaaaataaattttggtgcttgttcataagtgttgataactgcaaactgaatataataaattcctcaaaaatactgttttaagaaattaaacttggtcaaacattgatggtaaatgtcttattcttaaagagatcttattctgaaacaacttgaatctttgtttttatgctgtgatattagtggctgtggcagtgcctagaattgtttaattgcctaatgcacaaaggtgagcactttgattgatgtgtattccgagaagttctttaataattttataaataaagaactctccagatgactgaatgtgtctgtgtgtgtatgtacatgaagagtgtgttctgtaaraataaggtatgctttcttaatttgagttaaattatggatggttatataattcatttttctatacccagtttccatcttaaatctatttagagaaagaatagttcagggttggcgataaaatgtacttttacatttcctgatagtatttgaattatgcttctg

SEQ ID NO: 622540 - DNA, 586 bp, Homo sapiens
ttttatgtaggtgaaataaattacaattataactatctaaaccatatgattattaaattgaaatgcatactattattttaatcaaaatataattaaattatttttctagtttaaaaatacatatgggcaaatttctaatttaaaatgaagttacactattaagaagaattaaatgaaaatgtagaaactggtactacaactggaagagtaaagaataagagagtctggataaggatatgttaactgrtttcacaatgaatgaacattgcaatttgctgcaacaaagcaaaatggaaaagttgtttgtcacatatatatttttaagatattaaactggtcattatcaacatacattctcagaaaatacaaactgaatttgatatgcaattttgtttttcttaatagtaaaaaaaagaaacaaggaagttaaccaaagttagagtcaaatgttcaatacatttaaaaatatgttttgacagagtctgaagttacacttttggactgttatacaatggcttggatttttaaacaaagagaccatttttggatggaaagatggtaacatatgttatttcaattatgatta

SEQ ID NO: 622541 - DNA, 586 bp, Homo sapiens
ttttatgtaggtgaaataaattacaattataactatctaaaccatatgattattaaattgaaatgcatactattattttaatcaaaatataattaaattatttttctagtttaaaaatacatatgggcaaatttctaatttaaaatgaagttacactattaagaagaattaaatgaaaatgtagaaactggtactacaactggaagagtaaagaataagagagtctggataaggatatgttaactggtttcacaatgaatgaacattgcaatttgctgcaacaaagcaaaatggaaaagttgtttgtcacatatatatttttaagatattaaactggtcattatcaacatacattctcagaaaatacaaactgaatttgatatgcaattttktttttcttaatagtaaaaaaaagaaacaaggaagttaaccaaagttagagtcaaatgttcaatacatttaaaaatatgttttgacagagtctgaagttacacttttggactgttatacaatggcttggatttttaaacaaagagaccatttttggatggaaagatggtaacatatgttatttcaattatgatta

SEQ ID NO: 622542 - DNA, 559 bp, Homo sapiens
atacatttaaaaatatgttttgacagagtctgaagttacacttttggactgttatacaatggcttggatttttaaacaaagagaccatttttggatggaaagatggtaacatatgttatttcaattatgattagtttgttacaaagttgtaaaaatgagattaaaagaaatattgtaaataagcaaaagatctttaattaatcaactaaaaaattgcccatagtttacaatagctttctaacmataggaaaaatcagttgatcctaatttttaaaaatggcaaaccagtgccttttttaagattagaatgaagtatacaatatgagaaactgtccaattaatactttgggtacattttttcctcaaatgactcccagatttaggagaaaaatttcaatttttgaaataaataaagaactagtggcataggttttttttgtatctcttacagctattaaatattaatttcagctagaaatagaaaatttagtttattacaagatggtcacgatgatggatgctctagctatgttaggttaaaaaaaaccacagatttatt

SEQ ID NO: 622543 - DNA, 533 bp, Homo sapiens
agtttgttacaaagttgtaaaaatgagattaaaagaaatattgtaaataagcaaaagatctttaattaatcaactaaaaaattgcccatagtttacaatagctttctaacaataggaaaaatcagttgatcctaatttttaaaaatggcaaaccagtgccttttttaagattagaatgaagtatacaatatgagaaactgtccaattaatactttgggtacattttttcctcaaatgactcccagatttaggagaaaaatttcaatttttgaaataaataaagaactagtggcataggttttttttgtatctcttacagctattaaatattaatttcagctagaaatagaaaatttagtttattacaagatggtcacgatgatggatgctctagctatgttaggttaaaaaaaamcacagatttattataattttaaaacaaaagactgatgtttttccttgatgtgatttggctctgtttccccacacaaatctcatgtcaaattgtaatccccatgtgttgaaagagcggc

SEQ ID NO: 622544 - DNA, 251 bp, Homo sapiens
actgtctataagaagaaataaataataaatggcaagtaaagcaaacaagtgtgtaaaatatgttcaatctaaacacgaaagaatcagattagaactaatataatagcagatgtcagcagaatggttgatcartctaagcttcctaaggtccttgtattgtttggaagaagggtaaaatattggttatcaatatcttgttaactttgctggttaaaatttccataaaaacccctaaagaataaagagaaata

SEQ ID NO: 622545 - DNA, 338 bp, Homo sapiens
tgacacaatatttttaactttattcaaactattatgtagactggcccattgtctcattatgcctttgtttatgctgtttctactaagtgaaaagtcctcttcctcttcagttaattcacccaactggcttctatgctactcctttctgaaattccatagtgtttgcttttgcccaaaagttgatctgtttcaaatatctatttatcacctactgtcttttgctgcactaatgcgatttcatgtatcaattttgtatttccagagtttcatgaggcctttgagagatggacttttaaaaawcattctcctcctcctcattattattagcacttgcatta

SEQ ID NO: 622546 - DNA, 575 bp, Homo sapiens
gcaagtaccacttcacttttaggttttatyatttgtttgcttgtttttttaattttttactttcttaatgaataataaacaatcttcttagcctgaaaatttttagtcatcattccaaatacgtagtttatgtaacctgcatggcaatttctttaaataagaatggttgttattctgttatcagttgctattataaatcttctgttgttagttataaataacatatatcccaaaatatttttattgttcaataaattacccatattacttaaaaagtaattgtgtgtgcattagttttgagtcacacagcccgtatcattttttctttaattgtacatatttaagtacttttagagttagtttctaaggaaaagattttcctagctataattaatttcagttaccttccaaatcattaatgagcaggatgttagttaaggctatattgcgttttccatacttagatgtaaaaggcttcataatgtaaaatgatatggtgatgttttgaagttggatgaagttaaactatggttaagaaaggaatgaaagtaataaaacatttagaaaacactttt

SEQ ID NO: 622547 - DNA, 502 bp, Homo sapiens
aaattatcttaaagagttttattcctttaagaattttggttaaaaattataagcaggaaagaatatgttgtagttaaaaaaatttccatgtaaatagttaaatttttgtaatttagtattgaaaactcaataattaagaaaacattaatattcacaatgactcattccctgaaaacatcatatagctaaagtcttcctggtataatttctcttgtccatagatatgttcatatacagttaactcaaaaatgttatgctaattgtttaggtataaacttatttaaatgagcaagaggataaactgacatttactttaagtttasaattgtttccgaggttgtaattatcttaataacaacttaactttttacttttgctttcaaggctctacaaccttgtcattatcttccacatatccttcttcatacattgtgtatatttgtatgtcaatacattccacccgaactacctgctattaacttttacagcttactgtttttcc

SEQ ID NO: 622548 - DNA, 502 bp, Homo sapiens
aaattatcttaaagagttttattcctttaagaattttggttaaaaattataagcaggaaagaatatgttgtagttaaaaaaatttccatgtaaatagttaaatttttgtaatttagtattgaaaactcaataattaagaaaacattaatattcacaatgactcattccctgaaaacatcatatagctaaagtcttcctggtataatttctcttgtccatagatatgttcatatacagttaactcaaaaatgttatgctaattgtttaggtataaacttatttaaatgagcaagaggataaactgacatttactttaagtttagaattgtttccgaggttgtaattatcttaataacaacytaactttttacttttgctttcaaggctctacaaccttgtcattatcttccacatatccttcttcatacattgtgtatatttgtatgtcaatacattccacccgaactacctgctattaacttttacagcttactgtttttcc

SEQ ID NO: 622549 - DNA, 577 bp, Homo sapiens
ctttcaaatattctcttgattaaaagcttctaacctggcttaggtataaaatgcgtgcccatctgaagttcctcaaggcaayaggctattttatactttaccactagagtgacacattatgaatatttgaaaaagaatatacaagtcctgcagtgtattgacatggggaaaaaagttagactttttagaatatttattgactttttttagttccaacattcaaaaaagaaaactttacaaagcatgtgcatataatttatagtaaatataaaatatcctagggaatgaactcagactattatttagtgaaagggactgtatactgaaaaaaaatacattctgtgcattaaattataaccctcctgattatgggaactagacctggtttagcctacttatccatgtgtgcctagcacaaagctggtaagaacattaactttttatgaagttgaaaatcagcttgtaagtccaaagtctaccattttgtcctcacccagcatacacacaaacacaaaattacacttaaaatgttacaggcaaaacactgtcctctaacaatcactaatattgtattttc

SEQ ID NO: 622550 - DNA, 577 bp, Homo sapiens
ctttcaaatattctcttgattaaaagcttctaacctggcttaggtataaaatgcgtgcccatctgaagttcctcaaggcaataggctattttatactttaccactagagtgacacattatgaatatttgaaaaagaatatacaagtcctgcagtgtattgacatggggaaaaaagttagactttttagaatatttattgactttttttagttccaacattcaaaaaagaaaactttacaaagcatgtgcatataatttatagtaaatataaaatatcctagggaatgaactcagactattatttagtgaaagggactgtatactgaaaaaaaatacattctgtgcattaaattataaccctcctgattatgggaactagacctggtttagcctacttatccatgtgtgcctagcacaaagctggtaagaacattaactttttatgaagttgaaaatcagcttgtaagtccaaagtctaccattttgtcctcwcccagcatacacacaaacacaaaattacacttaaaatgttacaggcaaaacactgtcctctaacaatcactaatattgtattttc

SEQ ID NO: 622551 - DNA, 571 bp, Homo sapiens
tgtttatacaaggctctctgagaactcagttttaaagattacccaaagagtccctgcaacaatccagcctaaaacgatataaaatcagttttgatataactgaagtttttagattctgcctccaaatatcagattgtgacattttacctttctctgactttatgccaaatttacttcaacttctagcatctatcgttctcatttaggaacaaatatgtatttcacaaatgtggaaatacaaccatgagccaaacaaaaccaaatcctggacttacggagctgatggtagattccccaacataaccacttgattacagttttatgcaatgtgatgggagtaagggaccaccgtaggraggtcagaagttgcctctcagaggtggagactacagctgtcgtcagaaggatgagggttggaagaatcttcaggcacagagcaaagcatgagcaaaagctctgtggagtccaggcagctgagtaaatagggaataaaagaggccagtttggctgaagcagagagagcaggatggaattggtctgacctgtaagaagacatggagaggtgggcaaa

SEQ ID NO: 622552 - DNA, 265 bp, Homo sapiens
cttcaggaggcctgaaggctgatcatgatagagattccttggtttttgtcccagaaactctgggtaaacttccctattctggtagatcgttatcccaatatcatttstcccaagtttgtgcaaatggttatgccatatttttccaatcgatttaaagcaaatgcccccaaatggttgctaggagaaaaactgcactattcagccctgtctcatcaaatactcagattgttcatggtagcgaggattttagacgctgaaattagag

SEQ ID NO: 622553 - DNA, 622 bp, Homo sapiens
caagtgaattgcttgaacctgggaagcagagattgcagtgagccgagatggcaacactgcaccccagcctgggtgacagagcgagactctgtctcaaaaaaataaaaaaagaatagaagccacagtctttcatcatttaatctcagaagtgacatgccatcttttctgccatatrccagtggtcacacaggtcagcccctggtatcatatgggagaagactacacgaggctgggaatccccagaggtggggattattgaggaccatcttgggcctgtctatcagaaggagaattaatatctttacaatattgagatttccaatccatgagcaaatctccacttatttaagtccttttaaatttctctcaatagcatttatttggttttctatgtagagactttattcatcttttattaggcttatttctaggttttatatattttgatgctattacaaatagtatctttttaaaatttcactatttgttgtaagaatatagaaatataattgatttttgtgtattgattttgtaccccatcatcttttacaattcacttatttcgggtttgtttgtttgtgacagagtctcgctttgtcacccaggctgaaatgcagtggtg

SEQ ID NO: 622554 - DNA, 622 bp, Homo sapiens
caagtgaattgcttgaacctgggaagcagagattgcagtgagccgagatggcaacactgcaccccagcctgggtgacagagcgagactctgtctcaaaaaaataaaaaaagaatagaagccacagtctttcatcatttaatctcagaagtgacatgccatcttttctgccatatgccagtggtcacacaggtcagcccctggtatcatatgggagaagactacacgaggctgggaatccccagaggtggggattattgaggaccatcttgggcctgtctatcagaaggagaattaatatctttacaatattgagatttccaatccatgagcaaatctccacttatttaagtccttttwaatttctctcaatagcatttatttggttttctatgtagagactttattcatcttttattaggcttatttctaggttttatatattttgatgctattacaaatagtatctttttaaaatttcactatttgttgtaagaatatagaaatataattgatttttgtgtattgattttgtaccccatcatcttttacaattcacttatttcgggtttgtttgtttgtgacagagtctcgctttgtcacccaggctgaaatgcagtggtg

SEQ ID NO: 622555 - DNA, 622 bp, Homo sapiens
caagtgaattgcttgaacctgggaagcagagattgcagtgagccgagatggcaacactgcaccccagcctgggtgacagagcgagactctgtctcaaaaaaataaaaaaagaatagaagccacagtctttcatcatttaatctcagaagtgacatgccatcttttctgccatatgccagtggtcacacaggtcagcccctggtatcatatgggagaagactacacgaggctgggaatccccagaggtggggattattgaggaccatcttgggcctgtctatcagaaggagaattaatatctttacaatattgagatttccaatccatgagcaaatctccacttatttaagtccttttaaatttctctcaatagcatttatttggttttctatgtagagactttattcatcttttattaggcttatttctaggttttatatattttgatgctattacaaatagtatctttttaaaatttcaytatttgttgtaagaatatagaaatataattgatttttgtgtattgattttgtaccccatcatcttttacaattcacttatttcgggtttgtttgtttgtgacagagtctcgctttgtcacccaggctgaaatgcagtggtg

SEQ ID NO: 622556 - DNA, 565 bp, Homo sapiens
tctcctgggctcaatcagtcctcctacctcagcctcctgagtagctgagactataggcacgtgccagcccaccttggcctcccaaagtgttgggattacagacgtgagccactgtgcctggccctgggtcagttactttgagtccttgcatgtccaagttttgctgtcataagagttttgtctggaaaaagagttctagaytgacaatcattctcactctgaaatttggatagcttattccattatcttctggtatttggtgttgccacaagaagtcttatgttaccatgattattagttccttttatttcctctagaatcatttaggactttctctttcatcccggttttctgaaacgttgctctaatgtatttagatgtgagtatttttttcattcaccctgtttggcaacttgacggacccattcgcctgaatacttgatcttcttaattagccctggaaatatttcttcagttattttgtcgaatactttcttccttccagtatcttgtttctctttcaggagctcctattacatatatattagaacttcttgatttatac

SEQ ID NO: 622557 - DNA, 565 bp, Homo sapiens
tctcctgggctcaatcagtcctcctacctcagcctcctgagtagctgagactataggcacgtgccagcccaccttggcctcccaaagtgttgggattacagacgtgagccactgtgcctggccctgggtcagttactttgagtccttgcatgtccaagttttgctgtcataagagttttgtctggaaaaagagttctagactgacaatcattctcactctgaaatttggatagcttattccattatcttctggtatttggtgttgccacaagaagtcttatgttaccaygattattagttccttttatttcctctagaatcatttaggactttctctttcatcccggttttctgaaacgttgctctaatgtatttagatgtgagtatttttttcattcaccctgtttggcaacttgacggacccattcgcctgaatacttgatcttcttaattagccctggaaatatttcttcagttattttgtcgaatactttcttccttccagtatcttgtttctctttcaggagctcctattacatatatattagaacttcttgatttatac

SEQ ID NO: 622558 - DNA, 543 bp, Homo sapiens
ccactgacttcagggcaaatatgagagatttaaaatgaaagaatacagttcatgagatttaaaaaaaaatggaaaaaagcaataataaatgaatgaggtctggtgataaaacagctgctcaataacaaaattattctaaaacaacttcagaaaccctactgtctgccaatatatatataacctcccttcaatggttgatttttcaatggtcaatttttcactaaagtagtatactctattcaattttttttttttttttttttttttttgagaccgagtctcactctgtagctcaggctggagtgcagtggcacgatcttggctcactgcaacctccatctcccaggttcaagggattcttgtgcctcagcctcccaagtagctgggactacaggcacrcaccaccacattcggctaatttttgtatttttagcagaggtggggtttcaccatcttggccaggctaggctcaaactcctagcctcaagtgatctgcctgccttggcctcctaaagtgctgggattacaggtgtgggccaccac

SEQ ID NO: 622559 - DNA, 498 bp, Homo sapiens
ctccgctcctgtggctttgcattgtgcagcctccctcctagctgctttcatggggtggcatttggtgcctgcagctttccaaactgtatggtgcaagctatggtggatattccattctgtgatctggaggatgatggccctcttctcacagctccaccaggcagtgccccagtaggaactctatgtgtgggctccaaccccacattcccttctgccctgccctagcagaggatctccatagggcttccccctgcagcaaacttcgcctagacatcaggtatttccatacatcttcaraaatctaggtggatgttctcactcctcaattcttgacttttgtgcacctacaggcccaacaccagttggaagccaccaaggcttgaggcttgcaccctttgaagcaatggcctgagctgtaagttggccccttttagtcatggctgggacctaagtcaccaagtcttaagaccacacaaagcagcaaggtcctgggtgtgg

SEQ ID NO: 622560 - DNA, 291 bp, Homo sapiens
gtttggtgactgacaaagtggaagtcaaatgatagctgtagtggattggaaaggttacgtgagagaaagcaaatacacagagaatatagaactttttcagcctttgccctccttctaaagaacaaagaaatgggacagtattagatgtggactactgcatagcaagaaaaatttcttttaatagcaggtgtgttaacaacatattttcctacacttacasatgcatcaggtggaagggtagaggcagaaacatctgattatgaacaagataaaggaaaaaaattgtgggaa

SEQ ID NO: 622561 - DNA, 291 bp, Homo sapiens
gtttggtgactgacaaagtggaagtcaaatgatagctgtagtggattggaaaggttacgtgagagaaagcaaatacacagagaatatagaactttttcagcctttgccctccttctaaagaacaaagaaatgggacagtattagatgtggactactgcatagcaagaaaaatttcttttaatagcaggtgtgttaacaacatattttcctacacttacagatgcatcaggtggaagggtagaggcagaaacatctgwttatgaacaagataaaggaaaaaaattgtgggaa

SEQ ID NO: 622562 - DNA, 194 bp, Homo sapiens
tttaatctttaagctgtccttatttattcctgggcataggccaaactaactttgggaaggaattcagttcacgstttgactctgaaacaaaattgataacagccctttcctcaaaagacccccttcttgcctggggaccagtctgactttgcaggactaacaaattagctacaaggttagaaattacaatttag

SEQ ID NO: 622563 - DNA, 376 bp, Homo sapiens
aatcaaaatgtcaaagagtgaacaggctgaaatcagaggtgtgttaagcccaggatgctgaagcaggtattgagggcttggctctttcagagtgaaggaaactaaaagtgctccatatgaaataggaataggatttagtgaaggataagartaatgggagttggagtcattgcttaaatctgggggctcagctccgcccatcttcaactaaaaggtgtgcttattgtgcatccttacccacagttgttataaaagctgatcagaagaacactaagagcctcatactcatgaatggaatagtactaggtggtcctgcaatttgttctgtggtcatctcaggtagaagcctcaaagctaaattacaagacttggtatt

SEQ ID NO: 622564 - DNA, 385 bp, Homo sapiens
aatcaaaatgtcaaagagtgaacaggctgaaatcagaggtgtgttaagcccaggatgctgaagcaggtattgagggcttggctctttcagagtgaaggaaactaaaagtgctccatatgaaataggaataggatttagtgaaggataagagtaatgggagttggagtcattgcttaaatctgggggctcagctccrcccatcttcaactaaaaggtgtgcttattgtgcatccttacccacagttgttataaaagctgatcagaagaacactaagagcctcatactcatgaatggaatagtactaggtggtcctgcaatttgttctgtggtcatctcaggtagaagcctcaaagctaaattacaagacttggtatttgtttgggg

SEQ ID NO: 622565 - DNA, 560 bp, Homo sapiens
cagctgtactccatggctgttatagtcatctctggactcacattctatcacctcctattccagaaagaaacgaagtttctctaacctgccgtacattgaaaacatcttagggaaagtctctggtagtcctagccccagtcctatattaccaccgcagggttcgtggaggcaggtttgtaagtgtgggtagccaaattatggcctctgcagaggtgaggtctgctgtctactcatcagcacatctgtcacatgtgtttcttctctggtagactttgagttccttataagcagaaaccattcaccttaatattctcatcacctaaccaggagcccagagttggtgcttaacatttattaaataaatattgctaaactgtactccagaaggacaagttctaaatgtttacccagagttctgccaaaaatggattatatcattttagtctaaattttctagacactgacaaagaacatcttaagttgaaaaaaaattgaaaagraaaacataccataaaaggatcttggtggtagggggcagggggcaggtaaaaatttttgga

SEQ ID NO: 622566 - DNA, 513 bp, Homo sapiens
gaaacctgtcattcacaaccagttggcacatatggcattttattaccctttgtggaagtgcttatctaagaaaatctaagtgaatgtgaaaaagttacattgcagctcaagggtgctaggagggtctcattttccttggggatactgaataaacagtgtgcaactgcattttgactgtgacctatcacatgaagtcaaatgtgtaactttcctcctatggcaatcatgtcagtgctcaaaagtttcagatttttgatttttggattgcggtgcttaacctatactttgtaactatatagcttcatttacttccccctcctttgkgctgttattttcatacaaattacagctatgtacattgttatgtccatcagcatgcatttatagttatttatgtaagcaaatgcctttttaaaatcagacttttataaaagagttacaaacacaaagtgtatttatactgtctattttatttactgatgtaggtaccttttctggcaatctatttttctt

SEQ ID NO: 622567 - DNA, 501 bp, Homo sapiens
agttaagatacagagtttttattgggtgcttatttatgcagaaaatattaagttgttatcaggttaaaataatggattataagatagtatttgcaaccctcatggtaacctgaaatcagaaaacataaaacaaatacacaaaaataaaaaaagcaagtacttaatactaccagagaaaatcaacttcaytaaaaggaaaacagggaagaaggaagagaagatcacaaacagttacatacttatcaataataaaattgaaggtaaatggactaaacccttcaatcaaaagccacagtggctgcatggataaaacaaaaacaaaacaaaacaaaaacacaagacacaatagctgttgcctacaagaaactcactccccctataaagacacacccagactgaaaaaacagggatggaaaaagatattccatgccaatggaaaccaaaaaaaaaaaaaaaaaaaaaaaggagagcaggaatagctatactaatatcagacagaat

SEQ ID NO: 622568 - DNA, 501 bp, Homo sapiens
agttaagatacagagtttttattgggtgcttatttatgcagaaaatattaagttgttatcaggttaaaataatggattataagatagtatttgcaaccctcatggtaacctgaaatcagaaaacataaaacaaatacacaaaaataaaaaaagcaagtacttaatactaccagagaaaatcaacttcactaaaaggaaaacagggaagaaggaagagaagatcacaaacagttacatacttatcaataataaaattgaaggtaaatggaytaaacccttcaatcaaaagccacagtggctgcatggataaaacaaaaacaaaacaaaacaaaaacacaagacacaatagctgttgcctacaagaaactcactccccctataaagacacacccagactgaaaaaacagggatggaaaaagatattccatgccaatggaaaccaaaaaaaaaaaaaaaaaaaaaaaggagagcaggaatagctatactaatatcagacagaat

SEQ ID NO: 622569 - DNA, 645 bp, Homo sapiens
acttgaggtcgggagattgagatgagcctggcaaacgtggtgaaactccgtctctactaaaagtacaaaaatttgtcgggcgaagtggtgggtatctgtaatcccagctacttgggaggctgaggcaggagaatcgcttaaacctggaaggcggaggttacagtgagcccccgatcgcactattgcactccagcctgggcgacaagagcgaaactccgtctgaataggtgtttctcaaataagttatacaaatgactaataggcacacaaaaaagacgtccaacatttttagccattagggaaattcaaataaaagccacagtgagttgttacttctatttaccaggataattatataattttttaaaaaattaaaaataataaatcttggtgagaatgtggagatattgtaaccctcagacattgatgatgggaatgtaaaatagggcagatgctgtagaaaagyttggcagttttccaagatgttaataatagaactcccatatgacccagcaacttctctcttaggtatatgaccaaaagaatggaaaacaaaatctcacgcaggtacttgtataccaatatttattattcataattgtcaaatggtgaaagcaacccaagtaactatccacagatgaatgg

SEQ ID NO: 622570 - DNA, 645 bp, Homo sapiens
acttgaggtcgggagattgagatgagcctggcaaacgtggtgaaactccgtctctactaaaagtacaaaaatttgtcgggcgaagtggtgggtatctgtaatcccagctacttgggaggctgaggcaggagaatcgcttaaacctggaaggcggaggttacagtgagcccccgatcgcactattgcactccagcctgggcgacaagagcgaaactccgtctgaataggtgtttctcaaataagttatacaaatgactaataggcacacaaaaaagacgtccaacatttttagccattagggaaattcaaataaaagccacagtgagttgttacttctatttaccaggataattatataattttttaaaaaattaaaaataataaatcttggtgagaatgtggagatattgtaaccctcagacattgatgatgggaatgtaaaatagggcagatgctgtagaaaagtttggcagttttccaagatgttaataatagaactcccatatgacccagcaacttctctcttaggtatatgaccaaaagaatggaaaacaaaatctcacgcaggtacttgtataccaatatttattattcataattgtcaaatrgtgaaagcaacccaagtaactatccacagatgaatgg

SEQ ID NO: 622571 - DNA, 529 bp, Homo sapiens
ggcagtaagtcaatcataagaaatgaaagtttacagctgtggtagagatgtacgtggcccagtccttctgaagaacttctttctccagctactgggagtgctgccagcataaaactctcagctgtcagctttctccagaaattgtcctcagctgaagagtgctaccttgttgaagagcactccctttcttagggcaggacctcatatggtgagtgggatgatacagtgrtatcatggctcagagactcttgttccaaatggaacaactccaaagtgtcattccagcttccaaggtccctgtgcggtttgctgaggcttttgttcttcccctggccaatcttgatcttttttttaccccctaaggtgtagatccagaaagtattccccaattaacttccggcaagctcatctgtgacttcagagtcagcttcttgtaaaacccaaccttcaacggtgaccatctaatctattgtcaaatccaagattttttttttttgtaagtgaaagaatgtgctaattggatggaatg

SEQ ID NO: 622572 - DNA, 529 bp, Homo sapiens
ggcagtaagtcaatcataagaaatgaaagtttacagctgtggtagagatgtacgtggcccagtccttctgaagaacttctttctccagctactgggagtgctgccagcataaaactctcagctgtcagctttctccagaaattgtcctcagctgaagagtgctaccttgttgaagagcactccctttcttagggcaggacctcatatggtgagtgggatgatacagtgatatcatggctcagagactcttgttccaaatggaacaactccaaagtgtcattccagcttccaaggtccctgtgcggtttgctgaggcttttgttcttcccctggccaatcttgatcttttttttaccccctaaggtgtagatccagaaagtattccccaattaacttcyggcaagctcatctgtgacttcagagtcagcttcttgtaaaacccaaccttcaacggtgaccatctaatctattgtcaaatccaagattttttttttttgtaagtgaaagaatgtgctaattggatggaatg

SEQ ID NO: 622573 - DNA, 499 bp, Homo sapiens
tctttttgcaccgtgttggaaactattgaagtactatcttcacagcgtaaccctccgtacatgcacttcattgctcctcaatttttctgcctttctccaacacaatacctgatactkccctactttctattctcttgtatccttattttttcctaattgagagagaacagtgatgataattaaacaattgagtggaaaccaattcctgcgatagtgctagatgcttaataggtaacatcttctgctcgagttactgagacttcacctactttgaagctactgatctcaaagaagcttaaggaataattatggaggagataattttaggtaaaatttgaatttataaggaaatgttgtccaggaaaattatagggtccattttttaccaggcttgagacatatttggtacagagaatattagggagtggttagtcagaatggctgctttggaaaatgaatttaactgtaagaagtctgttgagtacatataacagtggaa

SEQ ID NO: 622574 - DNA, 522 bp, Homo sapiens
atgctatatacaatgcatggatgtagtgaaatacatagagactcagaagtcataagccctgagtttgaatcctcttgatattttctcactctggtgactcttggataaatcacactcaatttctcctagtctaaatgtgattatcaataaaattatgwtaataaagccttgctctgtttagagtcttaggtgagaaaatgtggtttgtaaatgattttgtgaattttataaaattatacagatatatttcatattgctattattataattaaaaatacagagtcaggataatttcatcctgtgcacaagaggcagattatgtttgaattaatcaaatagaatttgagcacagaagtcattcatcccttcattcaacatgctatttagcactgagtatacatcagaaactgtgctcaaatcttggtatctgacactgaaaaaaaacagataaaaaactgtctacgtggagcttacactctaacacttaccaaataaatgatgtccatttggtcggcttctatt

SEQ ID NO: 622575 - DNA, 522 bp, Homo sapiens
atgctatatacaatgcatggatgtagtgaaatacatagagactcagaagtcataagccctgagtttgaatcctcttgatattttctcactctggtgactcttggataaatcacactcaatttctcctagtctaaatgtgattatcaataaaattatgttaataargccttgctctgtttagagtcttaggtgagaaaatgtggtttgtaaatgattttgtgaattttataaaattatacagatatatttcatattgctattattataattaaaaatacagagtcaggataatttcatcctgtgcacaagaggcagattatgtttgaattaatcaaatagaatttgagcacagaagtcattcatcccttcattcaacatgctatttagcactgagtatacatcagaaactgtgctcaaatcttggtatctgacactgaaaaaaaacagataaaaaactgtctacgtggagcttacactctaacacttaccaaataaatgatgtccatttggtcggcttctatt

SEQ ID NO: 622576 - DNA, 522 bp, Homo sapiens
atgctatatacaatgcatggatgtagtgaaatacatagagactcagaagtcataagccctgagtttgaatcctcttgatattttctcactctggtgactcttggataaatcacactcaatttctcctagtctaaatgtgattatcaataaaattatgttaataaagccttgctctgtttagagtcttaggtgagaaaatgtggtttgtaaatgattttgtgaattttataaaattatacagatatatttcatattgctattattataattaaaaatacagagtcaggataatttcatcctgtgcacaagaggcagattatgtttgaattaatcaaatagaatttgagcacagragtcattcatcccttcattcaacatgctatttagcactgagtatacatcagaaactgtgctcaaatcttggtatctgacactgaaaaaaaacagataaaaaactgtctacgtggagcttacactctaacacttaccaaataaatgatgtccatttggtcggcttctatt

SEQ ID NO: 622577 - DNA, 522 bp, Homo sapiens
atgctatatacaatgcatggatgtagtgaaatacatagagactcagaagtcataagccctgagtttgaatcctcttgatattttctcactctggtgactcttggataaatcacactcaatttctcctagtctaaatgtgattatcaataaaattatgttaataaagccttgctctgtttagagtcttaggtgagaaaatgtggtttgtaaatgattttgtgaattttataaaattatacagatatatttcatattgctattattataattaaaaatacagagtcaggataatttcatcctgtgcacaagaggcagattatgtttgaattaatcaaatagaatttgagcacagaagtcattcaycccttcattcaacatgctatttagcactgagtatacatcagaaactgtgctcaaatcttggtatctgacactgaaaaaaaacagataaaaaactgtctacgtggagcttacactctaacacttaccaaataaatgatgtccatttggtcggcttctatt

SEQ ID NO: 622578 - DNA, 620 bp, Homo sapiens
gtcacccaggctggagtgcagtggtgggatcttggctcactgcaacctctgcctcccgggttcaaaagattctcctgcctcagcctcccgagtagctgggactacaggtgccaccaccatgcccggttaatttttgtatttttagyagagacaggattttgccacgttggccaggctggtcttgaactcctgacctcaggtgatccacctgcctcagcctcccaaagtgctgggattttaggtgtgagctactgtgcccagctgaaaataaatttttaaaaactgtgtataccccattgtgtgaggtgacactgggggcacctattattcggaccagagactaagtgtccaatttgaaaaggaggctgtggatgctgacagacctttccctgcctcttgattgactgcatcctgaaagtactagcaaagtttaatactgagcacaatctgtaattgaagtgagtcttacaggacaattggatcctttgtattcacttaaggtttactgtacacaatcctgaaaaatatgcaaacataaatagtctacagtgcaactcacatgaaaaaataaactgtgtgtagttgatgacaactaatctgtcattcatctggtttgtaat

SEQ ID NO: 622579 - DNA, 620 bp, Homo sapiens
gtcacccaggctggagtgcagtggtgggatcttggctcactgcaacctctgcctcccgggttcaaaagattctcctgcctcagcctcccgagtagctgggactacaggtgccaccaccatgcccggttaatttttgtatttttagtagagacagrattttgccacgttggccaggctggtcttgaactcctgacctcaggtgatccacctgcctcagcctcccaaagtgctgggattttaggtgtgagctactgtgcccagctgaaaataaatttttaaaaactgtgtataccccattgtgtgaggtgacactgggggcacctattattcggaccagagactaagtgtccaatttgaaaaggaggctgtggatgctgacagacctttccctgcctcttgattgactgcatcctgaaagtactagcaaagtttaatactgagcacaatctgtaattgaagtgagtcttacaggacaattggatcctttgtattcacttaaggtttactgtacacaatcctgaaaaatatgcaaacataaatagtctacagtgcaactcacatgaaaaaataaactgtgtgtagttgatgacaactaatctgtcattcatctggtttgtaat

SEQ ID NO: 622580 - DNA, 590 bp, Homo sapiens
atcaaaggaagataaaagttgaggcttttattttttttcagtgagaaagttaaaaatccacagagatgaaaagtaggagagacaattagataatcacttggggaggtcctatattcaaatacctggacttctggaaacagtagggaaaggaagagaagaaaattatcaaagaaacaatttttttccaaaactgaaagcacatattttaagaattaaaaagcccattgagtacccagtccaataagcaaaaaggcccataccaagacacataattggaaatttccagaacaccasgaacaaagaaaatagtctaaaagccttcagagaaaggaaaaagggttacatttaaagaaacagaatgccaaacttctcaactaccattctgaatggaaaggaaaattgaagaatcccctcacaattctgagagaaattatatcaaacctagaattgtatacttcaccatacttacagtcaagtttgattagagaaaaaaaaaagatattttcagacatgcaaagtctcagaaaaatgtgtctcccatgaagcttttctctgaaagcaactagaggtgagttccacaaaaattgaag

SEQ ID NO: 622581 - DNA, 582 bp, Homo sapiens
ttttttttttaaaaattataatgtattcatgctatttcaattacataaaatcaaatattatctggtaaaacatttctctaatgaggttgaatatgttaatttttgaggtaagtggaaagggtaagaagtggcatgtgaaacaaaaataactttttaactgattaataaagcaccacttcaccagccgcagttcactgtttttatattgttagtttatttccactgagtttggaaattccttactaccattattcagtcaaatatataagtatctagttaaaggtgatttacacatgcatgastggctgaatgttttccctttttctgcttctgaaagtggcatttgcttctggattccatgctttgtgtatatattcaatggataaatttttggtttgtatttaagaatgttaacatgctccagaagaaatttagagtaaacctatctatacagaccaccaaactgaaaaatcattttaacttatgttccagatttctgagccttatttcatacaagagtattaaagttaatgcagtttaacttccaggaaaaaattcttgtaaatctctatttctatttta

SEQ ID NO: 622582 - DNA, 415 bp, Homo sapiens
caaagatggtggaattaacagacaakgacagctattataaatattttcaaaaatccaaggtagaaaatggacataatgtaagagttaagatgtatcagcagagaaaatgagaattatatttaaaaaactaaatagaaattctataaatgaaaagtacaatatctgaagtgaaaaaatccacagaatccccagataggatatagggcattgcagaagaaatggtcagtaaacatgaaggtttatcagtagaaattatccaaactgaaccacacaggaaaaaaacaaacaagcttcagtgacctatgagacaatattgagcagtctaacatccatgtccctggctgaggtaggaatccttggagcttaggctctactgatcccctccacttcaatctttgcctggaagttgtacagg

SEQ ID NO: 622583 - DNA, 415 bp, Homo sapiens
caaagatggtggaattaacagacaaggacagctattataaatattttcaaaaatccaaggtagaaaatggacataatgtaagagttaagatgtatcagcagagaaaatgrgaattatatttaaaaaactaaatagaaattctataaatgaaaagtacaatatctgaagtgaaaaaatccacagaatccccagataggatatagggcattgcagaagaaatggtcagtaaacatgaaggtttatcagtagaaattatccaaactgaaccacacaggaaaaaaacaaacaagcttcagtgacctatgagacaatattgagcagtctaacatccatgtccctggctgaggtaggaatccttggagcttaggctctactgatcccctccacttcaatctttgcctggaagttgtacagg

SEQ ID NO: 622584 - DNA, 578 bp, Homo sapiens
aaggacagctattataaatattttcaaaaatccaaggtagaaaatggacataatgtaagagttaagatgtatcagcagagaaaatgagaattatatttaaaaaactaaatagaaattctataaatgaaaagtacaatatctgaagtgaaaaaatccacagaatccccagataggatatagggcattgcagaagaaatggtcagtaaacatgaaggtttatcagtagaaattatccaaactgaaccacacaggaaaaaaacaaacaagcttcagtgacctatgagacaatattgagcagtctaacatccatgtccctggctgaggtaggaatccttggagcttaggctctactgatcccctccacttcaatctttgcctggaagttgtacaggtccattctacaatgagcccygtggagttcatccttgtccacatggtctctgagacccttctacacttcaaactattgagtctatgcagcaaatatctattcattctataaaaatacatttctaaaacatttgtatagtttagatctttataaacaatagttttcttctgactcagaaacaaaatta

SEQ ID NO: 622585 - DNA, 532 bp, Homo sapiens
tattgagcagtctaacatccatgtccctggctgaggtaggaatccttggagcttaggctctactgatcccctccacttcaatctttgcctggaagttgtacaggtccattctacaatgagccccgtggagttcatccttgtccacatggtctctgagacccttctacacttcaaactattgagtctatgcagcaaatatctattcattctataaaaatrcatttctaaaacatttgtatagtttagatctttataaacaatagttttcttctgactcagaaacaaaattatggtttacttaaagctgcatctgcttaatgaagagacatcaataccaaggataacctctgcctgacttaaattctacctcctctatggatactttttggttcagataattgggtatgatccctaccatacatagcattctgtttctgttcctcttttgatacatccactagataagcactattcaatctgggatacttaaagacttgctaacctgtatccaagtcatgatgtttttttgttt

SEQ ID NO: 622586 - DNA, 532 bp, Homo sapiens
tattgagcagtctaacatccatgtccctggctgaggtaggaatccttggagcttaggctctactgatcccctccacttcaatctttgcctggaagttgtacaggtccattctacaatgagccccgtggagttcatccttgtccacatggtctctgagacccttctacacttcaaactattgagtctatgcagcaaatatctattcattctataaaaatacatttctaaaacatttgtatagtttagatctttataaacaatagttttcttctgactcagaaacaaaattatggtttacttaaagctgcatctgcttaatgaagagacatcaataccaaggataacctctgcctgacttaaattctacctcctctatggatactttttggttcagataattgggtatgatccctaccatacatagcattctgtttctgttcctcttttgatacatccactagataagcactattcaatctgggrtacttaaagacttgctaacctgtatccaagtcatgatgtttttttgttt

SEQ ID NO: 622587 - DNA, 264 bp, Homo sapiens
tagagcccagggtgtgctggggccaggagagatgatgtctggaggtgaacttgaaaagaaaattggggccagattgtgaggagcttcatatgttattatttggaggctgagtttttattctttggccttggaaatttatggatttttttttttcaaaaggtggactattgtgatgctttgtaaaaacrgctctcatggcttaggaggaacattttagtgtagtctttagggttagggttttggaatcaagaggtgggtacaaac

SEQ ID NO: 622588 - DNA, 635 bp, Homo sapiens
ttgttctcacactgctatgaagacgtatcaaagactggacaatttataaggaaaaaaggttaaattgactcatagttcttcatggcaggggaggcctcagcaaacttacattcagggcagaaagcgaaggaaaaacaagtaccttcttcataggatggcaggaaagagagaatagagggcaaagggggaagagtcccttataaaaccgtcagatctcatgataactcactatcatgagaacagcatgggggaaactgctcccttgatccaattgaaatagctatgatgtctggagtatatacctggggtacactgtcacacgccagaaaaatttaggacacagacacacatgagtttaggagyggaggtttaataggtagaaaagaaaagaaagagaaatagcttcctctgtggaagaaggggtctccaagcaaaaaagactagcaggaggtgaatgtgccgaatgttgtagtttggtttgaggatgtggtgcttgatttacatagggctcaaagcttggttcaatcaggtatgatatttagatagtacacggaaaaggctgcttgacccaccctaatcttattatgaaaatgggttttccagttgatcagcgccatgttgtctgctccttacag

SEQ ID NO: 622589 - DNA, 566 bp, Homo sapiens
caaaaatattctacttcttccaattaacaacatggatttccaaaactttatttggactcatgaggttcctatgcctgtaataaacacacccattcttttacttattctaaatctgtcagaaatccttcaatttaacaaactgaaactttccacagctatagttattttgggatatgttgaacttgttatactattaatattgtgttattattgtgtgtagtctatgtaaagcccttgctccttcattttagttattttgatcatgtcaggtacgttacaaacattatttatttactgycatgctactattgctatatcaatgctgattattttccagagtaatcaataatgacatagatacaagtacatacacaagttacttgttcatatatacatgtgatcatagtcttatattacagatttgtttttttaaagcaaacattttttcattcccacatctttatacacaagcattgattggtacatcatttcataaatctcatcagaggtaataatttaaaattgttcaccttggtggaatgctaatataatttcagtttcaaatt

SEQ ID NO: 622590 - DNA, 624 bp, Homo sapiens
gtaatgccatctgttcctgaattttcttaggtggaagatttgtaactatgaaattaatgtttttagcagatacatacctattcaggttacctccttcttcataagggagcttttagttaatatttgtaggatctattaatctctcctcatctattcttactattcttacttggtgtcttctctctttttctcagcrttttattagaaattcatcaatttttaaatcaaagactcagtatttggttatattgatttttatttatttatttttatttttatttttgcttttctgcaaataaaatatatatattattgctttcctgatcttatctttactactttcttcattgtgcctactttggaaatatcctctttactactagtaatatattttgttctaatgtccactttgaatgatatagcctcacaagctttatcggttagtgttttcatggcatgactttctttttctttttatttttttgagacggaattttactcttgttggccaggctggagtgcagtggagcgatcttggctcaccataacctccaccttctgggttcaagcgattctcctccctcagcctaccaagtagctgggattacaagtacatgccaccgc

SEQ ID NO: 622591 - DNA, 624 bp, Homo sapiens
gtaatgccatctgttcctgaattttcttaggtggaagatttgtaactatgaaattaatgtttttagcagatacatacctattcaggttacctccttcttcataagggagcttttagttaatatttgtaggatctattaatctctcctcatctattcttactattcttacttggtgtcttctctctttttctcagcgttttattagaaattcatcaatttttaaatcaaagactcagtatttggttatattgatttttatttatttatttttatttttatttttgcttttctgcaaataaaatatatatattattgctttcctgatcttatctttactactttcttcattgtgcctactttggaaatatcctctttactactagtaatatattttgttctaatgtccactttgaatgatatagcctcacaagctttatcggttagtgttttcatggcrtgactttctttttctttttatttttttgagacggaattttactcttgttggccaggctggagtgcagtggagcgatcttggctcaccataacctccaccttctgggttcaagcgattctcctccctcagcctaccaagtagctgggattacaagtacatgccaccgc

SEQ ID NO: 622592 - DNA, 613 bp, Homo sapiens
tcggggcaggttgttttccttcagttaagcctttcactttgatgacagatgagtctagaaatgggcattgcttttctgcctgtgtaccacttaaaatggctctgtcccatctccaacacttaccacaatgtttgtcatgagcaaaagttagatgcctgtggaaaagatcttgcaagtgaaagtgtatttgtttgtttgcttgtttggtgttaacagagtttctaactattgtgttgggtgatcctcaagatttaaagtttttagctactttcttctattttaatggtgaccaaccttttctcctgtattcttccaaggktgaaatagtaagtatatttcatttatacctggagagtttattctaacttcttgggagtaaagttcatttgtttgcttttaatgttagctctctgataatctcaagaaaaattatgactttttagataacccaggcttttgtttttggatggggatgatgtccttttggaacttgcaatatcctaagtagaagtgatactcctgtattcttctcttctcatactctacttagagatagcatcgtatcactttacatgaaagtagaaactaccattttatgaaatcatctattatc

SEQ ID NO: 622593 - DNA, 648 bp, Homo sapiens
gtcatgagcaaaagttagatgcctgtggaaaagatcttgcaagtgaaagtgtatttgtttgtttgcttgtttggtgttaacagagtttctaactattgtgttgggtgatcctcaagatttaaagtttttagctactttcttctattttaatggtgaccaaccttttctcctgtattcttccaaggttgaaatagtaagtatatttcatttatacctggagagtttattctaacttcttgggagtaaagttcatttgtttgcttttaatgttagctctctgataatctcaagaaaaattatgactttttagataacccaggcttttgtttttggatggggatgatgtccttttggaacttgcaatatcctaagtagaagtgatactcctgtattcttctcttctcatactctacttagagatagcatcgtatcactttacatgaaagtagaaactaccattttatgaaatcatctattatctttatattacatrctttaatagtgcccccatagactgctgaagttctatttatttttaaaagtgtattttgtctgtctttttcaaagagactaacttttattgatctaaagtcaagttaaatgtctcttttcttggtactcctcaaccgttacacaggaacatttact

SEQ ID NO: 622594 - DNA, 614 bp, Homo sapiens
catgtgagctgaaaccatgctgttttcttttgggtttagacaacatatttacaaaataaaaatwaaaaaaatactagcaaagaaaaaacatgagtattatcaatactgttaatttacaaaaaaaaaacactcttttaaaccttctgaaaatgtgattacttaaggattttggtaacatgtccttggattacacctagttatttttaatattatgtagtaattctgtgtgcatgcatgcatatttataacacttggaattcaaaaatgataaacagagaacttgaatattatcctaatggagattagtgatagaactaaaaccaattacataagtaaacagtagggaaaagattttaaaaagtagttatttttcaagattgaagttattttgtaaattgagttctagaatcatacttaaataattattacagtgtatatttttatgttaaaactttaaatgtgtcatatatatatatatcttaaataaaagttgcaagtgaatccaacttagattttgaaaatgatgctaatagaattttatgtagtgttttaagcttgttttttacgtctgcaggaaacacttgaatttattaattgatattttgagcagcaaa

SEQ ID NO: 622595 - DNA, 543 bp, Homo sapiens
ggattttcaggtttattggtagttttgtaataagagtgaatcagcagaatttagggctagcaaagtgagttaccctactgtagaaacatgtgagctgaaaccatgctgttttcttttgggtttagacaacatatttacaaaataaaaataaaaaaaatactagcaaagaaaaaacatgagtattatcaatactgttaatttacaaaaaaaaamcactcttttaaaccttctgaaaatgtgattacttaaggattttggtaacatgtccttggattacacctagttatttttaatattatgtagtaattctgtgtgcatgcatgcatatttataacacttggaattcaaaaatgataaacagagaacttgaatattatcctaatggagattagtgatagaactaaaaccaattacataagtaaacagtagggaaaagattttaaaaagtagttatttttcaagattgaagttattttgtaaattgagttctagaatcatacttaaataattattacagtgtatatttttatgttaaaactttaa

SEQ ID NO: 622596 - DNA, 614 bp, Homo sapiens
catgtgagctgaaaccatgctgttttcttttgggtttagacaacatatttacaaaataaaaataaaaaaaatactagcaaagaaaaaacatgagtattatcaatactgttaatttacaaaaaaaaaacactcttttaaaccttctgaaaatgtgattacttaaggattttggtaacatgtccttggattacacctagttatttttaatattatgtagtaattcwgtgtgcatgcatgcatatttataacacttggaattcaaaaatgataaacagagaacttgaatattatcctaatggagattagtgatagaactaaaaccaattacataagtaaacagtagggaaaagattttaaaaagtagttatttttcaagattgaagttattttgtaaattgagttctagaatcatacttaaataattattacagtgtatatttttatgttaaaactttaaatgtgtcatatatatatatatcttaaataaaagttgcaagtgaatccaacttagattttgaaaatgatgctaatagaattttatgtagtgttttaagcttgttttttacgtctgcaggaaacacttgaatttattaattgatattttgagcagcaaa

SEQ ID NO: 622597 - DNA, 589 bp, Homo sapiens
ttcttttgggtttagacaacatatttacaaaataaaaataaaaaaaatactagcaaagaaaaaacatgagtattatcaatactgttaatttacaaaaaaaaaacactcttttaaaccttctgaaaatgtgattacttaaggattttggtaacatgtccttggattacacctagttatttttaatattatgtagtaattctgtgtgcatgcatgcatatttataacacttggaattcaaaaatgatraacagagaacttgaatattatcctaatggagattagtgatagaactaaaaccaattacataagtaaacagtagggaaaagattttaaaaagtagttatttttcaagattgaagttattttgtaaattgagttctagaatcatacttaaataattattacagtgtatatttttatgttaaaactttaaatgtgtcatatatatatatatcttaaataaaagttgcaagtgaatccaacttagattttgaaaatgatgctaatagaattttatgtagtgttttaagcttgttttttacgtctgcaggaaacacttgaatttattaattgatattttgagcagcaa

SEQ ID NO: 622598 - DNA, 543 bp, Homo sapiens
ggattttcaggtttattggtagttttgtaataagagtgaatcagcagaatttagggctagcaaagtgagttaccctactgtagaaacatgtgagctgaaaccatgctgttttcttttgggtttagacaacatatttacaaaataaaaataaaaaaaatactagcaaagaaaaaacatgagtattatcaatactgttaatttacaaaaaaaaaacactcttttaaaccttctgaaaatgtgattacttaaggattttggtaacatgtccttggattacacctagttatttttaatattatgtagtaattctgtgtgcatgcatgcatatttataacacttggaattcaaaaatgataaacagagaacttgaatattatcctaatggagattagtgayagaactaaaaccaattacataagtaaacagtagggaaaagattttaaaaagtagttatttttcaagattgaagttattttgtaaattgagttctagaatcatacttaaataattattacagtgtatatttttatgttaaaactttaa

SEQ ID NO: 622599 - DNA, 614 bp, Homo sapiens
catgtgagctgaaaccatgctgttttcttttgggtttagacaacatatttacaaaataaaaataaaaaaaatactagcaaagaaaaaacatgagtattatcaatactgttaatttacaaaaaaaaaacactcttttaaaccttctgaaaatgtgattacttaaggattttggtaacatgtccttggattacacctagttatttttaatattatgtagtaattctgtgtgcatgcatgcatatttataacacttggaattcaaaaatgataaacagagaacttgaatattatcctaatggagattagtgatagaactaaaaccaattacayaagtaaacagtagggaaaagattttaaaaagtagttatttttcaagattgaagttattttgtaaattgagttctagaatcatacttaaataattattacagtgtatatttttatgttaaaactttaaatgtgtcatatatatatatatcttaaataaaagttgcaagtgaatccaacttagattttgaaaatgatgctaatagaattttatgtagtgttttaagcttgttttttacgtctgcaggaaacacttgaatttattaattgatattttgagcagcaaa

SEQ ID NO: 622600 - DNA, 597 bp, Homo sapiens
tactcattcagtcacaaaaaatgacaaaaatgaaatttaaaactcatttccaaatccactttctattttttatataagagcagcttaggatgtactagtaaatctccgtaataccaaaaacaatgcaatttacctttgttttctttacttaagaatctgtgattctgcttcaggtgttcctatgagccagctttacagaatctaaactggcaaattaattaattaaaagttttttataagtccctagctccttatttactccccccttacctatccataactgatacttgctctaccccaagcactgtggtttaatttttactcttctttttttgcccaaccatatcctcaattcaagagctgaaaatcaatatcagacaatacaaatgaccgatataagcttgtagtcttaaatttgcaggaaatatttacatttaaaaaaaaacttcgaagccacaagacaatgactttgtaggggaatcactcatcaagctttgaatagaaaaaatgcttcargttgagtaacagcagtcccctcagacagtccagaactgacacaattcaaaaaagtaatcagattttctgcctaaattaaaa

SEQ ID NO: 622601 - DNA, 575 bp, Homo sapiens
ccattgttttggactgagcttctgcattaggcataacagaccaaaccaaaattgagtcatacatgttaagtgccatgtaatcaaactgtaatttaaaattacagaaaaaaccccaaaacatgccagttttttcaaaaaccagaagcttcacagcaaccaaacagggcccagtaaacctgagctagtatcataagaaagtcccccctgtcataacctttataaagagagtgacctgaagtaagctgataytaaccaatctgtctttttgcattatgctgttttcttgtttctgctcaaacaaccttaaaaactctactgcactaccatggcccccaaaacttttataaatgggatgctgaccaattcataaatcaaaaacaaatgtcaatttgacctttaaaataaatttatcaaaattttgttttgaaacactccttcattcctttgtagaactcattttatttatttaacaacctaaaatcacaactaaaagaactagagaaccaagagcaaacaagtcccaaagctagtaggagacaagaaataaccaaaaaaagagctgaattgaaggaaat

SEQ ID NO: 622602 - DNA, 551 bp, Homo sapiens
gctgatattaaccaatctgtctttttgcattatgctgttttcttgtttctgctcaaacaaccttaaaaactctactgcactaccatggcccccaaaacttttataaatgggatgctgaccaattcataaatcaaaaacaaatgtcaatttgacctttaaaataaatttatcaaaattttgttttgaaacactccttcattcctttgtagaactcattttatttatttaacaacctaaaatcacaactaaaagaactagagaaccaagagcaaacaagtcccaaagctagtaggagacaagaaataaccaaaaaaagagctgaattgaaggaaatcaagacataacaaaccactcaaaagatcgatgaatccaggagttggttttttgttggctttaaagagrtgagatgtaataaattttccatctttaagtgttcatgtggtaagaacagaaagcagcctctaggaccttatgatgacttgagaaaaagcaaagcagaagccctcagtccagcaactgcaaggacatgaattttgtcaacaacctctgat

SEQ ID NO: 622603 - DNA, 596 bp, Homo sapiens
ttttctgctccgtgttaggcatctactctatttaacatcaaaattagaaaacataccaatagaaaaaaaaacacataggttttaattctcccaagtttacagttttgtatgtccaaactctgctggagactattaaagcctttgctgttttctttgtaattctgggaataacctttgttttggtaaattctgcattgaagatacctgggttctcattctcctgttttgtacctagagaaaaaagttycccaggggaaattgtctactgtcagttcacctctgcatggctcttccctcttcagattcatggcccatctattttttatgtcatataatctctccaatgcactttgaagagataatttctatatttccttattttttttagttttctcagtaggttcattggcctcctgtaagctacttccactcgcctaaaagcaaaatcccttccgcatttattttcattttctaacacaagtgatagataaataaataaatagtttttgtaagcatcaatgacagataaagctaatttgctttaatgctttcgaacttcagcgctttctttaatgccgattctctttggaataaag

SEQ ID NO: 622604 - DNA, 598 bp, Homo sapiens
gagggaggtaggaggaaggatccattacttttgctattttgaaatatattgtatatgtatatataatatacatcgtatattatattatatcagataatttattatatataatatatacacattatatatgtatatattatatataatatatacatatataatatagagtatatataatatatattatatagtatagataatatatattatatctcagctcactgccatatatattatatataatctatatttcaaaaaatatataattatatattatataatatattttatataatacataattatataattatataatatataatatacatattatatactatatataaaagattatatataatatacatatatgctatataaaatattacataatatacatattatatactatatataaaatattatatataatatacatattatatataaaataaattatcattaagtatagtcrccctgttgtgtcactgaaccctagatcttacttcttttatctaactatgttttttatacccattcactattcttctttatccccatcaacccttcacaccttctggtaaccattattctt

SEQ ID NO: 622605 - DNA, 470 bp, Homo sapiens
caacacagctcattgcagcttcaacttcccgggtccaagagatcctcctgccttagtctctggagtagcttggaccacaggcacacatcatcacacttggctaagatttaaaatgttcgtagagatgggattttgctatgttgcccaggttgatctgggacttctgatctcaagggatcctcccaccttgacctcccaaagtgctaggatttcaagtgtgagccactgtacccagctgcactaatctattttctctctgtggacttttttatactggacatttcatataaatggaataatacaataagtggtcttcgtgacagattctgtttactgaatcttttcaagactcasatatgttatatcctttattggtccttatttctttctcattgctgaataattatttattgcgtgaatacgatatgttttgtttatccattcattagttgataaaaacgtatttcatc

SEQ ID NO: 622606 - DNA, 540 bp, Homo sapiens
tagttttcagtgtaaatgtattgcattttcgaaatattgttatgtattttattcttttcattgttatagtaggattttttcttaattyaatttttattattataatatggaaacaaatgattttttatactaaacttgcaatctgacagtttgcttacctcatttattctaatttattttaattaattattagcatattcttataattttctatgtataagaaaatattatctgtataatttccctggctgccatctcaagtgcaatattgaaaaaaaatggttaggccaggcatgttgtctcacctgtgtaatagcagcactttgggtggccgaggcagacagatcacctgaagtcaggagttggagaccagcctgactaacatggtgaaaccacacttctactaaagatacaaaaaattagctgggtgtggtcacacacacctgtaatccaagctgcttgggaggctgaggcaggagaatcacttgaacctgggaggcggaggttgcagtgagccgagatcaccccattgcaacccag

SEQ ID NO: 622607 - DNA, 486 bp, Homo sapiens
tatcatttctttttattgctgaatagtattccacggtataactataccatcatttgtctaattattcatctcttgagagatatttttattgtttccagcttctggctattacaatttttgctactataaacaattgtgtacaggtttttctgtggacataattttcaattctctgaaatatattctgagctgataagcccagtacatgttcagtttttcaaggaaactgacaagttgttttccagagtgtttgtatcactttacatcrccacaggcaatatatgagatccagtttttctgcatccttgccaacatttgacattataatcatgattcttttttagacattctgatgggcatataatatctctttctggttttatatttccccattgactaattatgttaaaccccttttcatttgcttatttcccattcatacctctggcgaaatgtctcttcttgtccttttccatttccattttc

SEQ ID NO: 622608 - DNA, 575 bp, Homo sapiens
acaaatatcaaaaatcaaatgagggacatcactgtacccatgacactaaaacagtaaaaaaggaatactataagcaactctatgcccacacatttggtaagctagatgaaggacataatctgccaaaactcacacaagaaaaaataaattctatgaataggctatatgtgctaaaaacaaaatgtcattaactaataacctttcaaaacaaaaagccctarggtctaatgaggtctttcaaacatttaagggagaaattatgccaatttaccttccatttttccttttttccttccttccttttttccttccttccttcctccttccttccttccttttgtccttccttcctttcttctttccttccttccatctgtcttttgacacaaggtgtcactctgttgccccagctggagtgcagtgatatgaactgcaacctcaacctcctgtactcaagcaatccttctacctcagtctcctgagtagctggtaccacaggtgcaccccaccatgcccagccaatctttattttatttttgtagagatagggtcttgacgtgtttgcccagttacat

SEQ ID NO: 622609 - DNA, 532 bp, Homo sapiens
cctgtgtctttttaatttattttttctgtaatcgtagtattatgtatgttatattcaacctcccaattgagaatctgttacttttccactgaacctagcattgtgccaaacacattgtaaattktaataagctgactaagttatcactaaaatactatagctaaattataataattggtggaataataattcaaaatgaaagttcttattctatttgtgtataaaataaaatgttagcctagagcatcaaataggaaaaaaaaagatcctaaatatcccctccttctaaattaaggcagatatgtcctccaacagaatagtaaaatttcttatgggacatttacctcataatctaatccatcctatgtaagccaaaaattagatatttgggaaaaaataattaaggatgactgtgtttttgtttttatagggaatactgtagaatttttccagctttcctcatggaggaaggaaaaaatggtcctttcaaaggctagttgttgagaaattgaaggaatgcagaagacaaaga

SEQ ID NO: 622610 - DNA, 552 bp, Homo sapiens
gaagtcaatcaaatactcttgctgtgacaaaaagctaacctggttaggcgcaatggctcatgcctgtaatctcagcactttgggaggctgtggagggcagatcacctgaggccaggagttcgagaccagcctggccaacatggtgaaacaccatctctattaaaaatacaaaaattagccaggcatggtggtgcgtgcctgtaatcccagctacttgggaggctgggccatgagaatcatttgaacatgggagacagaggttgcagtcagccaagattgtgccactgcactccagcctgggagayagagtgagactctgtctccaaaacaaaacaaaacaaaacaaaaaaacaaagctaatgtaaccactccatttgttttctaaatcaaattcaattccctcttattgcctctagaatgcatgtacgtgtacctcctcttctgtatattcagtcattttcccatttagtaaaccttttctaccttctttttcttaaatacaagtcacttctatatccttgtctcttaagaacatttaatttgcttaatcac

SEQ ID NO: 622611 - DNA, 552 bp, Homo sapiens
gaagtcaatcaaatactcttgctgtgacaaaaagctaacctggttaggcgcaatggctcatgcctgtaatctcagcactttgggaggctgtggagggcagatcacctgaggccaggagttcgagaccagcctggccaacatggtgaaacaccatctctattaaaaatacaaaaattagccaggcatggtggtgcgtgcctgtaatcccagctacttgggaggctgggccatgagaatcatttgaacatgggagacagaggttgcagtcagccaagattgtgccactgcactccagcctgggagacagagtgagactctgtctccaaaacaaaacaaaacaaaacaaaaaaacaaagctaatgtaaccactccatttgttttctaaatcaaattcaattccctcttattgcctctagaatgcatgtacgtgtacctcctcttctgtatattcagtcattttcccatttagtaaaccttttctamcttctttttcttaaatacaagtcacttctatatccttgtctcttaagaacatttaatttgcttaatcac

SEQ ID NO: 622612 - DNA, 449 bp, Homo sapiens
gaaataaaccagacaagggaggarcacatattgtataatttacttatgtgaagtgcctataatagtctcaaattcaaagagattggaagtagaatagtggtttccgggggctgggagaggcaagtaatggggaattaggagagttactgtttaatggatacagagtctcagcttggcataatgaaaaagttctgaaaatggatagtggggctgtgcgccaacagtgtgagtgaacttaatgctagtgaaatgtaacttaagaatggctaaaatgataaatccaatgttatgtatatgcatatcttaacctcaataagaaaaatttatataagtaattcaccactggatcagggaggtcattgaatatatttgttaagaagcttaagtttttctcatatatcagtgttctccatattgagatacagtagaactgaagtacataaaaaatt

SEQ ID NO: 622613 - DNA, 419 bp, Homo sapiens
tagagaaattataatgaattatattaakaatgaaatttggctcattgtattattagtattctttttgtctattgaaatcacattaccaaatgatgacctaattataactcatttgccagatggttaattgtgatgaaaaaaaaaaaaaaagatttgctgttattgtaaaagttgtgtttttatagtaaaacatttttcagaattactaatttatcttttagtatgataattttcaccttgcaaatttaaaggcctatttctgactttaataaaattattctaaaaatacagaaagacgatcatgcttcaaaaaggcctaggctctaaaataaccagtgcaatgtaatttaaaacaatgtgtttttctttaaaattttggttaaattttgttccgagaaacaggacaacatcatatgaac

SEQ ID NO: 622614 - DNA, 419 bp, Homo sapiens
tagagaaattataatgaattatattaagaatgaaatttggctcattgtattattagtattctttttgtctattgaaatcacattaccaaatgatgacctaattataactcatttgccagatggttaattgtgrtgaaaaaaaaaaaaaaagatttgctgttattgtaaaagttgtgtttttatagtaaaacatttttcagaattactaatttatcttttagtatgataattttcaccttgcaaatttaaaggcctatttctgactttaataaaattattctaaaaatacagaaagacgatcatgcttcaaaaaggcctaggctctaaaataaccagtgcaatgtaatttaaaacaatgtgtttttctttaaaattttggttaaattttgttccgagaaacaggacaacatcatatgaac

SEQ ID NO: 622615 - DNA, 419 bp, Homo sapiens
tagagaaattataatgaattatattaagaatgaaatttggctcattgtattattagtattctttttgtctattgaaatcacattaccaaatgatgacctaattataactcatttgccagatggttaattgtgatgaaaaaaaaaaaaaaagatttgcygttattgtaaaagttgtgtttttatagtaaaacatttttcagaattactaatttatcttttagtatgataattttcaccttgcaaatttaaaggcctatttctgactttaataaaattattctaaaaatacagaaagacgatcatgcttcaaaaaggcctaggctctaaaataaccagtgcaatgtaatttaaaacaatgtgtttttctttaaaattttggttaaattttgttccgagaaacaggacaacatcatatgaac

SEQ ID NO: 622616 - DNA, 623 bp, Homo sapiens
tctgtaccttctgctcaattgtcccatgatctaaaactgctctaaaaaatagtctatttaaaaaattttatttccacctctgctcatacataatattattatgctacaaaggagtttaataaaatgaaactggtgtcctaataattgcctctactattcacaattatctttcaaggaaaaatccaaaaaatgtaaatgaagaaatataaatacaaccctcctaattacctaacataggaaacagaatagtttcttagggatcatatatccattacgaacacaaaaggtttgcagtaaggagaatactgccctctgcccccaacaaagatacctacrctctaatcccccggaatctgagaatatgttaactcatatggcaaaagggccttggaaaatgggattaaggttaaggttaaaggtatattatcctgaattatagaggtgtgtccaatctaatcactggagttttaagagtggaagcaaaacacagaagaggaggttagagatatggcaacatgaggaggatctgatgccttattgtggttagcagctacgtgcaaaaaagcaactgaggcctaagggcagccatccgctaacaggcaacaaggaaacatagacttaaa

SEQ ID NO: 622617 - DNA, 623 bp, Homo sapiens
tctgtaccttctgctcaattgtcccatgatctaaaactgctctaaaaaatagtctatttaaaaaattttatttccacctctgctcatacataatattattatgctacaaaggagtttaataaaatgaaactggtgtcctaataattgcctctactattcacaattatctttcaaggaaaaatccaaaaaatgtaaatgaagaaatataaatacaaccctcctaattacctaacataggaaacagaatagtttcttagggatcatatatccattacgaacacaaaaggtttgcagtaaggagaatactgccctctgcccccaacaaagatacctacgctctaatcccccggaatctgagaatatgttaactcatatggcaaaagggccttggaaaatgggattaaggttaaggttaaaggtatattatcctgrattatagaggtgtgtccaatctaatcactggagttttaagagtggaagcaaaacacagaagaggaggttagagatatggcaacatgaggaggatctgatgccttattgtggttagcagctacgtgcaaaaaagcaactgaggcctaagggcagccatccgctaacaggcaacaaggaaacatagacttaaa

SEQ ID NO: 622618 - DNA, 624 bp, Homo sapiens
tcagttaactatcagtgtggttaaaatttaaacattgttttgtaaaggaagtcacaggaaaatgtatgtcatatatgctacagtttggaaagaggcaggggtaaacgatgcattatttagataatcattcataggtgctttagtacaaacaactaaataaaagcaagatcatgatgagaggtagggaacgtgacaaggaggaatgagatccgggaggaacacataagaagatgcttctaggtcaggatgtggtaatgttttattgcttggctgggttggaaaattcagatgtgtcttttattattatttttttaaactgcaaaatttgtttttatatatgctgtatttctccaaactgtaaaaaagtaaatttcctgaaatacctttcagagatcaaaaataaaagtaagttcctcaattctagaggctttaagtattgtgacttgtgtgttcctcacagatgtcctgatttaatactatgttgacttaaaatataagatctgtttctactcaaagcctgtcatcaaggacattattaaaacagttctacaatttttatttagccttaaaattgtaaaactacktctttaaaatctgcgttttataatgtatttttctaattta

SEQ ID NO: 622619 - DNA, 584 bp, Homo sapiens
acttctattcaagagagtgctaaaaaattctagacagaccaattaggcaagaaagagaaataaaaggcacccatatcagaaagggaaaaaaattaactccatacmcagatgataggatcttatatgtggaaaatcttaaatctgttagaactttagaatcctaaaacttagaattgtaaacaaattcacaagttgcaggatataaaaatcagttaagttcccacatactaacaataaacaatccccccaaaatttttaaattcatttacaatagcatcacaaagaataaacttaagaaatgaggcaagagactttagtactgagacctagaaaatgttgctgaaatcaaagacacaaataaatagaaagatattccatgttcatggactataacagtcaatattattaagatgtcaatactattcaaagggatctacagatttgatacactctttgttagaatctctataacattttttacaagaaaagaaaacatgctaagattcatatggaataccaaaggatcccgaatagccaagacaatcgaaagaacaaagttaaataactcacatctcctgatttca

SEQ ID NO: 622620 - DNA, 406 bp, Homo sapiens
gtttcaataatatacagtagacctggaaaaatgtaaatcttttctatgaatacttttcacaaattactcgagaaatacagaatcactaaatatatgaactgataaaacaatcttaatgtaaaattagtattaattttaaaatgacctcagcaaaatacttccaatataaaatttaaaatacctgccaatgcatgtactcctatttaaatatagctgagtacaaaattggagtgattyttccaaaaaaaatttttaacctataaactcaatttgggtaaaattgggaagatacagaccaaaaaaaaagtttcagtggcataaaatatttactcacaacaactcttagaatctacatagatacttctcaattcataaacttcataagctacatttaccatactgaaca

SEQ ID NO: 622621 - DNA, 395 bp, Homo sapiens
tgattatagaattgtttcctcactcagctccaaattcacccacttgtctgctctgtgaaagtagatctgagttgcttaaatgattttcctttgccaactagcactgaaatagataaagaacacaggagagacactgcaggagaaaagagctggcttcctggttccagtacactcatttagcaatatcctgtaacactgtgcctttctccaacacaatgcataaygtgcacataacagcactcaaaagccagtattctgcccctagaaccctcctcaggtggtttcacagcagaacgagggcagtgagacattgccccatgaatatttttcctttttacctcagaggatggatttccagaaagttttagagagcagattaccagaaagacacaaga

SEQ ID NO: 622622 - DNA, 547 bp, Homo sapiens
attaaattttaaaaattaagtgcaaaaacctatcatagaagctttccattttttttcatagaattagcatttttatactattggtatagaaaagaaaacaaagttggaagaacagacttcaaattttaaaggttattatgtacagaaggtaaaatactgaagacttccactttctaaaacatatttctgtaacatgtgaactttatattgtggatatttactgtttggtaatttttttaagtaataaaagttgaggtaaataaatcttagagataaaaaatctcaaaatctgaatgtctatagtggatttccaatatgattaatttgtatttaactatgagtttctatcaatcaagaaaaactgactagaagtagcctgatcttatgctttggtttctactcagtatataatataccaatatacagaatgtaaactaggaatgraattcccagattttaacaaagaatacaggaataaatgcaaaccctacagtttctagaggtaaggtattcatgtacaatctaatttaaaactattcagatataa

SEQ ID NO: 622623 - DNA, 586 bp, Homo sapiens
tcgtactatatttgatttttagtctagtaaaatgttagtaacttgttaaatgcgttctaacaagggaaggcaggtattgggtagaaatacatgttttgactgtatcagccatgggtgacttctgcaaatttactatcttccaaagaacgatacactgtcattgtagagactgcacaatctgtccattagagcacaacctcttaatagattaccagttctatcccaatatacaatgattttgatgcttcaaaaacattttaaatacagtataaaatcacttaactaaatattgcatattaactctatggttacatttttgtatattagaagcctcagagaaasagttagaagtatattttatgcaatactatatgccctgcaataggtaaaatactgaagtttaaatctttactctgatcacattaaatatcacaatatttaaaatattaaagccataaaggaagcttcatattccaacagtttattgctaccatgagtatctgcaagcctacataacataatgattccttgtttgttttcaaacaaatgatttaatttagtattccacctctaaaccacagaaaca

SEQ ID NO: 622624 - DNA, 568 bp, Homo sapiens
aatcataatcctagaagagctgacatcagagtaaaataataggtttttatctcactgtagatgcatcaattcataaagctgaagttatatcagatattgaagaggtacaaaatacactgttcctccatagttaacgtgaggtcaattaaaagttggatgtcttcacatgaatttgctttaaatcatatatcgtttaatctgtgtttgaatagaattttttaaatggcacacttatatttgctaaaaattttatattcctgggtttagctctttcagtctaaatatttgtaattttattttttattaaatattagctcactcttctggcctcataaaatgtataatcatgttgtttgtacctaattctaatatggtaataaacagaatgatcctgagatagcccctkaaaaagctaagttcaggttaacgttgaagcatttataatagttgttaagtaagattattcaactacataaaaactgaggcagggcacaatggctcatgcctgtaatcccagcactttgggaggccgaggtgagtgaatcacccgaggtgaggagtttgagac

SEQ ID NO: 622625 - DNA, 450 bp, Homo sapiens
ctgaggctggagaatcacttgaacccgggaggcagaggtaacagtgagccaagatcatgccattgcactccagcctgggcaagaagagagaaactctgtctcgaaaaaaaaaaaaaaaaagtaaaaatgtacccataccttaatattttctattttgtcctaagattattaagaaaatctcttaaattcaaagatctctaaaaatcaagatagcctgtrtattacataaataattatttgaacaccaataataatgaaaattagatttatttgacataatgtgtacttagtaatcccctatgggcttccatttcttatctattttctttctaaattctcaaaaaatattatacaatagacacattttttggtataaccacagctacttttcataatacatttcagttctatgggtatatgaggtctaataacaacaataacagcagcagc

SEQ ID NO: 622626 - DNA, 598 bp, Homo sapiens
attagggagtgcagggtctcaaaagcaatatttcacttagtcactaactaccaagatggatatgatgctggaccacccctagaatcacgctctttggtcccagtattgacttctgaatttagaaagagccagcagagactctcaggtaaattctgcaactgctttcccacctctgaatttgggacaaatcctcctcttcctcctggcctcgccccaccccgccccatggatagcacttctgggagggggtgctcccaggctaggaaactagygagcctctctttctcccatagtctgacatcttgatgccttggctgatggagggagaacccaaacaatcctttttgtttcaccttatttcatatttctgtaaatgaagtaaatgtatactgtcgttttttgttaaataaagggtaaaaaataagaatctgagagtttaaggtcaaagtagtggagagtaggaaaggaagcctaggatccaaaatggcactggcttcaagaccacccacatcatattgagggttcggccaagtcaggcctcttaaccctgggtccgcaacggaaactagggctagaacttggatgcagaaaaaaaata

SEQ ID NO: 622627 - DNA, 608 bp, Homo sapiens
aggaatttaagccttcagttagaatacactgtgattccttctaactcaaaactttgtaattccataatgaagtggagcattctaggttgtatcagtcaacagggcatttattaggaagaatttgctgttagattttaaagcctctcaaggctatagaactgcatttcttaggagatgatctgaccacaatgcttccccataaagtgcttcaatcctatgacagcctattgggagaagtaasaagactaggactttcttgagaataacagggtagcttggacatttccaaaaggaagaggcattgattacagaggtaggtgagatcattagcatttctaaagcttgatatgcaagggcttccataagaaaggagttagcatgctttgtcacagagagatgcagctgtatgaggtttgctagtgtttgtgtgtgcatgggagttgcagagcagtaaggaacacactttcaaggtgtgattgttagagctgcaatgggatataaaatttgaaatagatcgccagcaatagagcagaaaggcagtcagacctgctgggtcactagcaatgccaccctggaagtagataaggggatctgcacattagaaggaa

SEQ ID NO: 622628 - DNA, 378 bp, Homo sapiens
ctggtgtggtggctcatgcctaaagtcccagctactccagaagtgsaggcaggaagatcgcttgagcccaggaggttaaggttgcagtgagccgtgactgcgccactgcattctaggctgggcaacagaacaagaccttgtcttaaaaacaaaagcaaaaacaaaaagcaaatgaaaatgcttattgttggctgcaaataacagaaactctgattcgatctttaaaaatttaaagaacaaaatagcgtataattctatatagtattacatatcagagcaacccagtttatttctctgtctgtttttaattatttcaagcttttcccctatgatgatttccttcaatgctataacatgtcaggcagagaagctggaaca

SEQ ID NO: 622629 - DNA, 378 bp, Homo sapiens
ctggtgtggtggctcatgcctaaagtcccagctactccagaagtgcaggcaggaagatcgcttgagcccaggaggttaaggttgcagtgarccgtgactgcgccactgcattctaggctgggcaacagaacaagaccttgtcttaaaaacaaaagcaaaaacaaaaagcaaatgaaaatgcttattgttggctgcaaataacagaaactctgattcgatctttaaaaatttaaagaacaaaatagcgtataattctatatagtattacatatcagagcaacccagtttatttctctgtctgtttttaattatttcaagcttttcccctatgatgatttccttcaatgctataacatgtcaggcagagaagctggaaca

SEQ ID NO: 622630 - DNA, 288 bp, Homo sapiens
gtcccagctactccagaagtgcaggcaggaagatcgcttgagcccaggaggttaaggttgcagtgagccgtgactgcgccactgcattctaggctgggcaacagaacaagaccttgtcttaaaaacaaaagcaaaaacaaaaagcaaatgaaaatgcttattgttggctgcaaataacagaaactctgattcratctttaaaaatttaaagaacaaaatagcgtataattctatatagtattacatatcagagcaacccagtttatttctctgtctgtttttaattat

SEQ ID NO: 622631 - DNA, 288 bp, Homo sapiens
gtcccagctactccagaagtgcaggcaggaagatcgcttgagcccaggaggttaaggttgcagtgagccgtgactgcgccactgcattctaggctgggcaacagaacaagaccttgtcttaaaaacaaaagcaaaaacaaaaagcaaatgaaaatgcttattgttggctgcaaataacagaaactctgattcgatctttaaaaatttaaagaacaaaatagygtataattctatatagtattacatatcagagcaacccagtttatttctctgtctgtttttaattat

SEQ ID NO: 622632 - DNA, 533 bp, Homo sapiens
aactactctatatagtagtataatgatggacatgtttcactgtatatttgtccaagcttatagaacatacaacaccaagaataaaccttaatgtaagctagggactttgggtgataatgatgtgtgaacattggttcatcaattgtcacaagtgttccactctggtggagtatgttgataattcgggagtctgtgtatgtatggggcagaggatgtacaggaaatccctgtacaatcccctcaattttgctgtgaatctaaaactgctctaaaaaataaagcctattttttaaaagttaagaaataccctagggaaaaggagcagaattgggaagatggtagtcaaaggatacaaaatttcacttagacaggagcggtaagttcaagagatctatcacacaacacgctatgactatagttaataacaatrcattgcatacttgaaaattgctaagactagatttaagtgttctcactatacaaaaagttttttaaaaaagaaaaataaaaagaaacacattgatatttaatag

SEQ ID NO: 622633 - DNA, 599 bp, Homo sapiens
  misc_feature 203, 204, 205, 206, 207, 208, 209, 210, 211, 212, 213, 214,215, 216, 217, 218, 219, 220, 221, 222, 223, 224, 225, 226,227, 228, 229, 230, 231, 232, 233, 234, 235, 236, 237, 238,239, 240, 241, 242, 243, 244, 245, 246, 247, 248, 249: n = A,T,C or G
  misc_feature 250, 251, 252, 253, 254, 255, 256, 257, 258, 259, 260, 261,262, 263, 264, 265, 266, 267, 268, 269, 270, 271, 272, 273,274, 275, 276, 277, 278, 279, 280, 281, 282, 283, 284, 285,286, 287, 288, 289, 290, 291, 292, 293, 294, 295, 296: n = A,T,C or G
  misc_feature 297, 298, 299, 300, 301, 302: n = A,T,C or G
cctgcaacaaaataaaaactgaaactgtatactatctatctatacatatatatatatatgacaacaaaaaagtaatacatgctgtggtccacacatgtatgacatggaaggtctctcagctttggggtagatgaatattaaatatatatmtatatatatttgggtaataattataatcatatgtatatatttgggtaatatannnnnnnnnnnnnnnnnnnnnnnnnnnnnnnnnnnnnnnnnnnnnnnnnnnnnnnnnnnnnnnnnnnnnnnnnnnnnnnnnnnnnnnnnnnnnnnnnnnnataaaaggtacagcctttggcctaagagattgactccgaaacatcggtccccaactctaaattttgattctacactggggcagcttttcactatgaatgtagttgcgaatctttgtttattaaatatttattgcataaaaatcttatcaggctctggtctctgggccttgaattgtgaactctgttctggctggagtcacagtatcactttgggattaccatctccattagcacttttatatttcttacttaagaaaatctgaagtagcaaaaaattgaataggggatcccttgcat

SEQ ID NO: 622634 - DNA, 621 bp, Homo sapiens
  misc_feature 237, 238, 239, 240, 241, 242, 243, 244, 245, 246, 247, 248,249, 250, 251, 252, 253, 254, 255, 256, 257, 258, 259, 260,261, 262, 263, 264, 265, 266, 267, 268, 269, 270, 271, 272,273, 274, 275, 276, 277, 278, 279, 280, 281, 282, 283: n = A,T,C or G
  misc_feature 284, 285, 286, 287, 288, 289, 290, 291, 292, 293, 294, 295,296, 297, 298, 299, 300, 301, 302, 303, 304, 305, 306, 307,308, 309, 310, 311, 312, 313, 314, 315, 316, 317, 318, 319,320, 321, 322, 323, 324, 325, 326, 327, 328, 329, 330: n = A,T,C or G
  misc_feature 331, 332, 333, 334, 335, 336: n = A,T,C or G
ttctatcattaaatgaagtgactcttatcaaccccctgcaacaaaataaaaactgaaactgtatactatctatctatacatatatatatatatgacaacaaaaaagtaatacatgctgtggtccacacatgtatgacatggaaggtctctcagctttggggtagatgaatattaaatatatatctatatatatttgggtaataattataatcatatgtatatatttgggtaatatannnnnnnnnnnnnnnnnnnnnnnnnnnnnnnnnnnnnnnnnnnnnnnnnnnnnnnnnnnnnnnnnnnnnnnnnnnnnnnnnnnnnnnnnnnnnnnnnnnnataaaaggtacagcctttggcctaagagattgactccgaaacatcggtccccaactctaaattttgattctacactggggcagcttttcactatgaatgtagttgcgaatctttgtttattaaatatttattgcataaaaatcttatcaggctctggtctctgggccttgaattgtgaactctgttctggctggagtcacagyatcactttgggattaccatctccattagcacttttatatttcttacttaagaaaatctgaagtagcaaaaaattgaataggg

SEQ ID NO: 622635 - DNA, 641 bp, Homo sapiens
atgcaattcttcagggtgacaacggcaatgacttctgtaaagtgcacaatagtctcactatgcatatgccacaggcattcactgtctactgagctgtgaaaggaactactgggcaggagggctctatggagatgatgcmacttcacatttaaaaatctttccatttcgcatcattgccctgaggaaaaatccaaactaaagctgacctctaggtatattccacacttaactcacattccttttctttttctttctgcttatgctctggatatagcaaacactttgcaattcttgaaggaatgggtgctttctgtatctcaaggtattaatctatgtattcatgttgttacacattgtataacaattccttgtccatctcttcccacagtttgtaagctctttcagaaaagggactgtctttgttgcttttatagcatgagtacgtggcatatcacagcagttattattataaacattattcattaatttagtgaattaattttcaattgaatacaaataaatattttaaattaggaacattattgctagatttatatgctctactaaaatagttgtagtaactgtccagattacaggaagaatactgaggccttctctagaacataaatttgtgcattcat

SEQ ID NO: 622636 - DNA, 486 bp, Homo sapiens
cttcccttctctggaaagatattctagattcaattttgtgtgctctttcctcaatgttccctccctgtcatgagcaaactttcttcacaggtcttaaatgatcactgctctcctattaattkcccctctcccaggcctaaaaaatgtcatttgtaatattttgtcccctaagtttctatttctgccaaattgcaaggttagacctttgaaggaaggccagtgtgccacaatgtcagcttctgtgtctatcagccctctagattaccaattccttgttaagcgacacaggggatgtgtagtgttgattgaatgaatggataaatacaatgctttcaagtttacaatgtgctttttgcacgaattaacctctctaaccttcacactactctgagttcttattattaccatttccatttcatacagaaggaaactttcactcatagagctaaatcgtttgcccaaatgttcactgtcaatgaaagacag

SEQ ID NO: 622637 - DNA, 594 bp, Homo sapiens
tagactgtttgtatctgaaaggtgaaaagtgatatctcagtttggtttcatttgcttttgtcttaatatgcatgaggctaagtgtattgtatattgcctacaacctgattacctttccatattttctctacccctatcttttgctgcttttcctgttgaattgttctcttactaattgttgaaactgtctctatattagggagatagacttttgttatggtaagagctatacacttttgcccagtttgtcttttaccttccctgtggtgctttttttttttttttttggccatgtcgttcacattatttttatgtagttaaattagtcaaagtttctaaatcatctttttggtttgwattatacttagatacaatcttgcactctgagattagtgttaaacatctctcatatttcttaaagtacctttacatttaaatatctgattcattcgttctgacctaagacatgagaaatggcttcagctttattttttttccagttggttgttgttccaaccaatgtgttccaaaacatttatgaagtaatttttttccctactgatttagaataataccattatcatatactgtatt

SEQ ID NO: 622638 - DNA, 587 bp, Homo sapiens
acagatgagtagacctgctattactttgtgactcaattcattttggaaattctgtctgggaatcagagtggctgactgtaattaggcgtcagaagtgatgctacatggccccccttaggacagctaactgaatagagcaatttcaaccaatragcatataggcatttaacatgctttagagattaggagcttcatagggttcttctcattgcctggaatatacttcaacctccacatcatcatttggtgatgaatcttcaaaattcagctcagggtatctgctctggcaaaaggtgtttcccaaagcatatgccacccttgcccacaacagtcacaaactgcactgtagccaactctatgcttttccttcctgcctctttcatctacctacctacctacctacctacctacacacacacatactgaacttaaaactctcgaaaacaaataccatgtctaattctattttctatcctaagcagcaaacatgagttgggtacctaatatctgcttattgaatgaaaaatactgtagtctaccatttctggtatggagtgatagttcatatcatttcaatgccaggaaat

SEQ ID NO: 622639 - DNA, 587 bp, Homo sapiens
acagatgagtagacctgctattactttgtgactcaattcattttggaaattctgtctgggaatcagagtggctgactgtaattaggcgtcagaagtgatgctacatggccccccttaggacagctaactgaatagagcaatttcaaccaatgagcatataggcatttaacatgctttagagattaggagcttcatagggttcttctcattgcctggaatatacttcaacctccacatcatcatttggtgatgaatcttcaaaattcagctcagggtatctgctctggcaaaaggtgtttcccaaagcatatgccacccttgcccacaacagtcacaaactgcactgtagccaactctatgcttttccttcctgcctctttcatctacctacctacctacctacctacctacacacacacatactgaacttaaaactctcgaaaacaaataccatgtctaattctattttctatcctaagcagcaaacatgagttgggtacctaatatctgcttattgaatgaawaatactgtagtctaccatttctggtatggagtgatagttcatatcatttcaatgccaggaaat

SEQ ID NO: 622640 - DNA, 587 bp, Homo sapiens
acagatgagtagacctgctattactttgtgactcaattcattttggaaattctgtctgggaatcagagtggctgactgtaattaggcgtcagaagtgatgctacatggccccccttaggacagctaactgaatagagcaatttcaaccaatgagcatataggcatttaacatgctttagagattaggagcttcatagggttcttctcattgcctggaatatacttcaacctccacatcatcatttggtgatgaatcttcaaaattcagctcagggtatctgctctggcaaaaggtgtttcccaaagcatatgccacccttgcccacaacagtcacaaactgcactgtagccaactctatgcttttccttcctgcctctttcatctacctacctacctacctacctacctacacacacacatactgaacttaaaactctcgaaaacaaataccatgtctaattctattttctatcctaagcagcaaacatgagttgggtacctaatatctgcttattgaatgaaaaatactgyagtctaccatttctggtatggagtgatagttcatatcatttcaatgccaggaaat

SEQ ID NO: 622641 - DNA, 570 bp, Homo sapiens
gcattaatgaaaggaaatgtccataacatgaattaatactgcccaggtgtccaaggtaggatgctgtaaagtaaaataagatggaggcaggggttcgactyatgtgacttcttcattctccactgtatttaaaaaacaaaataggcctccttttaacataagagcttggtattacatggcaacatgtatgtggttttgggagacatgaaataatatccacttgaatctcaggattgaagaataactttcagaacatactgggaaaaagttgatttcttgcttacataaaataaaactctagtgaatttcgaacatatcatattataacctaaagaggataatatttaaaatttaaaaagaattactgtctttcatagaaaattactaattttccaacaattatgaaaagaacccaatgtagaagatcaattagatttttgaacaggacaatcataaagaagggaggagccgatggcaaactcttattttgaagatttaaatatgtccaaatgacacgaggcacatggctataacctgtagtcccagaactttgggaggccgaggcaggtg

SEQ ID NO: 622642 - DNA, 593 bp, Homo sapiens
actggaggcccagcagatgacaggcattaatgaaaggaaatgtccataacatgaattaatactgcccaggtgtccaaggtaggatgctgtaaagtaaaataagatggaggcaggggttcgacttatgtgacttcttcattctccactgtatttaaaaaacaaaataggcctccttttaacataagagcttggtattacatggcaacatgtatgtggttttgggagacatgaaataatatccacttgaatctcaggattgaagaataactttcagaacatactgggaaaaagttgatttcttgcttacataaaataaaactctagtgaatttcgaacatatcatattataacctaaagaggataatatttaaaatttaaaaagaattactgtctttcatagaaaattaytaattttccaacaattatgaaaagaacccaatgtagaagatcaattagatttttgaacaggacaatcataaagaagggaggagccgatggcaaactcttattttgaagatttaaatatgtccaaatgacacgaggcacatggctataacctgtagtcccagaactttgggaggccgaggcaggtg

SEQ ID NO: 622643 - DNA, 473 bp, Homo sapiens
ggtcaaaaatatttgttgaatgaacctataaattgctggacaatcttcaataatgtttttcttaaaagtcttcagtaagataacttaatcatctgactataatttttaggccaaatcttcattttagcaagtgatctctctgataattgatcactatattaccctgttcttcttgggtttttaaaattattcttgaggtagaatccccagctccaatttggggctgttgataccaactggtccagatcatgtaactsttttttttttttttttaaatcgattaagggctatttatatccccaaagttttattatctacttagaatgatggcagctccaagagttatcaagcttcagttggggtggagagataactgtgaatgtgtacgtcattggaactcctggtccacaaaagtttagtggaagggataatggttgtaacatttggcttagatacctaacaagtaagattgt

SEQ ID NO: 622644 - DNA, 386 bp, Homo sapiens
gaattcaaattggaatatttttgctcaccgttggttctggagttttttccatcattcaagccaggtttgaaatcctgtgtcccttggtaaaatyatctattttctaatagacggctaactgcctaggtgttttctttactcaccacttctctaagcttatgtacattcttgtttgaatagactataaatactgtacataactgattggcagtaaatgtccctgggtgttagtataggttgcttggttccagaatgactagaatacagggaaacattaacttaattcactttatatatggtgttactataaagcacagacatttgttctgttttcagaggaagttttctactaacttaaaaaaaattacacaaatttaaaaagtgac

SEQ ID NO: 622645 - DNA, 521 bp, Homo sapiens
aaaaatggtttcctgggccaggcccagggccttgctgctttgtgcagtctcaggacttggtgccctgcatcccagccatggctaaaaggagccaaggtacagctcaggccatggcttcagaaggtgcaagccccaagccctggcagcttccacaaggtgttgagtctgcgggyacacagaagataagaattaaggtttgagatcctctgcctagatttcagaggatgtatggaaatgcctggatgtccagacagaagtttgctgcaggggtggagcccttgaggagaacctccgctagggcagtgcaaaagggaaatgtggggttggagccttcacacagagtccccactggagcactgcctagtggagctgtgaaaagagggccaccatcctccagtacccagaatagtagatccaccgacagcttgcaccatgcacctggaaaagccacagacactcaacgccagcctgtgaaaagagccagaagggggtctgtaccctgaaaagccacaggagtgcag

SEQ ID NO: 622646 - DNA, 521 bp, Homo sapiens
aaaaatggtttcctgggccaggcccagggccttgctgctttgtgcagtctcaggacttggtgccctgcatcccagccatggctaaaaggagccaaggtacagctcaggccatggcttcagaaggtgcaagccccaagccctggcagcttccacaaggtgttgagtctgcgggcacacagaagataagaattaaggtttgagatcctctgcctagatttcagaggatgtatggaaatgcctggatgtccagacagaagtttgctgcaggggtggagcccttgaggagaacctccgctagggcagtgcaraagggaaatgtggggttggagccttcacacagagtccccactggagcactgcctagtggagctgtgaaaagagggccaccatcctccagtacccagaatagtagatccaccgacagcttgcaccatgcacctggaaaagccacagacactcaacgccagcctgtgaaaagagccagaagggggtctgtaccctgaaaagccacaggagtgcag

SEQ ID NO: 622647 - DNA, 537 bp, Homo sapiens
atggtttgtctctgcgtccccacccaaatctcatgttgaattgtaattcccagtgttgggggaggaacttggtggggacccccgtctggtgactggatcatggyggtggatttcctccatgttgttcccatgatagtgagtgaattctcacgagatctggttgtttaagagtgtgtggtgcttcccgtttcgctctctctctctctcctgccaccatgtgaacaaggtgcttgcctcccctttgccttttgctatgatcgtaagtttcctgaggcttcccagccttgcttcctgttaagcctgtagaactgggagttaattaaacctcttttcttcgtaaactagccagtctcaggtagttctttaaagcagtgtaaaaacagactaatacagagattacaacaggttgttaggaagcaagatccgggataacagctaagttcctggcataaaaggcagccagtccagactacagcatgttagaaagaagatgaaattgataggttatctgttgcatttgaatgtatcgagaaaaaa

SEQ ID NO: 622648 - DNA, 486 bp, Homo sapiens
cttgcttcttgtacagcctgcagaactaggagcaaaataaacctcttttctctataaattacccagcctcaggtattcctttatagcaacacaaaatgaacaaagacagatatctttgacaggatcacctactgcagcaagggctgccaayaaagtagggggaaaaaacccagactagaacttcacagaagctgaaagaacagtgtttcaaggagaaaaggggcagggtgcagtgactcatgcctgcaatcccagcacttttggaggctgaggtgggaggatcacttgaggccagaagtttaagaacagcctgggcaacatagtgagacccggtagctacaaaaaaaattttttttaattcgttgggcatagtggtgcactcctgtagtcccagctactcaggagactgaggtggaggatctcttaagcccaggagtttgaggttacaatgagctatgattgcaccactgctctccagcctgggtg

SEQ ID NO: 622649 - DNA, 469 bp, Homo sapiens
ttctttttcctgagcaaaccaaaacttaataacaatatgacaacttgattatataaaagtttcaggtttttaaaaaatatatagatcctcttattgtggsttacactgaccgttcatgacattgtcggactttctgatttgttctgaacatccctcctttttaaacaaccagttactttattttagaactaaatttaccatagaagattctttcttatataacattatttttctttaagcttttttacctaaaaaaattacctctttatttgtattactttctttacatatttttttagttcctggttccttttaccttgttttatacataactctgaaataagctttaaattaggcaaaacttgttcactttttttttataaaaaaggacacacttctttttcttctttctttttttttttttaagcagaaatgttttcccacaatatatatttattggaaaacaccc

SEQ ID NO: 622650 - DNA, 469 bp, Homo sapiens
ttctttttcctgagcaaaccaaaacttaataacaatatgacaacttgattatataaaagtttcaggtttttaaaaaatatatagatcctcttattgtggcttacactgaccgttcatgacattgtcggactttctgatttgttctgaacatccctcctttttaaacaaccagttactttattttagaactaaatttaccatagaagattctttcttatataamattatttttctttaagcttttttacctaaaaaaattacctctttatttgtattactttctttacatatttttttagttcctggttccttttaccttgttttatacataactctgaaataagctttaaattaggcaaaacttgttcactttttttttataaaaaaggacacacttctttttcttctttctttttttttttttaagcagaaatgttttcccacaatatatatttattggaaaacaccc

SEQ ID NO: 622651 - DNA, 599 bp, Homo sapiens
ggcaaacttgcctcccattctattcaaagtcactcctctgctcactgagacaggtgcgtatctgattgcctcctttggaaagactaatgagaaactcaaaagaatataaccatttatgtatcacccatctgtgacctggaagctccctctctgcttccagtcttcctgcctttgcttcaagttatcccacctttccagaccgaaccaatgtacttctaacatatattgattgacgtctcatgtctccttcaatgyataaaaccaagttgtgctctgaccaccttgggcacatgtctcaggacttcctgaggctgtgtcacgagcaagttctcaaccttggcaaaataaactttctaaattaactgagacctgtctcaacttttcggggttcatagaagacaagacaaataagttctagagcaatgctgtgcaatattgtgcctgtagataatactgtgttgtacatttaaacattattgaaagggtaaatctcatgttaaatgttcttacctaaataaaactttaaaatttgtttaaataaaaaataatataaatatataaaaggcacccaaaattaacctattttggtacacccccga

SEQ ID NO: 622652 - DNA, 340 bp, Homo sapiens
atcaatcatgtgtaatatttaaatacttttattatctaaatgtacatcaatagacagtataatcttgtccatttaaaaaattaacagctgttaagtctcttaatctctagttttccctccatctcttcctcttaaaatttatctgttgcatttgacctgaatagttatctacagtgtggatttttaaattacataatcatagcttgagtcaacatcttcctccatcctgtgtatttcccgcaaattggtagttggakccaaagtcttgatcagattcatgcttaatcctttctcctaaggccgtaggccgtggtgtgttctgtggagaagaggcacataa

SEQ ID NO: 622653 - DNA, 599 bp, Homo sapiens
caaaccctttgactctatcaatgcctcagctttcagagttgatagctaaacctatatctctaattatctttttataagtctcctctttcacatgtatctccaacccaggcagcatggtgaaacatacagttcataataagggaatgtggactcccttgagcatttcagggtgaaggcgcactgtgggtgttaaaagggaaaatatttaaagatcagtggtggttttctgctaacagaagtgtcaagtttttaaaggggacatgtggcactaataaaagagcatttcatgaataaaataagacagacaaaaccaaaaatagaaataatatctataacatgctatataatgacttttgcattggccaattacctattgcctcccacagcaaacaaaatctgaaaaagagcagacatagatacacaatctcccatttttgctggaaaaaatgctcttttcatcagaactttggcctacttcttatatatcttgccaatgtttgcttgatcattcgtttattccttgaataaattcccagtcaagcctagttctccttacctggccttcacctrttaaagccctggacagactgactctattt

SEQ ID NO: 622654 - DNA, 611 bp, Homo sapiens
ctcatagtcagactccgtaatatctaaagcttctattggaaaattaaattattttaacaacctccatagcatattttaactatgaatgatacactcaaaatatcctccccagctgccttaagtgtcatcctttgcatccacctggaatcatctcaaagcatatgaatacagaaagaagtaaatattggttgaacactttcctatgctacaggtatggcagtaggtgctggagatgcagaaataagacaytttcctgaaacctacaacccagtaagacacattcaattgctccattcatttagtggtgtgatctcactatccttctttttccttacagtggatgctgacgaaaattgtacaagagaatttatgaacaaaaacaaaagagacaaatggcgaaaaatatttgaagtactttttcttgggctggctcttctccaaatgacaactgataattaggtaagtaaatgagaacttactgaaacaaatgactttctctgattaaaacaccacgcagaaaaatgacatattgcagagagaacaacctttcctcttcaagctcactattctcttgttgagttatcattcagtaatgggtagagaagcagcta

SEQ ID NO: 622655 - DNA, 442 bp, Homo sapiens
ttattctaattgcttctcaatttctctttccacacatacacacacagaaaaataatttyggtaaaaattgtatattctattacaattgcttgtctccttttctccatattttctccatgtacaacaatttgcatattccttacatgtgtataatgatcttgccccacatagctatgaaaatatctgttgctattaccatttatgccattgactggccagcttacccaaggctagtcattgagtattctgaatttcaatgtccttatctgtaaaaggagatgataacaaccaaactcataattgcaagaaaccatatgaggacctaattacaaaaattgtactactgctacattttgatagcaacatgaaacagacaaattcctagtcagacagggacaggtcactggtgaaacctgaccttcaagccaaagacagtttaaaa

SEQ ID NO: 622656 - DNA, 572 bp, Homo sapiens
gcaggccacagcattgaataatgttattcactaaaaatatctaaatataaagctaaataggatttgaaacaagccccaggggaatctgaaagtaacttggcaaagcataaaccattccctaaaggagcaaattgtaaagagaatagagagataaagaaactatccaagcaacccatgttaattccagaaaattcaaaaacatagagttacgtcaaagaatgacacggtgagcagtattccaactagacaaatagccttaaaaggatacaagaaaatacacattcagccagcaaaatgttcacagacattatgttccaatctaagtctcagggccagtagtgtgtatatttaaaacgaggtgctaaaataatatcctaaaaaatttcaagctataatggctctttttctaataattaataaaaattttaaattgttgrtgatgaagctaaaacaaaagagtgtaactgtctagtgtttcagattctattaaatgtgttttccataatcttgagacatttatttcatgccacattttagggaaaaaatctatatgtatgtatgttatatgtcta

SEQ ID NO: 622657 - DNA, 572 bp, Homo sapiens
gcaggccacagcattgaataatgttattcactaaaaatatctaaatataaagctaaataggatttgaaacaagccccaggggaatctgaaagtaacttggcaaagcataaaccattccctaaaggagcaaattgtaaagagaatagagagataaagaaactatccaagcaacccatgttaattccagaaaattcaaaaacatagagttacgtcaaagaatgacacggtgagcagtattccaactagacaaatagccttaaaaggatacaagaaaatacacattcagccagcaaaatgttcacagacattatgttccaatctaagtctcagggccagtagtgtgtatatttaaaacgaggtgctaaaataatatcctaaaaaatttcaagctataatggctctttttctaataattaataaaaattttaaattgttggtgatgaagytaaaacaaaagagtgtaactgtctagtgtttcagattctattaaatgtgttttccataatcttgagacatttatttcatgccacattttagggaaaaaatctatatgtatgtatgttatatgtcta

SEQ ID NO: 622658 - DNA, 327 bp, Homo sapiens
ttttgtttatggtttttataatggcagttatggtacatggctattaacatatacttcagatatgcaaagcctaggggtagagtagttatcttcttttgcatggctataacttagacctcatcatgatcaaaactttaataccttccatattgcaattttgcatagttcatctttgatggccccacattccaaccatctcccaccaattgtgatcactgactgaccctattactttcccactgkctatatgtcctatctattccttttcttttaaattcagtttagcatccctttccttctgcagcattaatctggtaaactccaatc

SEQ ID NO: 622659 - DNA, 442 bp, Homo sapiens
ttattctaattgcttctcaatttctctttccacacatacacacacagaaaaataattttggtaaaaattgtatattctattacaattgcttgtctccttttctccatattttctccatgtacaacaatttgcatattccttacatgtgtataatgatcttgccccacatagctatgaaaatatctgttgctattaccatttatgccattgactggccagcttacccaaggctagtcattgagtattctgaatttcaatgtccttatctgtaaaaggagatgatracaaccaaactcataattgcaagaaaccatatgaggacctaattacaaaaattgtactactgctacattttgatagcaacatgaaacagacaaattcctagtcagacagggacaggtcactggtgaaacctgaccttcaagccaaagacagtttaaaa

SEQ ID NO: 622660 - DNA, 563 bp, Homo sapiens
ggtctgttcaggttttggatttctttctggttcaatcttggtaggctgtatgtgtctaggtattttccaatttatagccatatagattctcgtagtagccactgatgataaataaatatgataaataaaatttgcatttgaatttatgcagtgccagttgtaatgtctctttttattcatttttggttttatttatttggattgtctcttttcttagtctgactaaatttttgtcaatcttgtttaacttttcaraaaggcaactttttgtttcattgatcttttgtattattttttatttcaatttcatttatttattctctgatcttattatttcttatcttctagtaattttgggttttgtttgctgttgcctttctagttctttaagatgcattgttagattgtttatttgaagtttttccccatttttaggtacttataaatataaacttccctctgagtaccgcttttgctctacccagtaggttttgatatgttgtgtttccattattatttgtcacaaaatatttttcaattttctacttaatatcttcattggc

SEQ ID NO: 622661 - DNA, 410 bp, Homo sapiens
aagtctcctccaggaatattcccccactstctactgagcagcaaacctcaattagttcctgtagtcttggcttgtagaaaagggttgaactctaaattaggcttcactgtcctagctctatgccttctacttatcctttagagcttagcctagatttgattccttcaagaaaaccttctgtgacattcctctaaaatggatttccagatcataacacctaccaaatcatgtttatctgtggcaagcattagactgcgagatttgttagtactttgtttactgtttttttgttacctagcgaaaatgtctagagctcaaatatttgttgagtaaaggaagaatatcactagcagcctgagtgacttggggaagctagatatctctaggtatcactttcccctggcgaaaaa

SEQ ID NO: 622662 - DNA, 410 bp, Homo sapiens
aagtctcctccaggaatattcccccactctctactgagcagcaaaccycaattagttcctgtagtcttggcttgtagaaaagggttgaactctaaattaggcttcactgtcctagctctatgccttctacttatcctttagagcttagcctagatttgattccttcaagaaaaccttctgtgacattcctctaaaatggatttccagatcataacacctaccaaatcatgtttatctgtggcaagcattagactgcgagatttgttagtactttgtttactgtttttttgttacctagcgaaaatgtctagagctcaaatatttgttgagtaaaggaagaatatcactagcagcctgagtgacttggggaagctagatatctctaggtatcactttcccctggcgaaaaa

SEQ ID NO: 622663 - DNA, 584 bp, Homo sapiens
gtctggtggtggtgaattctctgtttttgtttgtctagaaaagactatttctccttcagatttgaagaatagctttgctaaatatagtatgcttggatgrcagttttcttctttcagcactttgaaaatgtcgtcccgctctctcctggactgtatggtttctgtttaaaagtctgccagacaaattgcagcttctttatatgttatttatgtcttttctcttgctgcttttagcatcctctctttgtccttggcctttaagagtttgattattaagtactttgggacggtcttatttgggttgaatttgtttggtgtaatctgacctctttgtatctgaatatttatatcctcaacttttggaaagttttttgttactacttctttgaacagactttctactccttgctcttgctcaaatctcttaaacactaataattcttagatttggtcttttgaggtaattttctatatcttgtaggtcatctttgttcctttttattcctttttcccgttactcctatgactacgtattttcaaataatctgtctttgagctcactgattctttcctctgcttgatgc

SEQ ID NO: 622664 - DNA, 487 bp, Homo sapiens
cagaataaccacacagagaatgcaaggacctttctgtgcctgagctgaagcaatactctgcctcctgagaaagcagcgccttcactgcccagagcagtcacaccttcccagtgcctaaattgatgcagtgccttaaatcccagggaaacagtgcctgggccatttagaatagtcatgccttctgggcctgagctgaagaggcacattttcccctggggagggagtacatgggtcaaactgagcagctgcacatccagggctgagctgagatagtactgtgtgttccagggaaacagaagaagctaagccaagacaccccaccctacasgccaaacaactcaaatatcccgcttccctggagttggactagttccctagagtctgaactgctgagacacccatctccccagagagtgggctcatcactatgttattccatgccacccagcaaccaaacaacaggtgggttccaccattctgggatact

SEQ ID NO: 622665 - DNA, 496 bp, Homo sapiens
catgttcatggattagaataattaatattgtaaaaaatggccacactgccaaaagctatctacacaattaatacaatctctatcaaaataccaatgatacttgtcaaagaaatattttaagattttttttctttcttttttttttttgagatgaagtctcactctatcactcaggctggagtgtaatggcacaattttggctcactgcaacctccacctctcaggttcaagcaattctcctgcctcaagccttccaagtagctgggattacaggcatgcaccaccacgcccggctaatttttgtatttttagtagagacagggttttgccatgttggccaggctggtcatgaactcctgacctcaggtgaagactccaaatagccaaagcaattctgagcaaaactrtaacaacaacaacaaaaccaaaggcttgcagcattacaatacttgacttcaaaatatactacaaagttatagtaatcaaaacagcatgg

SEQ ID NO: 622666 - DNA, 599 bp, Homo sapiens
aaaactgtgatttatctaaaaagaagccaagcagcagaaacacctaagctgctaatatatagggaatcacttgccgtcaggagcaaaccctttgggaaataaccacctgtctcccagaggcagatacaatgactcagctgatgaagaggccagaaaggcagtatttaggaaagcaagaatcattagaaacttggggagaaaatacaagtttgcatggaagttacataagaaatttaaggcacaaaaagatgattgccagagtcagccaaacagatacatttttcctaagtctcttgaatatttcttggagaactaacaaggtatctcccrtggcattcaaattagactggctggtgttctcagggtgttctgaaggccctgttctgatttcacctcaatgtattatttattttgtgtcattttatatctgaatttatgttaaatttataccatcactaatattctgaaatatctaagaagttgaggagaaagtgtcttagttctccggattgtgaaagtattaccaccaaaaaaattgtacctcagagttcttattgtccatagtcctaagaattcattttattctcatattttccaca

SEQ ID NO: 622667 - DNA, 451 bp, Homo sapiens
tgcaaagggaaatgggtctcattggaaaaagactttttttacactgttggtaaatacattttgaacattaatttagtagcatattcacacacacatatatataacatagtatggttatataggtatgttaaggattttgggggggagttgtttcatatatacttatgtgtaaggacattycttacaggattattatatcaaaaagatagatccttatcaataggaatttatcatcaaaagtaaatccttaccaataggaaataccccgaaaataatacagtatgcaaccattttttacaaatgaggttagatctagagtatactgattattcacaattaaaatatttaaagcatttagtttggtaacacatcttaagataattttgttagaattcttgtaatatctgctgtgttgcaaatggaagctacacgctacattgacaccgtacct

SEQ ID NO: 622668 - DNA, 451 bp, Homo sapiens
tgcaaagggaaatgggtctcattggaaaaagactttttttacactgttggtaaatacattttgaacattaatttagtagcatattcacacacacatatatataacatagtatggttatataggtatgttaaggattttgggggggagttgtttcatatatacttatgtgtaaggacatttcttacaggattattatatmaaaaagatagatccttatcaataggaatttatcatcaaaagtaaatccttaccaataggaaataccccgaaaataatacagtatgcaaccattttttacaaatgaggttagatctagagtatactgattattcacaattaaaatatttaaagcatttagtttggtaacacatcttaagataattttgttagaattcttgtaatatctgctgtgttgcaaatggaagctacacgctacattgacaccgtacct

SEQ ID NO: 622669 - DNA, 451 bp, Homo sapiens
tgcaaagggaaatgggtctcattggaaaaagactttttttacactgttggtaaatacattttgaacattaatttagtagcatattcacacacacatatatataacatagtatggttatataggtatgttaaggattttgggggggagttgtttcatatatacttatgtgtaaggacatttcttacaggattattatatcaaaaagatagatccttatcaataggaatttatcatcaaaagtaaatccttaccaataggaaataccccgaaaataatrcagtatgcaaccattttttacaaatgaggttagatctagagtatactgattattcacaattaaaatatttaaagcatttagtttggtaacacatcttaagataattttgttagaattcttgtaatatctgctgtgttgcaaatggaagctacacgctacattgacaccgtacct

SEQ ID NO: 622670 - DNA, 631 bp, Homo sapiens
agtaaatatttcaggctttgtggactatatatatttattttttttgagacagggtctctgttgcccaggctggagtgcaattgtgtgatcacagctcactgcagccttgactttctgggctctagtaatcctcccacctcagcctttctactgkctgggaccccaagtgtgcaacatcacacccagctaattgactctatggactgtaatgtgaataagcatggctgtgttccaagattctttacttacaaaaacaggcagtgggctggatttggcccacaggtgctaatttgctgacccgtgtgctaaaaggaaggtgctgctaatgcagtaacacttatttgtaaaagtgccctgcatgtgtgacattatctttcctttgagaaaaggatatatttcagtattcacctcaccatatttttccacagtgatgtcatataatttttaaaatttcatttgtaaaataagattattttctgcatttctgccactttattcctgtcaatagaactcagtatttcactgtgatcaattactttgtatatttgatgagtatcaactgtcctagaattggctgatttttatcaagcaagaaatactctccttgaagcttttagtttttcttggtctt

SEQ ID NO: 622671 - DNA, 572 bp, Homo sapiens
gtgcaacatcacacccagctaattgactctatggactgtaatgtgaataagcatggctgtgttccaagattctttacttacaaaaacaggcagtgggctggatttggcccacaggtgctaatttgctgacccgtgtgctaaaaggaaggtgctgctaatgcagtaacacttatttgtaaaagtgccctgcatgtgtgacattatctttcctttgagaaaaggatatatttcagtattcacctcaccatatttttccacagtgatgtcatataatttttaaaatttcatttgtaaaataagattattttctgcatttctgccactttattcctgtyaatagaactcagtatttcactgtgatcaattactttgtatatttgatgagtatcaactgtcctagaattggctgatttttatcaagcaagaaatactctccttgaagcttttagtttttcttggtctttatgtataagcatgaacaaaataataatcagcttctgtaatctagaaatggtcaaggcaacttttagttctatagttttaagaatttaacaccttggtctggcattttt

SEQ ID NO: 622672 - DNA, 572 bp, Homo sapiens
gtgcaacatcacacccagctaattgactctatggactgtaatgtgaataagcatggctgtgttccaagattctttacttacaaaaacaggcagtgggctggatttggcccacaggtgctaatttgctgacccgtgtgctaaaaggaaggtgctgctaatgcagtaacacttatttgtaaaagtgccctgcatgtgtgacattatctttcctttgagaaaaggatatatttcagtattcacctcaccatatttttccacagtgatgtcatataatttttaaaatttcatttgtaaaataagattattttctgcatttctgccactttattcctgtcaatagaactcagtatttyactgtgatcaattactttgtatatttgatgagtatcaactgtcctagaattggctgatttttatcaagcaagaaatactctccttgaagcttttagtttttcttggtctttatgtataagcatgaacaaaataataatcagcttctgtaatctagaaatggtcaaggcaacttttagttctatagttttaagaatttaacaccttggtctggcattttt

SEQ ID NO: 622673 - DNA, 572 bp, Homo sapiens
gtgcaacatcacacccagctaattgactctatggactgtaatgtgaataagcatggctgtgttccaagattctttacttacaaaaacaggcagtgggctggatttggcccacaggtgctaatttgctgacccgtgtgctaaaaggaaggtgctgctaatgcagtaacacttatttgtaaaagtgccctgcatgtgtgacattatctttcctttgagaaaaggatatatttcagtattcacctcaccatatttttccacagtgatgtcatataatttttaaaatttcatttgtaaaataagattattttctgcatttctgccactttattcctgtcaatagaactcagtatttcacwgtgatcaattactttgtatatttgatgagtatcaactgtcctagaattggctgatttttatcaagcaagaaatactctccttgaagcttttagtttttcttggtctttatgtataagcatgaacaaaataataatcagcttctgtaatctagaaatggtcaaggcaacttttagttctatagttttaagaatttaacaccttggtctggcattttt

SEQ ID NO: 622674 - DNA, 572 bp, Homo sapiens
gtgcaacatcacacccagctaattgactctatggactgtaatgtgaataagcatggctgtgttccaagattctttacttacaaaaacaggcagtgggctggatttggcccacaggtgctaatttgctgacccgtgtgctaaaaggaaggtgctgctaatgcagtaacacttatttgtaaaagtgccctgcatgtgtgacattatctttcctttgagaaaaggatatatttcagtattcacctcaccatatttttccacagtgatgtcatataatttttaaaatttcatttgtaaaataagattattttctgcatttctgccactttattcctgtcaatagaactcagtatttcactgtgatcaattactttgtatatttgatgagtatcaactgtcctagaattggctgatttttatcaagcaagaartactctccttgaagcttttagtttttcttggtctttatgtataagcatgaacaaaataataatcagcttctgtaatctagaaatggtcaaggcaacttttagttctatagttttaagaatttaacaccttggtctggcattttt

SEQ ID NO: 622675 - DNA, 545 bp, Homo sapiens
agaatttaacaccttggtctggcatttttaatgccaaatgtgtataatttttataagctttaaaatatgtaattgttatataaaatttgaaaactacacctgttatgtaaaatttgaaactatttgtctaytacttttccatgactgtggaagaaaattacaacattctcagccatgactcctaagtatgatgtccttaaaagaactgtctacactcacgaactcaaattttcttttcattcactcttgatctcatgccagtaagtcttcaatttcagcagtcctccaacgtttttcctcaaaattatcactaatttttttctgtaatctaggcacttttcttccacctcattttatttaatctgtcagcaatatttgaggcaatggaggacatctcctccctaacggcgtcttcacttggctttcaggacctcactgcctcaggcttttcctcctacctttctagtccattcatcatgttctgttttgcttgctcctcctcatctttctccttttggacattgttgtttcccagggctcactcc

SEQ ID NO: 622676 - DNA, 545 bp, Homo sapiens
agaatttaacaccttggtctggcatttttaatgccaaatgtgtataatttttataagctttaaaatatgtaattgttatataaaatttgaaaactacacctgttatgtaaaatttgaaactatttgtctactacttttccatgactgtggaagaaaattacaacattctcagccatgactcctaagtatgatgtccttaaaagaactgtctacactcacgaactcaaattttyttttcattcactcttgatctcatgccagtaagtcttcaatttcagcagtcctccaacgtttttcctcaaaattatcactaatttttttctgtaatctaggcacttttcttccacctcattttatttaatctgtcagcaatatttgaggcaatggaggacatctcctccctaacggcgtcttcacttggctttcaggacctcactgcctcaggcttttcctcctacctttctagtccattcatcatgttctgttttgcttgctcctcctcatctttctccttttggacattgttgtttcccagggctcactcc

SEQ ID NO: 622677 - DNA, 545 bp, Homo sapiens
agaatttaacaccttggtctggcatttttaatgccaaatgtgtataatttttataagctttaaaatatgtaattgttatataaaatttgaaaactacacctgttatgtaaaatttgaaactatttgtctactacttttccatgactgtggaagaaaattacaacattctcagccatgactcctaagtatgatgtccttaaaagaactgtctacactcacgaactcaaattttcttttcattcactcttgatctcatgccagtaagtcttcaatttcagcagtcctccaacgtttttcctcaarattatcactaatttttttctgtaatctaggcacttttcttccacctcattttatttaatctgtcagcaatatttgaggcaatggaggacatctcctccctaacggcgtcttcacttggctttcaggacctcactgcctcaggcttttcctcctacctttctagtccattcatcatgttctgttttgcttgctcctcctcatctttctccttttggacattgttgtttcccagggctcactcc

SEQ ID NO: 622678 - DNA, 272 bp, Homo sapiens
tttttaaaaatctatgggcatggaacccatccatcagtatttttaaaaatttcccaggtggtttccatgagtagctaaggttgagaaccgtggttttggatttcccacttgatgattttaaaccataacatcactttgcctatttttctaaatattcctctttctacagtcagctttcaaaagtcagactacaactgaatcaaagaattayacaagaaaggggaaactgagccatccttcagcaactccaggaacaaatcaaggtacatata

SEQ ID NO: 622679 - DNA, 536 bp, Homo sapiens
ataaacacaatgagagtggcaatcaggactgtcttcacagatgcacatggtggaagaggctgtcagttaccaactgatctatgtgccacccccacacatcgatagaagtttagtcaatacaatttattttgaaaattaagattgattatatatggacatgtttgggggctcasgtgcacgcactccagagtgttgtaaatacatacatatagtaagctggttttcctcctatcaaaagcaagaatggcaaagttcaaacacatgtttatttattcacatgctctgaacgaagatttattctaaaagaaaagaaaaaaacatggcttacaaacaccagctaacagcttttagtcatgaatctgttagtcttggttctgattaagcactggcatatatgagatgtgacaatatagcatttagacattacattaacaccatctataggcaacccccaatcatcttactgtctaaaccaatatataagatacatgatagacattttcaaaggacttatttaaaagcctcagaatttgttt

SEQ ID NO: 622680 - DNA, 536 bp, Homo sapiens
ataaacacaatgagagtggcaatcaggactgtcttcacagatgcacatggtggaagaggctgtcagttaccaactgatctatgtgccacccccacacatcgatagaagtttagtcaatacaatttattttgaaaattaagattgattatatatggacatgtttgggggctcaggtgcrcgcactccagagtgttgtaaatacatacatatagtaagctggttttcctcctatcaaaagcaagaatggcaaagttcaaacacatgtttatttattcacatgctctgaacgaagatttattctaaaagaaaagaaaaaaacatggcttacaaacaccagctaacagcttttagtcatgaatctgttagtcttggttctgattaagcactggcatatatgagatgtgacaatatagcatttagacattacattaacaccatctataggcaacccccaatcatcttactgtctaaaccaatatataagatacatgatagacattttcaaaggacttatttaaaagcctcagaatttgttt

SEQ ID NO: 622681 - DNA, 591 bp, Homo sapiens
ttacacagctaagagatagtagagtaagaattcaaatccaagttttttttttatttcacacctatttgtgttatgaaatatgcctttaaaactccataaaacttasccttctgagaaatgaggaaataagaagtcatgatttttctctcattacccacaagttgactgtgtgtattttatgctaataaaaaaattctctggggtaaaaaacagcagtaatacgtgtaactaggataaccatacccatcgattgcctgggacaaatcattcatctctgttaccctggtgcagttattgatagcaccccctttcaatcttaatagtgtcctgatttgaacaaagaatacatcgtcaccccgaatttaacctcatttttcaccagagcagattctgagaatagagaagccctgccagtttggagttgatgaacagatggctagtcatttctcttgcactctatggaccaccgataccacctcattctaggcatctttaggggaatgacaatgtttggtctttggactatttgaaggcagatattacagggtacagaccagtgaattctgggctggtattcccacacactcctat

SEQ ID NO: 622682 - DNA, 431 bp, Homo sapiens
gactctcagtataatgagagtgatggtatgakttatcacacttttgagaatgaaagggaacactattaacaattattttgagaggacaaatgtgactggagctgtgctggccaaaaccaggatgtgtggtcaccctaagtatagtgactcacagataggggtaacttaaattcaacacttttaaccaagcccttaaatcaaacttttgttgtcctctgattttatcatagcatagcaaagtgctgacagtcaagcacaacttctcaaaatgtaaaattccttgacaaaatctggaatgcccaaggaaataatatatatttgccaatattaaaacgcttatgtgaatctcaaaattaactttatttttctttaaaaccaccatcagaggtaacttttatgaaagaatggtaggagagttgtttgcaaccagc

SEQ ID NO: 622683 - DNA, 431 bp, Homo sapiens
gactctcagtataatgagagtgatggtatgatttatcacacttttgagaatgaaagggaacactattaacaattattttgagaggacaaatgtgactggagctgtgctggccaaaaccaggatgtgtggtcaccctaagtatagtgactcacagataggggtaayttaaattcaacacttttaaccaagcccttaaatcaaacttttgttgtcctctgattttatcatagcatagcaaagtgctgacagtcaagcacaacttctcaaaatgtaaaattccttgacaaaatctggaatgcccaaggaaataatatatatttgccaatattaaaacgcttatgtgaatctcaaaattaactttatttttctttaaaaccaccatcagaggtaacttttatgaaagaatggtaggagagttgtttgcaaccagc

SEQ ID NO: 622684 - DNA, 588 bp, Homo sapiens
aaatccaaaagataagaactttataaaaagacgtgtcaccccgtgtccctagaagcatagattttaatattttaggcagatctttatgattacttcaatgaacttggatagcaagaggatctatatctcttgacaaatcaaaagtctagagtagtctttgtcagttaaaatttacattgctaataacatgtgaagcagaataattttgtacatagaagatgctcagcaggtatttgttggcagctgtatagatgaataagttaatggaagaatgaatgaatttttgttccttgtggctttttagtaactagtaatctgtggctctaagtcttagccaaggataattaatggtagaaactttggggaaagactttggtgraagttgttcaaaattaaaagacaagacagggtcaacatttaaaaactactgcaagcaaagaatcggagtctgcaaatagacttcttgatcactaaaactcaagccatgttcaaattcctgctctatagtatctgatttgaacttttgtctaagaccttttatttacttataaaaatgtaaaatttttatacccttagttttaacaatcc

SEQ ID NO: 622685 - DNA, 606 bp, Homo sapiens
caacctcctgggctccagcaattctccttcctcagcctcctgagtaactggggaccacaggcatatgccaccacacctggttgattttttaaatttctttatagtgacagcatctcaccatgttgcccaggctggtctcaaactcctgggctcaagtgaccctcctatctcagcctccaaaagtgctgggattacaggcatgagccattacacccagcctgtttttgttttgtttttttctaaaactgataytgtattcaaaaagaaaaataaatgctttctgcaacaagtccttttcagagagaattgaacaccaatggtagtctgtataattttggtaaatggtaaaggtgcaaagatgtggtccagataggtagaaaataggagactcaggccctattctcccacctgcctctgacctacctcccggccaagcagttcaaccttaccatgccttgtgacgttctcctttgtaaattagggtgatctttttttttttttttttcggtctcaaaaagttatgcagagaataccaaatgagagttgaacaagtctcttatcttggacagaaagtactttgcctttaaagtaattaaagttggataa

SEQ ID NO: 622686 - DNA, 479 bp, Homo sapiens
ctctttggcatcaaaatcactttctcatataaccttagagtataagagattttggcattcatctagtttgttctgatactcgatgttggcactccctatggccccctargcaaagatgttggaatagctatgagtcttaacaattctatctatatgcagctgcaatctccatttctataattctaccctttgttgaccagagtaaaacaagactaatctattttctctttctgtggaaagcctttactatgtctgtagtcagcatgacagcttgatctgcctttagtcttttcttcttttcattaatcttaaagcttctggagatacagtcattattttactgctgagcccctattttatttatccaaattatctataactttggccatcccaaattgatacactattgtagatatgcagatttgaatgaggctttaaaaactattgttatctttttaattcactgccagcatgtctgt

SEQ ID NO: 622687 - DNA, 376 bp, Homo sapiens
tagtgaaatgatttgagtttggagacaatggggtgaaggcccaaggaragttccacactcttgggttggccataggaaagcattaaaactcagaatttaatttgactaaatttgtttgccaattcaactctcaatttctaattttcagtaaacttttatatcctcacaaatgctttacatgggtaggtttttgtggaaaacaataaaggcaatgaacattctatctgggtcaatggttcttgatcttcaggatgctttagaatcactcggggaacttttgaaatactggatgctgatgtcagactcctgagtgattacaacagaatctctgcaggtggcacccagaaatcggtatatcttaaaagatcccaggtga

SEQ ID NO: 622688 - DNA, 376 bp, Homo sapiens
tagtgaaatgatttgagtttggagacaatggggtgaaggcccaaggaaagttccacactcttgggktggccataggaaagcattaaaactcagaatttaatttgactaaatttgtttgccaattcaactctcaatttctaattttcagtaaacttttatatcctcacaaatgctttacatgggtaggtttttgtggaaaacaataaaggcaatgaacattctatctgggtcaatggttcttgatcttcaggatgctttagaatcactcggggaacttttgaaatactggatgctgatgtcagactcctgagtgattacaacagaatctctgcaggtggcacccagaaatcggtatatcttaaaagatcccaggtga

SEQ ID NO: 622689 - DNA, 376 bp, Homo sapiens
tagtgaaatgatttgagtttggagacaatggggtgaaggcccaaggaaagttccacactcttgggttggccataggaaagcattaaaactcagaatttaatttgactaaatttgtttgccaattcaactctcaatttctaattttcagtaaacttttmtatcctcacaaatgctttacatgggtaggtttttgtggaaaacaataaaggcaatgaacattctatctgggtcaatggttcttgatcttcaggatgctttagaatcactcggggaacttttgaaatactggatgctgatgtcagactcctgagtgattacaacagaatctctgcaggtggcacccagaaatcggtatatcttaaaagatcccaggtga

SEQ ID NO: 622690 - DNA, 495 bp, Homo sapiens
aaagtcatccatctctagaaagtaacaatacagaaatataggccgtgtgtttgttggaaataaaataacactaacaaagacctctctgaaccaacatagaaaagagaacacagtttattactacatgaacatggtcagatttctatgcacgtaggtactacaaaagtgactaaaatgtctaggcagactttcacataatttatttagcaaagcagaagtaagaataacttctcatctcctcaagagacaaagggctacatcctaagatagtcctcttgtgaaaaactcccaagtaagttttggaggcatttgtttacacttccagggtcagaaagtccccattcttccactgcaaaatcaaaagcataaayctgttatttggacctattaagatttcaaggaaatactctaaggaagacaggatggagagatagtgacctccaacctcaaaaaagtcatcattttacccttatggtgtgttttgcttggtatatg

SEQ ID NO: 622691 - DNA, 495 bp, Homo sapiens
aaagtcatccatctctagaaagtaacaatacagaaatataggccgtgtgtttgttggaaataaaataacactaacaaagacctctctgaaccaacatagaaaagagaacacagtttattactacatgaacatggtcagatttctatgcacgtaggtactacaaaagtgactaaaatgtctaggcagactttcacataatttatttagcaaagcagaagtaagaataacttctcatctcctcaagagacaaagggctacatcctaagatagtcctcttgtgaaaaactcccaagtaagttttggaggcatttgtttacacttccagggtcagaaagtccccattcttccactgcaaaatcaaaagcataaacctgttatttggacctattaagatttcaaggaaatamtctaaggaagacaggatggagagatagtgacctccaacctcaaaaaagtcatcattttacccttatggtgtgttttgcttggtatatg

SEQ ID NO: 622692 - DNA, 495 bp, Homo sapiens
aaagtcatccatctctagaaagtaacaatacagaaatataggccgtgtgtttgttggaaataaaataacactaacaaagacctctctgaaccaacatagaaaagagaacacagtttattactacatgaacatggtcagatttctatgcacgtaggtactacaaaagtgactaaaatgtctaggcagactttcacataatttatttagcaaagcagaagtaagaataacttctcatctcctcaagagacaaagggctacatcctaagatagtcctcttgtgaaaaactcccaagtaagttttggaggcatttgtttacacttccagggtcagaaagtccccattcttccactgcaaaatcaaaagcataaacctgttatttggacctattaagatttcaaggaaatactctaaggaagacaggatggasagatagtgacctccaacctcaaaaaagtcatcattttacccttatggtgtgttttgcttggtatatg

SEQ ID NO: 622693 - DNA, 495 bp, Homo sapiens
aaagtcatccatctctagaaagtaacaatacagaaatataggccgtgtgtttgttggaaataaaataacactaacaaagacctctctgaaccaacatagaaaagagaacacagtttattactacatgaacatggtcagatttctatgcacgtaggtactacaaaagtgactaaaatgtctaggcagactttcacataatttatttagcaaagcagaagtaagaataacttctcatctcctcaagagacaaagggctacatcctaagatagtcctcttgtgaaaaactcccaagtaagttttggaggcatttgtttacacttccagggtcagaaagtccccattcttccactgcaaaatcaaaagcataaacctgttatttggacctattaagatttcaaggaaatactctaaggaagacaggatggagagatagtracctccaacctcaaaaaagtcatcattttacccttatggtgtgttttgcttggtatatg

SEQ ID NO: 622694 - DNA, 608 bp, Homo sapiens
gtttttttttttggctcattcttagaactgtagctgttcttgaatctttgatgggttgaagctaatccacattcagattttacaatctcatataattgccaaaattctacccttcaaaacactggtttctttctttttttctcttacatttcctmaaagaaaattagtgaaaaaacaattttttatttggtctgaaactttatggcaaatctgaggacaggaagaaatttagggacttctttgtgcacttttgatttggcgaatacctggaatatatatttttctctctgcacaatgcaaagtagttgcactcacaaagtatcaattagaaaaagaaattcttcccacatttcatcagagttttaagtggttacactacaataatccccagctatttgggaaatggtaaaaaaaactttgaagatcaagccatcattattattttcactaaaacctaaaaattcagccacaatatgtcaaaccagttgggacaggacttccttcctctaatttagtttttactgctggatacctgatgggctacttactatatccggtgtctcatagggcaaattgtacttggagacaatgtgaatattggctctgtt

SEQ ID NO: 622695 - DNA, 608 bp, Homo sapiens
gtttttttttttggctcattcttagaactgtagctgttcttgaatctttgatgggttgaagctaatccacattcagattttacaatctcatataattgccaaaattctacccttcaaaacactggtttctttctttttttctcttacatttcctaaaagaaaattagtgaaaaaacaattttttatttggtctgaaactttatggcaaatctgaggacaggaagaaatttagggacttctttgtgcacttttgatttggcgaatacctggaatatatatttttctctctgcacaatgcaaagtagttgcactcacaaagtatcaattagaaaaagaaattcttcccacatttcatcagagttttaagtggttacactacaataatccccagctatttgggaaatggtaaaaaaaactttgaagatcaagccatcattattattttcactaaaacctaaaaattcagccacaatatgtcaaaccagttgggacaggacttccttccwctaatttagtttttactgctggatacctgatgggctacttactatatccggtgtctcatagggcaaattgtacttggagacaatgtgaatattggctctgtt

SEQ ID NO: 622696 - DNA, 569 bp, Homo sapiens
aacatttattgagaactatgttccagactttactaagaactttatctgcaacaytttatttaatgctcatcaccaatctgtgagatactattgttttgctcacttttacataaaggaagtagggcttaaagaggcaaagtaacttgactatgattacatagctaataaattttggaaaatgccatgatttaaaactgtgattgtaaaaattatagcaaaacatcagaccctcttattatttacctcccctctttctttggaggtggtcaatctgttcatatataccataaatttttctcctatcaaaatggcttcataacatttgataacaattaaggaaatctaaacaatgtatggactttaatttaatatcatgggccagtattggtttgttagtctcaaaaaagttaccataccaatacaagaagttactgagagaggaaactgagtgtggggtatgggagaacactctgtgttatagtcagttttctagcaatctaaagctattttaaaattaaaattctatcttaaaaaatgactatataggctgggggcagtggctcacatgt

SEQ ID NO: 622697 - DNA, 569 bp, Homo sapiens
aacatttattgagaactatgttccagactttactaagaactttatctgcaacactttatttaatgctcatcaccaatctgtgagatactattgttttgctcacttttacataaaggaagtagggcttaaagaggcaaagtaacttgactatgattacatagctaataaattttggaaaatgccatgatttaaaactgtgattgtaaaaattatagcaaaacatcagaccctcttattatttacctcccctctttctttggaggtggtcaatctgtwcatatataccataaatttttctcctatcaaaatggcttcataacatttgataacaattaaggaaatctaaacaatgtatggactttaatttaatatcatgggccagtattggtttgttagtctcaaaaaagttaccataccaatacaagaagttactgagagaggaaactgagtgtggggtatgggagaacactctgtgttatagtcagttttctagcaatctaaagctattttaaaattaaaattctatcttaaaaaatgactatataggctgggggcagtggctcacatgt

SEQ ID NO: 622698 - DNA, 569 bp, Homo sapiens
aacatttattgagaactatgttccagactttactaagaactttatctgcaacactttatttaatgctcatcaccaatctgtgagatactattgttttgctcacttttacataaaggaagtagggcttaaagaggcaaagtaacttgactatgattacatagctaataaattttggaaaatgccatgatttaaaactgtgattgtaaaaattatagcaaaacatcagaccctcttattatttacctcccctctttctttggaggtggtcaatctgttcatatataccataaatttttctcctatcaaaatggcttcataacatttgataacaattaaggaaatctaaacaatgtatggactttaatttaatatcatgggccagtattggtttgttagtctcaaaaaagttaccataccartacaagaagttactgagagaggaaactgagtgtggggtatgggagaacactctgtgttatagtcagttttctagcaatctaaagctattttaaaattaaaattctatcttaaaaaatgactatataggctgggggcagtggctcacatgt

SEQ ID NO: 622699 - DNA, 548 bp, Homo sapiens
tctcaaaaaagttaccataccaatacaagaagttactgagagaggaaactgagtgtggggtatgggagaacactctgtgttatagtcagttttctagcaatctaaagctattttaaaattaaaattctatcttaaaaaatgactatataggctgggggcagtggctcacatgtgtaatcccagcactttgggaggccgaggcgggcaaatcaccaggtcaggagatcgagaccatcatggctarcacggtgaaaccctgtctctactaaaaatacagaaaagtagccaggcctggtggtgggtgcctgtagtcccagctactcaggaggctgcgcaggaaaatggcatgaacccaggaagtggagcttgcagcaagctaagatcacaccactgcactccagcctgggtgacagagtgagactctgtctcaaaaaaaaaaaaaaatgactgtttatgcatacccagccggtgtttaaaacaatccacccatacaactaacagacatcttctatcacaattttatgatggttttgctaaagagtggcaaa

SEQ ID NO: 622700 - DNA, 548 bp, Homo sapiens
tctcaaaaaagttaccataccaatacaagaagttactgagagaggaaactgagtgtggggtatgggagaacactctgtgttatagtcagttttctagcaatctaaagctattttaaaattaaaattctatcttaaaaaatgactatataggctgggggcagtggctcacatgtgtaatcccagcactttgggaggccgaggcgggcaaatcaccaggtcaggagatcgagaccatcatggctaacacggtgaaaccctgtctctactaaaaatacagaaaagtagccaggcstggtggtgggtgcctgtagtcccagctactcaggaggctgcgcaggaaaatggcatgaacccaggaagtggagcttgcagcaagctaagatcacaccactgcactccagcctgggtgacagagtgagactctgtctcaaaaaaaaaaaaaaatgactgtttatgcatacccagccggtgtttaaaacaatccacccatacaactaacagacatcttctatcacaattttatgatggttttgctaaagagtggcaaa

SEQ ID NO: 622701 - DNA, 585 bp, Homo sapiens
cattaactgaaactcctgtgactactattcttaccattattattaatattactgctttcagcatgcagagagctcttatttwtcttaccccctagctaattttctattacagcatatcagtttagggaagctgtgacaaaatcttcacttaaatctttgtccacttcagataagtggccctagcattgtttcttgcccatcaaaggactttaaattagtagcttctgctatgcaataccccactgagataagagagaatcctttttgtcctttccttttaacctggtggtattttacaaagatgaactcttgagcacccaagatgcttctgtcttttagtgcatgtaaatgtttgattctgcatggacaggcaagatgttaaattggtaaagtatatcaaattagcttttaaaataactttattacagttcctaaaggagaaattatctctgtaattttagaactgccctcatacttgctgtatgttgtggatcagcaagtatagtcaatcttctacttgagcaaaatgttgatgtatcttctcaagatctatctggacagacggccagagagtatgctgtttct

SEQ ID NO: 622702 - DNA, 585 bp, Homo sapiens
cattaactgaaactcctgtgactactattcttaccattattattaatattactgctttcagcatgcagagagctcttatttttcttaccccctagctaattttctattacagcatatcagtttagggaagctgtgacaaaatcttcacttaaatctttgtccacttcagataagtggccctagcattgtttcttgcccatcaaaggactttaaattagtagcttctgctatgcaataccccactgagataagagagaatcctttttgtccyttccttttaacctggtggtattttacaaagatgaactcttgagcacccaagatgcttctgtcttttagtgcatgtaaatgtttgattctgcatggacaggcaagatgttaaattggtaaagtatatcaaattagcttttaaaataactttattacagttcctaaaggagaaattatctctgtaattttagaactgccctcatacttgctgtatgttgtggatcagcaagtatagtcaatcttctacttgagcaaaatgttgatgtatcttctcaagatctatctggacagacggccagagagtatgctgtttct

SEQ ID NO: 622703 - DNA, 585 bp, Homo sapiens
cattaactgaaactcctgtgactactattcttaccattattattaatattactgctttcagcatgcagagagctcttatttttcttaccccctagctaattttctattacagcatatcagtttagggaagctgtgacaaaatcttcacttaaatctttgtccacttcagataagtggccctagcattgtttcttgcccatcaaaggactttaaattagtagcttctgctatgcaataccccactgagataagagagaatcctttttgtcctttccttttaacctggtggtattttacaaagatgaactcttgagcacccaagatgcttmtgtcttttagtgcatgtaaatgtttgattctgcatggacaggcaagatgttaaattggtaaagtatatcaaattagcttttaaaataactttattacagttcctaaaggagaaattatctctgtaattttagaactgccctcatacttgctgtatgttgtggatcagcaagtatagtcaatcttctacttgagcaaaatgttgatgtatcttctcaagatctatctggacagacggccagagagtatgctgtttct

SEQ ID NO: 622704 - DNA, 490 bp, Homo sapiens
atcaaattagcttttaaaataactttattacagttcctaaaggagaaattatctctgtaattttagaactgccctcatacttgctgtatgttgtggatcagcaagtatagtcaatcttctacttgagcaaaatgttgatgtatcttctcaagatctatctggacagacggccagagagtatgctgtttctagtcatcatcatgtgtaagtgtttacatgaaaaggctagttaatgctaaattgaggtttaaaataattataacaattgcatcttacatatcaggtgagatgtcatagtttggttcaggtagttttagaktggccgtgagttagtcccctgcatcagccagaaatcagacaaaaagcaagacaagttagaagtaccaatgggtgcaggattctttacctcaggacttttaagacctttatccttagagatcccaatattgttcatttcatccaagtataacacctatgcatgggataaaaa

SEQ ID NO: 622705 - DNA, 494 bp, Homo sapiens
caggcaagatgttaaattggtaaagtatatcaaattagcttttaaaataactttattacagttcctaaaggagaaattatctctgtaattttagaactgccctcatacttgctgtatgttgtggatcagcaagtatagtcaatcttctacttgagcaaaatgttgatgtatcttctcaagatctatctggacagacggccagagagtatgctgtttctagtcatcatcatgtgtaagtgtttacatgaaaaggctagttaatgctaaattgaggtttaaaataattataacaattgcatcttacatatcaggtgagatgtcatagtttggttcaggtagttttagattggcmgtgagttagtcccctgcatcagccagaaatcagacaaaaagcaagacaagttagaagtaccaatgggtgcaggattctttacctcaggacttttaagacctttatccttagagatcccaatattgttcatttcatccaagta

SEQ ID NO: 622706 - DNA, 655 bp, Homo sapiens
ccttagagatcccaatattgttcatttcatccaagtataacacctatgcatgggataaaaaagagtatcacatctttgatttttctgattagttatttgggtcttgaaatgtccagtttagcagaaagtcttgtactgtcttctggggactatctyctacatactccttgaatttttcaagaaccaaaggggttcactaaatccaaggaagacagtcccttttatcaagtcagaaggaggagaaaaaaaaggacattccaatcattctgttgtttccattgtttctgttgctgcattgttgccactcaaactggttctgctgcctggtaattgttgacctttgacaccaagatgcccttactgattcagatccctcaagtcttcatggggattcatacagtgactttgaagttacaacatttttttttagttcccttacctaggcttatatgctcagccgtgttcccaaagcaccagcaccctgctctggccgctgggcatcctgactttatccgcacacaaagtgagcaaattgacccttcctcctgtattcagaacctaatgtggaacccacatcttagccaagaattagctgagaccttcatggtaagagatcctttgaggccgttgttggtcttttctctagcagatatta

SEQ ID NO: 622707 - DNA, 655 bp, Homo sapiens
ccttagagatcccaatattgttcatttcatccaagtataacacctatgcatgggataaaaaagagtatcacatctttgatttttctgattagttatttgggtcttgaaatgtccagtttagcagaaagtcttgtactgtcttctggggactatcttctacatactccttgaatttttcaagaaccaaaggggttcactaaatccaaggaagacagtcccttttatcaagtcagaaggaggagaaaaaaaaggacattccaatcattctgttgtttccattgtttytgttgctgcattgttgccactcaaactggttctgctgcctggtaattgttgacctttgacaccaagatgcccttactgattcagatccctcaagtcttcatggggattcatacagtgactttgaagttacaacatttttttttagttcccttacctaggcttatatgctcagccgtgttcccaaagcaccagcaccctgctctggccgctgggcatcctgactttatccgcacacaaagtgagcaaattgacccttcctcctgtattcagaacctaatgtggaacccacatcttagccaagaattagctgagaccttcatggtaagagatcctttgaggccgttgttggtcttttctctagcagatatta

SEQ ID NO: 622708 - DNA, 655 bp, Homo sapiens
ccttagagatcccaatattgttcatttcatccaagtataacacctatgcatgggataaaaaagagtatcacatctttgatttttctgattagttatttgggtcttgaaatgtccagtttagcagaaagtcttgtactgtcttctggggactatcttctacatactccttgaatttttcaagaaccaaaggggttcactaaatccaaggaagacagtcccttttatcaagtcagaaggaggagaaaaaaaaggacattccaatcattctgttgtttccattgtttctgttgctgcattgttgccactcaaactggttctgctgcctggtaattgttgacctttgacaccaagatgcccttactgattcagatccctcaagtcttcatggggattcatacagtgactttgaagttacaacatttttttttagttcccttacctaggcttatatgctcagccgtgttcccaaagcaccagcaccctgctctggccgctgggcatcctgactttatccgcacacaaagtgagcaaattgacccttcctcctgtattcagaacctaatgtggaacccacatcttagccaagaatkagctgagaccttcatggtaagagatcctttgaggccgttgttggtcttttctctagcagatatta

SEQ ID NO: 622709 - DNA, 292 bp, Homo sapiens
gtgggcttgttctaaagggtcagaggggttcaaataatgtggcagaaagagatcagtgtttgtttcttcttctttgctaccagatctatactgtgaggcacctttatatcctgtgtagaaccttaggcagtagaaagtcccatatgagccttccccaagcagtggctcccagctgtggttggccccttgagtgatctgatttacatgataatgaaaatcgtccaagctacttccatctctagctcaagattttaaaatattwtcaaattgtacctcacaggaagccattgaa

SEQ ID NO: 622710 - DNA, 520 bp, Homo sapiens
cctaaaattggaacaatacagagaaagttagcatggcttctgcataaggaggcagcacaactctttgaggcattccatattttgtgcagtcactggaagatcatttcactatctgctgactagctctaaggaaacagtgtgaatcaaagcaaaatgggtgccaccaaaatatcgaaatgtgatttgtgctgcaaaaatagtcatggaagatggtctgtgagatgatttagagctgaataatgtgttcggtgcaaaatatattaagtatgtaygtcaaaaattagagaatgtcaatttgcagcttcttcatgaaaactgaaaaaaaataaaagtagagttttggtctcccatgtcagctggaattgaacatcaatataaagcattatcctaacaaacatctgctggctcagagtttgagtctgtagagaaggatcattgctccaagccaggtcttaacatccattggtttttctgcccttagcacaacaaattggtcaactccgtaatagtggacaatcac

SEQ ID NO: 622711 - DNA, 464 bp, Homo sapiens
cccagctactcaggaggctgaaatagaaggattgcttaagcccagcaggcagaggttgcagtgagctatgattgtgccactgcactcttgtctgggcaacagagtgagattctttctcaaaacaactacagcagcaaatagcagagagacaactgaataactatctgggtaaaagcaaagtttgatccatatctcacacagttcaccaggatgaattccagatgaatcaaagattgtagtgtaaaaaatgaaaccactgataggggagttaagaagacattattcaggcagatagtgagggtatgggagtcctcagtaaggttttccttttaatgaaaaacagccctaaaatcattttcttttctaacaaagagcrgcctggaaaattgagctgcagacatagacaagtaagctggaagcttgcacaggtgaatgctggcagttgtgccaatagggaaaaggta

SEQ ID NO: 622712 - DNA, 596 bp, Homo sapiens
atctatatgaaacagacacagctgtttttcttagtattgcttaaaatagccatgtattgagaagaactcatataaagatgttatraacaaatttcagtgcatccataggatggaataatatgtaaccattgagggtgtcagtagatacagagatatgtcggcatgcaaagatgtactttgctatatcaagtgagaaaaaatcagtttgttatacatatacacaaacagaatctgctcttgtgttagctggaaatatgtggaaaatataatcaaacttatttctggggatttgtaagtgaagtttttccctttctcttatctgtgatttctgcaatgaacatctgaaaagttttagttaagtttcattagtaatgaaataatccttgggaagagaaggaatatgctacttgcatagatacaaataatttctcacattctgttatttatttttatacctgtggatggctatcttctgtgaacttttaccctcttcagaagtagagggcttctgtttacctcttctggtagattttattgtatatacattttattatatatagattaatgtgtaaatagtatggattaattattttagt

SEQ ID NO: 622713 - DNA, 596 bp, Homo sapiens
atctatatgaaacagacacagctgtttttcttagtattgcttaaaatagccatgtattgagaagaactcatataaagatgttataaacaaatttyagtgcatccataggatggaataatatgtaaccattgagggtgtcagtagatacagagatatgtcggcatgcaaagatgtactttgctatatcaagtgagaaaaaatcagtttgttatacatatacacaaacagaatctgctcttgtgttagctggaaatatgtggaaaatataatcaaacttatttctggggatttgtaagtgaagtttttccctttctcttatctgtgatttctgcaatgaacatctgaaaagttttagttaagtttcattagtaatgaaataatccttgggaagagaaggaatatgctacttgcatagatacaaataatttctcacattctgttatttatttttatacctgtggatggctatcttctgtgaacttttaccctcttcagaagtagagggcttctgtttacctcttctggtagattttattgtatatacattttattatatatagattaatgtgtaaatagtatggattaattattttagt

SEQ ID NO: 622714 - DNA, 596 bp, Homo sapiens
atctatatgaaacagacacagctgtttttcttagtattgcttaaaatagccatgtattgagaagaactcatataaagatgttataaacaaatttcagtgcatccataggatggaataatatgtaaccattgagggtgtcagtagatacagagatatgtcggcatgcaaagatgtactttgctatatcaagtgagaaaaaatcagtttgttatacatatacacaaacagaatctgctcttgtgttagctggaaatatgtggaaaatataatcaaacttatttctggggatttgtaagtgaagtttttccctttctcttatctgtgatttctgcaatgaacatctgaaaagttttagttaagtttcattagtaatgaaataatmcttgggaagagaaggaatatgctacttgcatagatacaaataatttctcacattctgttatttatttttatacctgtggatggctatcttctgtgaacttttaccctcttcagaagtagagggcttctgtttacctcttctggtagattttattgtatatacattttattatatatagattaatgtgtaaatagtatggattaattattttagt

SEQ ID NO: 622715 - DNA, 596 bp, Homo sapiens
atctatatgaaacagacacagctgtttttcttagtattgcttaaaatagccatgtattgagaagaactcatataaagatgttataaacaaatttcagtgcatccataggatggaataatatgtaaccattgagggtgtcagtagatacagagatatgtcggcatgcaaagatgtactttgctatatcaagtgagaaaaaatcagtttgttatacatatacacaaacagaatctgctcttgtgttagctggaaatatgtggaaaatataatcaaacttatttctggggatttgtaagtgaagtttttccctttctcttatctgtgatttctgcaatgaacatctgaaaagttttagttaagtttcattagtaatgaaataatccttgggaagagaaggaatatgctacttgcatagatacaaataatttctcacattctrttatttatttttatacctgtggatggctatcttctgtgaacttttaccctcttcagaagtagagggcttctgtttacctcttctggtagattttattgtatatacattttattatatatagattaatgtgtaaatagtatggattaattattttagt

SEQ ID NO: 622716 - DNA, 573 bp, Homo sapiens
cacaaaaaggctaagcaacagctaggaagtgacagagcttcaagtaggattccagcccaagttgaatgtcatccaagagctatgctctttctattcaaataggctgctctttcattaatacagtgastaatgagaggtaataagtagtgtgctttcttcaaaggaaaattgagtttgttttgaaggcagagtaataggctattcagtgtttgcaactacatgaatcattaatgtggcattagctagtgaactacaatttcctcaagtcttctcactctcataggactgctctacatttggcctctgccaatggaaattcagaagtagtacaactcctgctggacagacgatgtcaacttaatgtccttgacaacaaaaaaaggacagctctgataaaggtatgcagtagtcaactatatcagcgtgagatgggtttgatttcaatagatagcataaaaatgagttttctcatttaaatataactagttggtgaaagctgtggaatgttattttgaattcctaggacttgtaatttgtttttggtctaatactgacaggccatacaatgccagg

SEQ ID NO: 622717 - DNA, 573 bp, Homo sapiens
cacaaaaaggctaagcaacagctaggaagtgacagagcttcaagtaggattccagcccaagttgaatgtcatccaagagctatgctctttctattcaaataggctgctctttcattaatacagtgagtaatgagaggtaataagtagtgtgctttcttcaaaggaaaattgagtttgttttgaaggcagagtaataggctattcagtgtttgcaactacatgaatcattaatgtggcattagctagtgmactacaatttcctcaagtcttctcactctcataggactgctctacatttggcctctgccaatggaaattcagaagtagtacaactcctgctggacagacgatgtcaacttaatgtccttgacaacaaaaaaaggacagctctgataaaggtatgcagtagtcaactatatcagcgtgagatgggtttgatttcaatagatagcataaaaatgagttttctcatttaaatataactagttggtgaaagctgtggaatgttattttgaattcctaggacttgtaatttgtttttggtctaatactgacaggccatacaatgccagg

SEQ ID NO: 622718 - DNA, 573 bp, Homo sapiens
cacaaaaaggctaagcaacagctaggaagtgacagagcttcaagtaggattccagcccaagttgaatgtcatccaagagctatgctctttctattcaaataggctgctctttcattaatacagtgagtaatgagaggtaataagtagtgtgctttcttcaaaggaaaattgagtttgttttgaaggcagagtaataggctattcagtgtttgcaactacatgaatcattaatgtggcattagctagtgaactacaatttcctsaagtcttctcactctcataggactgctctacatttggcctctgccaatggaaattcagaagtagtacaactcctgctggacagacgatgtcaacttaatgtccttgacaacaaaaaaaggacagctctgataaaggtatgcagtagtcaactatatcagcgtgagatgggtttgatttcaatagatagcataaaaatgagttttctcatttaaatataactagttggtgaaagctgtggaatgttattttgaattcctaggacttgtaatttgtttttggtctaatactgacaggccatacaatgccagg

SEQ ID NO: 622719 - DNA, 573 bp, Homo sapiens
cacaaaaaggctaagcaacagctaggaagtgacagagcttcaagtaggattccagcccaagttgaatgtcatccaagagctatgctctttctattcaaataggctgctctttcattaatacagtgagtaatgagaggtaataagtagtgtgctttcttcaaaggaaaattgagtttgttttgaaggcagagtaataggctattcagtgtttgcaactacatgaatcattaatgtggcattagctagtgaactacaatttcctcaagtcttctcactctcataggactgctctacatttggcctctgccaatggaaattcagaagtagtacaactcctgctggacagacgatgtcaacttaaygtccttgacaacaaaaaaaggacagctctgataaaggtatgcagtagtcaactatatcagcgtgagatgggtttgatttcaatagatagcataaaaatgagttttctcatttaaatataactagttggtgaaagctgtggaatgttattttgaattcctaggacttgtaatttgtttttggtctaatactgacaggccatacaatgccagg

SEQ ID NO: 622720 - DNA, 617 bp, Homo sapiens
tattgttatttttgttgttttgtggtaagtaattacagctgcattttagttataggattgggaccatcagtgaaaaagaatagttaaaatacctgttactgggataccataaaacacctatttagtaaatttrgcatggaatgtgcttcaccaaaaaaaaatgaagccaacacctctgaggttgtgtcgtgctgatggagcccatcagggcagttgactgggtggaggtgcctctgctaccatggcaagatctgactgcttcagcctcttgagcctcctcttagatgtgcagccctcacccactgccctgctccagccacactgcctcctgtcagttggaacagtctaagctctggctttcatcaggtgcctgttgatatctttctcctggcttttcacaggactcatctccttagttctcatttcaagtgtcatctcctcagaaaagcttttttataactattcctctctaaaggaagacgttctttgtatttttaaacctgttctctgctgggttttttttttttctgactgcacacgctaatctgtaatgaccttatttatttggttgtgtaatataacctaatgcccctgagggcctttgtaccccttctgcc

SEQ ID NO: 622721 - DNA, 556 bp, Homo sapiens
ttccttcctctgtttctttcattctttaaaaatgtgttactaatttatattttcagaccagaaggcaaccttattttctttaccagtcttgaatccagactggcacagcactgttatatttgggaaaatacaaatggctgtggaattcttggggaagaygtagacaagccttgacgttgtacaattccttttcactatgcacatccctgcttagcctgggcagagcctctgtacatgaggacgaacatgaatacaagatgaacaccaactgacgtactgacctacagacatctcaacattacagccgctgttatgtctgtgaaagagttcacgtgggcttccacttctttactacatgaactcccaaatacccactttcaactatttattcttatcctcatttatagaataaagctgacccaaaacaccaccactaagggagaatgactttgcaactagtggcaagattaaataatgttggaactttgtagcccaagttagcactgaagaaaagatagttcagacaataaacgtatcagtgccatgtgacccttgt

SEQ ID NO: 622722 - DNA, 600 bp, Homo sapiens
cagcagaaagaaggagaaagataatcagaatgactcggaaattttcacttggtatcaaaacagaatgtggtaaatttaatctgtcatgaggaaactggcctaccagacgccagcaaagggtaattaaagagtcactctccaaagaaaactgtttttgtaagtggaaatcaatgggtatattcacaccaccaccaccttctgccactgaatttgtggctttgcatttcacctgaaggggctgattaaatcactgacacttggagcagaacagggacttgtaatctttacactgtgctgcactaatcgggccagcaactgtgcaagggacagccagacctgaactgctgtactgacagtattaagtggagtagaaagagtcgtattcaatttcagaagctactctggtgccgagcactggttatgtcagtctaaaagagaaaagacartatgtccaggatacttgcctaaggtcagggctttaatcactggaagaaaagatgatttgctcctcctcaccgtgccaactcctgctgagagcacttttttccccctttttcctagctcctactcaaaatatggactagaaagaacggagaaagg

SEQ ID NO: 622723 - DNA, 596 bp, Homo sapiens
aactggatacaaaagtcaagggcaaaggagaaggaaagaaggaaaagtgaaatacaaatttcatgcagtgatcaatgctactatgaatatgtacagggaactctatggggtggaaacatatacagaatgacaggaattaaaaaccaactagagcagtacctaagttgacaatttcacttagatttggagataacagatttttgctttatttttaattctgagttttatctttacttctttacttactgatttgtccagcttcactcctgtcatctayatttcatttcttgattatccacctttgattttcttacatctacatctagatttacatctgtaagggaacaatctagcccaaatttgaccaggttcaagcctcacctactgttgattttgagctgccttagctccattcacaactgcaatcagtttgtgaatcactgttagatgaggggaaatgaatgaaactactgagagaaatttataatcctggaggagaaacattccagaggtggagaaaggataatgagtttaggtttatacctgtaaatagttatagtataatttagatgtcacttgaattccttgccatttac

SEQ ID NO: 622724 - DNA, 596 bp, Homo sapiens
aactggatacaaaagtcaagggcaaaggagaaggaaagaaggaaaagtgaaatacaaatttcatgcagtgatcaatgctactatgaatatgtacagggaactctatggggtggaaacatatacagaatgacaggaattaaaaaccaactagagcagtacctaagttgacaatttcacttagatttggagataacagatttttgctttatttttaattctgagttttatctttacttctttacttactgatttgtccagcttcactcctgtcatctatatttcatttcttgattatccacctttgattttcttacatctacatctagatttacatctgtaagggaacaatctagcccaaatttgaccaggttcaagcctcacctactgttgattttgagctgccttagctccattcacaaytgcaatcagtttgtgaatcactgttagatgaggggaaatgaatgaaactactgagagaaatttataatcctggaggagaaacattccagaggtggagaaaggataatgagtttaggtttatacctgtaaatagttatagtataatttagatgtcacttgaattccttgccatttac

SEQ ID NO: 622725 - DNA, 580 bp, Homo sapiens
tgataaactggagccagtaggacaagactggacttcttagtagtgcaagactagactagactccatgttctgagaaaggcaatctgatcttagccagtctaatcaaggattaaatctctaaaaatccctctaattggggactggtttatgtcagtctatgctggaaaacatcattccttctaatggtaaaaagatgaataagcaattctagagcagtggttttgtaaacactcaaggggttcaccttgcccactgcctagacagagctgatttatcaagaaaggggaactacaatggagaaagagtttttcakgcagagccagctgtgcagaagaccagagttttattattattcaaatcattctccctgaacatttggggatcagagttttaaagataattcggtggataggtgcttgggaagtgggtagcgtcaattgttgatggaatcatagggggtcaaagtaaatttttgttgctgttggtgtcttctgttcctgggtgggatggcagaactggttgagccagattaccagtttgggtggtgtcagctgatccactgaatgcaaggtctgctaaa

SEQ ID NO: 622726 - DNA, 562 bp, Homo sapiens
gacacacacacaatatggatgactataaagacgtactaactgaatgaaagaaactttacacaaaagtgtacttacttagtgtatgattccatttacatgaagtcctaaaacaagcaaaagtaatttatgataagaaaaaaaattaaaatagcatttacctttgggacaggagtatatataagtgaggatttactgrgaaaaagaattttactggagtcagagagtgtccagatttctcaaaactcattggatactacattcaagatttgtgactttcattacaaacaaatttattccaggaaaatagggaacactaacaaatttttaactctatttgatgttatgcatactgaagtatttgggagggtgatagtgatgtcttcaatttactttgaaatgtatcgtaaaataagatgaactgagagagggatggatagatggatgagtattcactgtaagttttctgaacatttgaaaatttttcatgataaaatgtaggagagaaaagaaaagcagtaaaagagcattagccctactagaaatgaaaacatattataacact

SEQ ID NO: 622727 - DNA, 355 bp, Homo sapiens
agaaatgtatgactgggcttgtctagatgaggctaaatttgcctacattttttatcatgttggggcagaaagagcaagaattagtgggtagaaactgtaagtccagtaacttgacttgcgagtttactgtggtcccctgaatgtcctgtgctctgtycagttggattaacagttactcctcctttggattaggggaagggaacagctaaagagtgcagaagcacaagggtggggtgaagtttaagggggtgggtggaaaaagtagagatactggtttcccaacactaggtaaaatttttttttttttttgaagaaggagtctcactctgttgcccgggcttgagtgcagtggtgc

SEQ ID NO: 622728 - DNA, 382 bp, Homo sapiens
actaaccaaaacaactttgaaaaagaacagagttggaggaccaacattatctgattttaaggtgacttataaagtgacagtaatcaagatggtatagtaatggcatcaaaatagacaaatcaatagaataaaagttcagaaatagattcatacatatayggacaactgatttttgatgagacaattcagtgaagaaagaatagtcttttcaacaaatggtgctgcaacaataaaatatttgcatgaaaaaaatgctttgatccacatctcataccatatgtaaaagtgaactcaaaatacataatagacctaaatgtaaagcctaaaagtataaaacttctagaagaaaaccttggattatgcacagatttctcagattggt

SEQ ID NO: 622729 - DNA, 644 bp, Homo sapiens
gcacctaatatgtgccagacatagtagtaggaatggggataaagcaatgaacaaaagagacaaaaatctctgctttgtggaatttatattgtagaagagaaagacaacaagcaagcaggaaaacatcgtacagtaatatgtactctgcaaataactcatgtaggttgaggcagtcrtgtctgagtggcttttctacagaggtgactttaagctaagctgtgaccaataagaaggaatcagttctgtgaggacaggggcaagtgcattctaggcagagccaataggtaataccacattcctaaggcaagaaagggttctgtgtgttcaagtaactgctcccatgtggctgaggcagagtgaggggtgagtggtggagagagggccagtgagttgggcaggggcaggagccaggccacgcagggcctgtaaaaccacagagaaatggaacgctctcttccaagtgtgtgaaagcacttggaaagttacatgcagagaagtagttggatctgattcatcctgtaaaaagataaaaagatggctgatctgtgtacaaagaagcatagggagtaagaatacaaaagaagggggcaagaagaccaattaggagacccttacaatgtcgtgttttgtctttagatggttct

SEQ ID NO: 622730 - DNA, 433 bp, Homo sapiens
gtctgtccgttgttgaaagtgtagtgttgaagcccactatgattactgtattgcaatctctcctttagagctaataatctttgctttatatatttgctctggtattggatatatatatatttacaatagttacagcttcttgttgactcartccctttatcattatataatgatctttccctcctttcacagtttttgacttaaagtgtaatttatctgatataagtatggctactcttgttcacttttggtttccatttgcatggaatctttttccatccttttattttcagtatatgtttgcctttaatggtgaggttcatctcttatagttgggtcttgttttttatccattcagtcactctatatcttttaactggagaatttaatccatttacattcaaggttgttattgataggtaaggacttactc

SEQ ID NO: 622731 - DNA, 268 bp, Homo sapiens
taccacaatttgtttatctgttcacaagccatgtccggtgactttgagctgtttccagtttttagctattatgaatgaatgaagccactatgaacattcatgtatttttaggaaattcagcagtctggctggtgataaacaggctgcccctctgagggggggaggagtcaagtagttgagccaagttgaagagcaagcaaccagttttgtaaaaagcatctaatagccaaaaaaaaaaaaaaaaaawttgttttaatgcctatactaa

SEQ ID NO: 622732 - DNA, 559 bp, Homo sapiens
ctaggttgattccacatcttgatattgtgaatagtgtggcagtaaacaagacacgtgcaagtatctttttggtagaataattcgttttcccctgggtatatcccagtaatgggattgctgggttgaatactagttctatctttagttctttgagaaatcttcaaactgctttccacagcagctaaactaatttacattcccaccagcagtgtataaatgttccctcttctctgctggcttaccattctgatttgtcctatagacaaacccatctgcttctaaaggttaatggagaatcagaaaaattaaaatttcaattggcaaaacaaatgaaagtttctgtatgatacatagwtatccaaatatgtgatcgttttatatgtaaaatatgaactccaacaagtgattgcttttgtttcttagatgggtagcctatgaaaatcctgacttcacaggagaacagtatatactggataaaggattttataccagttttgaggactggggaggcaaaaattgtaagatctcttctgttcaacctatatgtttggtaaggagt

SEQ ID NO: 622733 - DNA, 591 bp, Homo sapiens
gggattacaggtatgagccaccatgcccgcccctagctgtaaattttctgcaaattgtgtacattcttgggaattgttacaaagtaaaaaaaatcaaattgattttagatgttatgaaaaaaattaataaatttaataaataaagttagcataatatttttttkgttaaatatctgctaatctgtatattttattttcaaattttactgtcactatcaatattaaagtttaaatacatttgcaagcctttgaaattttcacaggctcccatctctgtgcctgtaggtcaaatgaataaaatgtccctgcccttaactctgaaatcttttcaaaggactaccctagttcctttgcactagcaccaactttcttgaacatgcagccagaatctgctcatttttcttcaatttaacttttgcatcctaacttctaatctctttattggcgttctctcttcaagctcatgaataaactcctaattgccaaatccaagagttctttcagtaacgctttattttatgcactattaggctcacttcacacttcttcttctattcctaattctcatgtttcactaatcgtgcactaccg

SEQ ID NO: 622734 - DNA, 591 bp, Homo sapiens
gggattacaggtatgagccaccatgcccgcccctagctgtaaattttctgcaaattgtgtacattcttgggaattgttacaaagtaaaaaaaatcaaattgattttagatgttatgaaaaaaattaataaatttaataaataaagttagcataatattttttttgttaaatatctgctaatctgtatattttattttcaaattttactgtcactatcaatattaaagtttaaatacatttgcaagcctttgaaattttcacaggctcccatctctgtgcctrtaggtcaaatgaataaaatgtccctgcccttaactctgaaatcttttcaaaggactaccctagttcctttgcactagcaccaactttcttgaacatgcagccagaatctgctcatttttcttcaatttaacttttgcatcctaacttctaatctctttattggcgttctctcttcaagctcatgaataaactcctaattgccaaatccaagagttctttcagtaacgctttattttatgcactattaggctcacttcacacttcttcttctattcctaattctcatgtttcactaatcgtgcactaccg

SEQ ID NO: 622735 - DNA, 645 bp, Homo sapiens
gaaggaaagacaattgttctccttggatactccctctggtctctatgtagacagagaacgttctcctccagcctctgttgatctctgaaggtctttaattcaaaatgcacgttacatcagggaccactattttggggtraagttctctgcactccttcagtttcacatcttctgccagttaagccaccctctgtctctctcctatagtagcacttgtgattccatttaaggtacacctggaaaatcagagctattgctccaccacagaatccttaaacacattcccaaagaccctttttctacatcgaggaacaactacacattccagagattaggaccagatacctgtgtaagctattatttagctcaccactacatttgatatatacttgtccctggcccccaatcattagattataaagaagggctgtccaattgtcatctgtcttcactgtggttccaaccccagagctccattgttattaacacctgtataatcctgagccccaacatggtttcatccacccacagcagggcagacctcatcacatgggccatggggcattgacctactgtgtttatcggtgatcagttctcttcccatgatctggcctaaagtttctggaaaacagtttctatgcataa

SEQ ID NO: 622736 - DNA, 645 bp, Homo sapiens
gaaggaaagacaattgttctccttggatactccctctggtctctatgtagacagagaacgttctcctccagcctctgttgatctctgaaggtctttaattcaaaatgcacgttacatcagggaccactattttggggtgaagttctctgcactccttcagtttcacatcttctgccrgttaagccaccctctgtctctctcctatagtagcacttgtgattccatttaaggtacacctggaaaatcagagctattgctccaccacagaatccttaaacacattcccaaagaccctttttctacatcgaggaacaactacacattccagagattaggaccagatacctgtgtaagctattatttagctcaccactacatttgatatatacttgtccctggcccccaatcattagattataaagaagggctgtccaattgtcatctgtcttcactgtggttccaaccccagagctccattgttattaacacctgtataatcctgagccccaacatggtttcatccacccacagcagggcagacctcatcacatgggccatggggcattgacctactgtgtttatcggtgatcagttctcttcccatgatctggcctaaagtttctggaaaacagtttctatgcataa

SEQ ID NO: 622737 - DNA, 645 bp, Homo sapiens
gaaggaaagacaattgttctccttggatactccctctggtctctatgtagacagagaacgttctcctccagcctctgttgatctctgaaggtctttaattcaaaatgcacgttacatcagggaccactattttggggtgaagttctctgcactccttcagtttcacatcttctgccagttaagccaccctctgtctctctcctatagtagcacttgtgattccatttaaggtacacctggaaaatcagagctattgctccaccacagaatccttaarcacattcccaaagaccctttttctacatcgaggaacaactacacattccagagattaggaccagatacctgtgtaagctattatttagctcaccactacatttgatatatacttgtccctggcccccaatcattagattataaagaagggctgtccaattgtcatctgtcttcactgtggttccaaccccagagctccattgttattaacacctgtataatcctgagccccaacatggtttcatccacccacagcagggcagacctcatcacatgggccatggggcattgacctactgtgtttatcggtgatcagttctcttcccatgatctggcctaaagtttctggaaaacagtttctatgcataa

SEQ ID NO: 622738 - DNA, 622 bp, Homo sapiens
tttagaccagtttaatttataatgtaattattgatgtgataaaagttgtctgtcaccatkctgtttgatttctgttagtcccagatcttctttgctctgttttgttcttttattgcttccttcagactagtttagtaatttttatgatttagttttatatatatatatataggtataatgttttttagttattgatctggttgtatatttcttcatgatttagtcatatctttttgtggtataagtttatttggctattaggtataactctttgctttgctgtcttagtggttgttttaggatttatagtgtatggatttacctcatcacaactcaccttcaagtaatattatatcatatcatagatggtataagaaattccaatcatatattttcatttcttcactttcagccagataccagcctggatctgtgggattgtagcatttgttaagtttagaatatatttagccaatttttcttcagatgttttttctgtctctccttctacctctttgtggacttacatattacctgctgggagtttgctcatagttctctagtatctcaaatttgtgaatcttttctttcatgatggcaaatcaatctatgctcatatcta

SEQ ID NO: 622739 - DNA, 622 bp, Homo sapiens
tttagaccagtttaatttataatgtaattattgatgtgataaaagttgtctgtcaccatgctgtttgatttctgttagtcccagatcttctttgctctgttttgttcttttattgcttccttcagactagtttagtaatttttatgatttagttttatatatatatatatakgtataatgttttttagttattgatctggttgtatatttcttcatgatttagtcatatctttttgtggtataagtttatttggctattaggtataactctttgctttgctgtcttagtggttgttttaggatttatagtgtatggatttacctcatcacaactcaccttcaagtaatattatatcatatcatagatggtataagaaattccaatcatatattttcatttcttcactttcagccagataccagcctggatctgtgggattgtagcatttgttaagtttagaatatatttagccaatttttcttcagatgttttttctgtctctccttctacctctttgtggacttacatattacctgctgggagtttgctcatagttctctagtatctcaaatttgtgaatcttttctttcatgatggcaaatcaatctatgctcatatcta

SEQ ID NO: 622740 - DNA, 622 bp, Homo sapiens
tttagaccagtttaatttataatgtaattattgatgtgataaaagttgtctgtcaccatgctgtttgatttctgttagtcccagatcttctttgctctgttttgttcttttattgcttccttcagactagtttagtaatttttatgatttagttttatatatatatatataggtataatgttttttagttattgatctggttgtatatttcttcatgatttagtcatatctttttgtggtataagtttatttggctattaggtataactctttgctttgctgtcttagtggttgttttaggatttatagtgtatggatttacctcatcacaactcaccttcaagtaatattatatcatatcatagatggtataagaaattccaatcatatattttcatttcttcactttcagccagataccagcctggatctgtgggattgtagcatttgttaagtttagaatatatttagccaatttttcytcagatgttttttctgtctctccttctacctctttgtggacttacatattacctgctgggagtttgctcatagttctctagtatctcaaatttgtgaatcttttctttcatgatggcaaatcaatctatgctcatatcta

SEQ ID NO: 622741 - DNA, 620 bp, Homo sapiens
cccatgacttctttacagtcattgttaaaaactatgaaatgttgatacaaatagttctcagggtttgggaaggtgtgtatatgtatatggcattttgtaagggcttgccacgtaataagcctctaactgatgtcaaatattgctcttgaatagcgcagatcctgtcctgatgaagattacatcctaaaagagagtgtgaattgttcatatatagtatgaagttataataaattatcttaatatatttgaatacccagaaaaataattccctgaagttgcagcctgatattggaaattcataaaattccctcttctgtagatacaattctccccaaaccagcctccttctgggtagcttgtccatgttctctggcccttaggtgcacagatggctgggcaggacagggactggccagcygctgtgaatggttgtcagcatggcacttcggcagcaatcctttatttaatagctaaccctgggtaactaaaaggctgtaggctgccagcactgagctcactgaaagcttcaattggtacttagtctaaatagtgcattaaagggccacagattccacatggatgtgcaggaaatctggcctctgccaaaagagcctgcaatg

SEQ ID NO: 622742 - DNA, 583 bp, Homo sapiens
ttaaaaatagtgccttccagtcaggcgcagtgactcatgcctgtaatctcagcactttgggaggccaagcatgtggatcacctgaggccaggagtttgagaccagcctggccaacatggtgaaactccatctgtactaaaaatacaaaaaaatagctagaatggtggtgcgcgcctgtaaccccagctatttgggaggctgagggggaagaatcacttgaatccgggaggcggaggttgtagtgagatgagatcacaccactgcactccagcctgagccacagagcaagacactgtctaacaacaacaacaaatagcgccttccttattagatcgtggtgaggattaaayaatattgactgttcagcagtgtcaggtatgctgcaagtgtccgacaaacatcaccctcattgtcactgccttccccacactgggactcttccctccacctaggacactggggagcacaggaacttcaaacagggacacccttaacaagcacagagttcagccctgtcaatttacagacatggtgacagaagcccagaaaaggttggctcagatgtcctgtgtcccagacaaaa

SEQ ID NO: 622743 - DNA, 232 bp, Homo sapiens
tgaaatagaagacttcttttatatttacrtatttacccagtagaattaactgagatttggtggagaagtcctggatgtagactcagaagacttggagaaaatcctacaacttgattatatttttaatcttttcctttcagaattgtgataactaaaagtgcttgttacaatgtctcaacttatcaaacattcataaatataattcttacaattaactatattttttagaaac

SEQ ID NO: 622744 - DNA, 232 bp, Homo sapiens
tgaaatagaagacttcttttatatttacgtatttacccagtagaattaactgagatttggtggagaagtcctggatgtagactcagaagacttggagaaaatcctacaacttgattatatttttaatcttttcctttcagaattgtgataactaaaagtgcttgttacaatgtctcaacttatcaaacattcataaatataattctyacaattaactatattttttagaaac

SEQ ID NO: 622745 - DNA, 632 bp, Homo sapiens
ccacccaggctggagtgcagtggtgtgatgtcagctcactgcaacctctgcttcctggattcaagcaattctcctgcctcagcctcaccagtagctgggattgcaggtgtgcgccaccacacttggcaaattttggtatttttaatagggagtttcttcatgttggccaggctggtcttgaactgctgacctcaggtgatctgcctgccttggcctcccaaagtgctaggattacaggtgcgagccactgcacccagccagtgcaagaatttcataacctgccagwctgagcttcataaagaaaggaaaataaggtatttccagacaagaaaatgctaagggaagtcgttacctccagactgactctaaaagaaatgtttaaaggagtttggctcgtgaaaataaaagaatgatacttgctaccataaaagcatacatgaatacaaaatgtacagaacctataaagcaattaaacaattgagactacaaggtaactagctaacactataaaaggaagaaaacctaacacatcaatattaagcttgattgtaaatggctgaaatgctccactgaatagacacaaagtggcaaactggataaaaaaaagaagacacttctgctgcctttgagag

SEQ ID NO: 622746 - DNA, 411 bp, Homo sapiens
ttcttcgaactggatgacacaacctatcaagacctctgggatacagcaaaggcagtgctaagaggaaagtttgtagccctaaacactgatgtcaaaaagtctgaaagagcacaaacagacaatctaagttcacatctcagggaaccagagaagcaggaacaagccaaacccaatcccagcaaacaaaggaaataaccaagrtcagagcagaactaaatgaaattgacacaagaacaacaacaacaaatacaaaacataaataaagcaaaaagttggttatttgaaaagataaataaaatcgatagaccattagcaagattaaccaagaaaagaagagagaaaatccaaataacctcactaagaaatgaaacaggggatattacaactgacaccactgaaatattaaaggtt

SEQ ID NO: 622747 - DNA, 411 bp, Homo sapiens
ttcttcgaactggatgacacaacctatcaagacctctgggatacagcaaaggcagtgctaagaggaaagtttgtagccctaaacactgatgtcaaaaagtctgaaagagcacaaacagacaatctaagttcacatctcagggaaccagagaagcaggaacaagccaaacccaatcccagcaaacaaaggaaataaccaagatcagagcagaactaaatgaaattgacacaagaacaacaacaacaaatacaaaacataaataaarcaaaaagttggttatttgaaaagataaataaaatcgatagaccattagcaagattaaccaagaaaagaagagagaaaatccaaataacctcactaagaaatgaaacaggggatattacaactgacaccactgaaatattaaaggtt

SEQ ID NO: 622748 - DNA, 411 bp, Homo sapiens
ttcttcgaactggatgacacaacctatcaagacctctgggatacagcaaaggcagtgctaagaggaaagtttgtagccctaaacactgatgtcaaaaagtctgaaagagcacaaacagacaatctaagttcacatctcagggaaccagagaagcaggaacaagccaaacccaatcccagcaaacaaaggaaataaccaagatcagagcagaactaaatgaaattgacacaagaacaacaacaacaaatacaaaacataaataaagcaaaaagttggttatttgaaaagataaataaaatygatagaccattagcaagattaaccaagaaaagaagagagaaaatccaaataacctcactaagaaatgaaacaggggatattacaactgacaccactgaaatattaaaggtt

SEQ ID NO: 622749 - DNA, 641 bp, Homo sapiens
ttatgaaaacatcattaattgttaaggttgatgttcatacaaattgtattacacttaaaaacaatttgttccttagaattactcactttgaaagggttttcaaataagtccagcgattgctaaggcctcatagccatgagttagtcacagccaaccacaagcaaaatcattaaaacctcttttaaacatactacagcaaataataataataattaacgtgaaatgtgggtgactttcagtatgtttgataaaatgtgggttgaaatctccaaaaggaagagcgttcagggtcttcgaaagtcttaggattactctagaaccagagtatagaatatgcactcatatttataaatcacttactctgtgccaggctcttctgaagcccttcccatgcattaactcacttaattggtgagacaattcttgaggtagacacaatcaccattcccattctacaggtgaggaaactgactaagcaagtaagtggcacagctagaatggaartcaatggcaccagggctcatgttctcagccaccttaccacatacaaagcttgccatgccgggtgtttccccaggagaaaacaagtgctggcaggttaagaagggagggaggtacatctccctaatgaggagtgcact

SEQ ID NO: 622750 - DNA, 569 bp, Homo sapiens
tatatggaaaattctccatgacagaccatgttttaggctatacaacaagccccaataaatttacagggattgaaatcatataacactatgttctcaagccactgcaataaaactaaaatcaataacaaaaggaaatctggtaaattttcaaatatatggaaattaagacatttttaaattgccaatgtgccaaagaagaaatcacagggaaattayaaaatagcttcagcagaatgaaaacaaaaacgtaacacaccagacattataggatgcaatgaaagcagcactcagagggacatttagagctgcaaaggcctatattaaaaacattagagattgtaaatcaataaactcatctttttgtctaaacaagtaagaaaagaagagaaaatggcatctaaaccaagcaaaaggaaggaaataattaagattagactatggataaacaaaataaaaaatgacgaaaaaagagaaaaaagtttctttgaaaatatcaccaaaattgactaacttctaagtaaaataatcaagaaaaaaagagttaaacattaaattactgaaatcagata

SEQ ID NO: 622751 - DNA, 508 bp, Homo sapiens
attgaaaaccgcttaaaatgctttttacaggcaagactgtattctgggtacactaggatgcacacaagtatgttttctaacctgcagtatctcatagtgatgcaagagctccaaaacgattatttaaataactaaatacaaaatcttctgaaatttaaaattttcaaatgtgatcaaagatctttgaacaatatgtttaaaaactgcaatttaaaaactctgaaattaaaatcttaccatatgcttattaagagtctctgcttccagaactggttttttacttggggtgaaacctgcattcttcatttagttgaagaatttaaagtatacttttaatgaaataacttagaaaacatcctcacatgccttaataatacagattctgagaaatagaatttacatttctaaatttctaarttatattcaaaattagagataaggtctcgctatgtgcccacactggtctcaaactcttgggctcaagcaatcctcctgcatcagcctcctt

SEQ ID NO: 622752 - DNA, 322 bp, Homo sapiens
ttcaacccttccctcatctactccccgccagtagtccccagtgtcagttgttgccatctttatgtccctaagtacccagtgtttagctcccacttataagtgaaaacatgcagtagtyagttttctgttcctgtgttaatttgcttaggataatggcctccggctgcatccatgttgtaattccttgatgatctatgatattgagcatcttttcatctgcttatttgccctttgtgtatctttagtgatgtgtccagattttgcccactttttaactaggttttttttcttattgttgtgttttcagtgttttttgtatatg

SEQ ID NO: 622753 - DNA, 322 bp, Homo sapiens
ttcaacccttccctcatctactccccgccagtagtccccagtgtcagttgttgccatctttatgtccctaagtacccagtgtttagctcccacttataagtgaaaacatgcagtagttagttttctgttcctgtgttaatttgcttaggataatggcctccggctgcatccatgttgyaattccttgatgatctatgatattgagcatcttttcatctgcttatttgccctttgtgtatctttagtgatgtgtccagattttgcccactttttaactaggttttttttcttattgttgtgttttcagtgttttttgtatatg

SEQ ID NO: 622754 - DNA, 589 bp, Homo sapiens
gttgggattgtggcaatcaaaggggtggaaagtgaattctatcttgcaatgaatgaggaaggaaaactctaygcaaaggtattgataattgatcgcttaggcttaatttttaaaactcatttttgtcgaaatatctcaccattctgaaaaggaaaaatggacttaatttatctccaactgtgtaatataatgattttattaaaacactttatactcaaacgttaagaaaaaatgttttctgtgtgactttggacaaatggcttggtctttggattttggtttcttcatctgtaaaatgagttgaattagctgacctctaaggatccttccagctctaaaattccatgtgcattttagatatttaaaatccaaaatttccatttgccagtattaaagctctttttgttaaagttcacccaatttgcacattgctgacatgaaaattcttgggaaaaaatcttgaaatgtttagttcattcatcaacatcaatctcacaatcatgggctttgaactgtaattattcacattgttcccacttcactacaatgcaaaatatgtaacagttcatcccactgtaataaaatataa

SEQ ID NO: 622755 - DNA, 589 bp, Homo sapiens
gttgggattgtggcaatcaaaggggtggaaagtgaattctatcttgcaatgaatgaggaaggaaaactctacgcaaaggtattgataattgatcgcttaggcttaatttttaaaactcatttttgtcraaatatctcaccattctgaaaaggaaaaatggacttaatttatctccaactgtgtaatataatgattttattaaaacactttatactcaaacgttaagaaaaaatgttttctgtgtgactttggacaaatggcttggtctttggattttggtttcttcatctgtaaaatgagttgaattagctgacctctaaggatccttccagctctaaaattccatgtgcattttagatatttaaaatccaaaatttccatttgccagtattaaagctctttttgttaaagttcacccaatttgcacattgctgacatgaaaattcttgggaaaaaatcttgaaatgtttagttcattcatcaacatcaatctcacaatcatgggctttgaactgtaattattcacattgttcccacttcactacaatgcaaaatatgtaacagttcatcccactgtaataaaatataa

SEQ ID NO: 622756 - DNA, 589 bp, Homo sapiens
gttgggattgtggcaatcaaaggggtggaaagtgaattctatcttgcaatgaatgaggaaggaaaactctacgcaaaggtattgataattgatcgcttaggcttaatttttaaaactcatttttgtcgaaatatctcaccattctgaaaaggaaaaatggacttaatttatctccaactgtgtaatwtaatgattttattaaaacactttatactcaaacgttaagaaaaaatgttttctgtgtgactttggacaaatggcttggtctttggattttggtttcttcatctgtaaaatgagttgaattagctgacctctaaggatccttccagctctaaaattccatgtgcattttagatatttaaaatccaaaatttccatttgccagtattaaagctctttttgttaaagttcacccaatttgcacattgctgacatgaaaattcttgggaaaaaatcttgaaatgtttagttcattcatcaacatcaatctcacaatcatgggctttgaactgtaattattcacattgttcccacttcactacaatgcaaaatatgtaacagttcatcccactgtaataaaatataa

SEQ ID NO: 622757 - DNA, 589 bp, Homo sapiens
gttgggattgtggcaatcaaaggggtggaaagtgaattctatcttgcaatgaatgaggaaggaaaactctacgcaaaggtattgataattgatcgcttaggcttaatttttaaaactcatttttgtcgaaatatctcaccattctgaaaaggaaaaatggacttaatttatctccaactgtgtaatataatgattttattaaaacactttatactcaaacgttaagaaaaaatgttttctgtgtgactttggacaaatggcttggtctttggattttggtttcttcatctgtaaaatgarttgaattagctgacctctaaggatccttccagctctaaaattccatgtgcattttagatatttaaaatccaaaatttccatttgccagtattaaagctctttttgttaaagttcacccaatttgcacattgctgacatgaaaattcttgggaaaaaatcttgaaatgtttagttcattcatcaacatcaatctcacaatcatgggctttgaactgtaattattcacattgttcccacttcactacaatgcaaaatatgtaacagttcatcccactgtaataaaatataa

SEQ ID NO: 622758 - DNA, 481 bp, Homo sapiens
tagttataccaaatttccagtggttaaagaatgagtgatrtgggaatagtaatatgaggcctgttacttagggggaaataggtcctaattttaaagaatagttgacatgaacttccaaaaagctacacatatttcataactagctgtgtattatgtggtgtttttatttcaaatttaagatacctttttatgcaaatatactacataagtatagctaacaaaccacattaggcctgctcaatctgagggttaaaaaaagttgtgtatgtttcaattctaacaaatattacctgcttactcttcgtttaattgagcctctctaaaaatcatttggaacatgtttgtttgtttgtttgtttgttttaacagaaagaatgcaatgaagattgtaacttcaaaggactaattctggaaaaccattacaacacatatgcctcagctaaatggacacacaatggaggggaaatgtttgttgccttaa

SEQ ID NO: 622759 - DNA, 481 bp, Homo sapiens
tagttataccaaatttccagtggttaaagaatgagtgatatgggaatagtaatatgaggcctgttacttagggggaaataggtcctaattttaaagaatagttgacatgaacttccaaaaagctacacatatttcataactagctgtgtattatgtggtgtttttatttcaaatttaagatacctttttatgcaaatatactacataagtatagctaayaaaccacattaggcctgctcaatctgagggttaaaaaaagttgtgtatgtttcaattctaacaaatattacctgcttactcttcgtttaattgagcctctctaaaaatcatttggaacatgtttgtttgtttgtttgtttgttttaacagaaagaatgcaatgaagattgtaacttcaaaggactaattctggaaaaccattacaacacatatgcctcagctaaatggacacacaatggaggggaaatgtttgttgccttaa

SEQ ID NO: 622760 - DNA, 481 bp, Homo sapiens
tagttataccaaatttccagtggttaaagaatgagtgatatgggaatagtaatatgaggcctgttacttagggggaaataggtcctaattttaaagaatagttgacatgaacttccaaaaagctacacatatttcataactagctgtgtattatgtggtgtttttatttcaaatttaagatacctttttatgcaaatatactacataagtatagctaacaaaccacattaggcctgctcaatctgagggttaaaaaaagttgtgtatgtttcaattctamcaaatattacctgcttactcttcgtttaattgagcctctctaaaaatcatttggaacatgtttgtttgtttgtttgtttgttttaacagaaagaatgcaatgaagattgtaacttcaaaggactaattctggaaaaccattacaacacatatgcctcagctaaatggacacacaatggaggggaaatgtttgttgccttaa

SEQ ID NO: 622761 - DNA, 481 bp, Homo sapiens
tagttataccaaatttccagtggttaaagaatgagtgatatgggaatagtaatatgaggcctgttacttagggggaaataggtcctaattttaaagaatagttgacatgaacttccaaaaagctacacatatttcataactagctgtgtattatgtggtgtttttatttcaaatttaagatacctttttatgcaaatatactacataagtatagctaacaaaccacattaggcctgctcaatctgagggttaaaaaaagttgtgtatgtttcaattctaacaaatattacctgcttactcttcgtttaattgagcctctctaaaaatcatttggaacatgtttgtttgtttgtttgtttgttttaacagaaagaatgcaatgaagattgtaacttcaaagractaattctggaaaaccattacaacacatatgcctcagctaaatggacacacaatggaggggaaatgtttgttgccttaa

SEQ ID NO: 622762 - DNA, 499 bp, Homo sapiens
aaacctgcagctaacatactgaatgaggaaaagctaaaagtctttcaagaattggaacaagacaaagatgcccactttcaccactcctattcaacatagcactggaagtcctagccagagcaatcaggcaagagaaacagaaggcttccaaactggaaatgaggaagtcaaactgtccatctttgcagatgacatgttcttacatagagaaaaacctaaagactccmccaaaaaaaaaaaaaaaaaaaaaccttagaactaatagacaaattcagtaaagttgcaggatacaaaacaaacacaaaaatcagtagtgtttctatacaccaataatgaactagctaaagaagaaatcaagaagtcaatcccatttataatagctataaaaaaaataaaatatctggaaataaatttaaccaaggaagcaaaagacctctataaggaaaactacagtacactattaaaagcaattgaagagaatatgatatagtttggctgt

SEQ ID NO: 622763 - DNA, 580 bp, Homo sapiens
aacagtagactagtagattacaacgtattctaaagaataagtagaggycgggcatggtggcttatgtctgtaattccagcactttgggaggctgaaccaggtggatcacttaaggccaggagtttgagaccagcctggccaacatggtgaaatcctgtatctacaaaaaatataaaaattagccaggcctggtggtgcatgctttagacccagctacttgggaggctgaggcagagaattgcttgaaaccaggaggcagaggttgcagtgagccaacattgcgccactgcactccagcttgggtgacagagcaagactccatctctcaaagaaaaaaaaaaggaataagtagaaaataatctctttagggctatgttaaaatgctttttcctctttattctctttaaaaatggatctttgatattataaactggatgtcataactgtgttcttattagcaaccctttaaaatcttaattaaaagtagcacctttctgaaagttgcataatcttttcaaattctcctgaatgttcggcaactgccacaagggccacaacattggcctgaaaaaaaaaaaaa

SEQ ID NO: 622764 - DNA, 612 bp, Homo sapiens
tttcagttctaaaatttcaatgatactaccttatacttaaatacaatcattattaaaaacatagcaggtaacccccaaatctatattatgggtaatataattatttcttggtgtggatttctttcttttgggttaattatcctttacatcagtatttcttaaattttttgagcattaaaaccacctaacatgcatgttaaggtgcgggaacaggctttcttgcactgttaatagatggtcgctattgcactgattctccccttgtaagagggtcctgccagtgtaggagtgacacaatggtcaatttaaaaatattaggggagtataggttgaacagccttgtagatgactctgaaatggctctttggtggtggccgaaagagttgttggaagggaatttggctctttctgtggtcagggaccaatgatttaaatactatgattatatctatgaagcactgtataattaattaaagttattttgactcaatgtatatattatattgtaaaacatttatagagagaaaagaaaagcaaggaatattttccaatggaagaagtatcsctgatcctgaaacaaattcagcctttcttactctgtttcataactct

SEQ ID NO: 622765 - DNA, 460 bp, Homo sapiens
tcctgctccagccatgtaaggcatgcctccttcctttttgccttctgccatgattataagttttctgaggcttccccagccatgcttcctgtacagctatgaaacaatgagcaaatcaaacctcttttctttataaattacccaatctcaggtagttctttattgcaatgcaagaaygaactaatacagaaaattggtagttaggagtagggcattgcaatacctatacctgaaaatgtggaagcaactttggaactgggcagaagctggaccagtttggaggactcagaagacaacagggtgagggaaagtttggaacttcatagtgacctgataaactgttgtgatcaaagtgctgatagtgatatggataatgaaattcaggctgaggaggtctcagatggagttgaggaacttactacaaactggagccaggtcacatttgttacatgtgaaaaaa

SEQ ID NO: 622766 - DNA, 631 bp, Homo sapiens
taggcagggctagctaggtggagctggattgtgcaagcccattaccaggctctctgagtgctgcacccttgaggggttgtcggggaagtcctcaggtcactgggacaaccctccagggagggattgaggcactccttctgcacctgtcatggaaagaggggtggccatggttttcagctcagaaggtaggggcyatagggcctgttcagctctgctctgacacctctgcgcaggtgggtctctgtcactggcaacaggcctgacttgttaggctagttccaagccgtctgcacccagatcaccacaccgtcccaagcatcccagacctcaaggcttcctgtggcagaaactgcagctttcaggccacatccttcctagtccagttttgtgaagggagcaccactacacactcttcactgtgctttgtcagtgggagctcctccccacctggagacagttcacaaatctcttccccatacccacaggtggtgtgattgggtcctgggaaactgggactgtgccagtagtttgtcctttggctcctcagggtcaaacattggctgtgatttggagagtaaattcctcccaggctgccaacaaaccacccaggcagtgtgatggaggctatgcc

SEQ ID NO: 622767 - DNA, 631 bp, Homo sapiens
taggcagggctagctaggtggagctggattgtgcaagcccattaccaggctctctgagtgctgcacccttgaggggttgtcggggaagtcctcaggtcactgggacaaccctccagggagggattgaggcactccttctgcacctgtcatggaaagaggggtggccatggttttcagctcagaaggtaggggccatagggcctgttcagctctgctctgacacctctgygcaggtgggtctctgtcactggcaacaggcctgacttgttaggctagttccaagccgtctgcacccagatcaccacaccgtcccaagcatcccagacctcaaggcttcctgtggcagaaactgcagctttcaggccacatccttcctagtccagttttgtgaagggagcaccactacacactcttcactgtgctttgtcagtgggagctcctccccacctggagacagttcacaaatctcttccccatacccacaggtggtgtgattgggtcctgggaaactgggactgtgccagtagtttgtcctttggctcctcagggtcaaacattggctgtgatttggagagtaaattcctcccaggctgccaacaaaccacccaggcagtgtgatggaggctatgcc

SEQ ID NO: 622768 - DNA, 631 bp, Homo sapiens
taggcagggctagctaggtggagctggattgtgcaagcccattaccaggctctctgagtgctgcacccttgaggggttgtcggggaagtcctcaggtcactgggacaaccctccagggagggattgaggcactccttctgcacctgtcatggaaagaggggtggccatggttttcagctcagaaggtaggggccatagggcctgttcagctctgctctgacacctctgcgcaggtgggtctctgtcactggcaacaggcctgacttgttaggctagttccaagccgtctgcacccagatcaccacaycgtcccaagcatcccagacctcaaggcttcctgtggcagaaactgcagctttcaggccacatccttcctagtccagttttgtgaagggagcaccactacacactcttcactgtgctttgtcagtgggagctcctccccacctggagacagttcacaaatctcttccccatacccacaggtggtgtgattgggtcctgggaaactgggactgtgccagtagtttgtcctttggctcctcagggtcaaacattggctgtgatttggagagtaaattcctcccaggctgccaacaaaccacccaggcagtgtgatggaggctatgcc

SEQ ID NO: 622769 - DNA, 594 bp, Homo sapiens
taggtgttatgacttgcctcaaggaagagcggtgaggggaaggtgagagtagctttcctgcttaatatttcggggtagcagatcttgaatcttatcacagtttaaccctaatccatatccacttcaagcttcagacagtttggagaactagtagagacrccagccctctctttgaaacgggcattaaaactctttctgggaaagaattcttcgtaaaggaaaagagacctttgataagattcacctagaaactaggcaagcctcagctggcttgtctgtgagataggtacaacaatacctgcctacgagaggcatgtgaaaaatgactgagctgacgcttgcggaaattcacagtgccaatacgcagtaagaattcagaagcttcttgtattattgttgttacaattatggtgtctctttgttagtgaagcctaaaaattcttacctgttggaatttttcttaaattaatatgataaatgtgtatatttcaaataaccttttttttccctttatttaaggttcaggggtaacatggggaggtttgttatacaggtaaacgtgcatcatgggagtttggtgtacatattatttta

SEQ ID NO: 622770 - DNA, 594 bp, Homo sapiens
taggtgttatgacttgcctcaaggaagagcggtgaggggaaggtgagagtagctttcctgcttaatatttcggggtagcagatcttgaatcttatcacagtttaaccctaatccatatccacttcaagcttcagacagtttggagaactagtagagacgccagccctctctttgaaacgggcattaaaactctttctgggaaagaattcttcgtaaaggaaaagagacctttgataagattcacctagaaactaggcaagcctcagctggcttgtctgtgagataggtacaacaatacctgcctacgagaggcatgtgaaaaatgactgagctgacgcttgcggaaattcacagtgccaatacgcagtaagaattcagaagcttcttgtattattgttgttayaattatggtgtctctttgttagtgaagcctaaaaattcttacctgttggaatttttcttaaattaatatgataaatgtgtatatttcaaataaccttttttttccctttatttaaggttcaggggtaacatggggaggtttgttatacaggtaaacgtgcatcatgggagtttggtgtacatattatttta

SEQ ID NO: 622771 - DNA, 605 bp, Homo sapiens
aaagcacatgccatagcaaagaagttactggaacagagatctcagagaacagaatgtggccacccrggcttccttatgacagaatatggacgtttattagtctctaactttcaagaagttctgttgtttaattatttgtgatcagatgaggctttttctttggacaaagagaataaaatcaatttaattactaataaaatcttttgggaatgctatcataggagtttatttttgtatatttaaatgaaaggactaaacaccgttggccgagataaggcagaatggtgattcagtgtgtgttttataacctgactagaattctggctctaaaacgaacttagcaatgtgagttacagcagtttctcaatctgcctgtgcctcccctatttcaactgcaaaatagtcatcacaataagctccatctccttaatcttatgatgtcaccaccagtagggtactaggtcagagtaaatgttataattcagctcagtgcctgacatactgaaagactaaaataatgtttaacttaaaccagctttaaaaaaccataaacaaaactcaaatatacaccttcaatgaaattttggttaactaaagaatgtcgt

SEQ ID NO: 622772 - DNA, 605 bp, Homo sapiens
aaagcacatgccatagcaaagaagttactggaacagagatctcagagaacagaatgtggccacccaggcttccttatgacagaatatggacgtttattagtctctaactttcaagaagttctgttgtttaattatttgtgatcagatgaggctttttctttggacaaagagaataaaatcaatttaattactaataaaatcttttgggaatgctatcataggagtttatttttgtatatttaaatgaaaggactaaacaccgtwggccgagataaggcagaatggtgattcagtgtgtgttttataacctgactagaattctggctctaaaacgaacttagcaatgtgagttacagcagtttctcaatctgcctgtgcctcccctatttcaactgcaaaatagtcatcacaataagctccatctccttaatcttatgatgtcaccaccagtagggtactaggtcagagtaaatgttataattcagctcagtgcctgacatactgaaagactaaaataatgtttaacttaaaccagctttaaaaaaccataaacaaaactcaaatatacaccttcaatgaaattttggttaactaaagaatgtcgt

SEQ ID NO: 622773 - DNA, 528 bp, Homo sapiens
aaggctgaggcaggagaatcacttgaacccaggaggtggaggttgcagtgagctgagatcgcaccactgcactccagcctgagcaacagagcaagatcctatctcaaaaaaaaaaaaaaaaaatgtttactgagcttctrttgtgcgttgggcattgcctcctctagggatgcaaaaaggataaggattccagcacatttgtagtgcgttctttgtacccaaatttattcttcccgatgatgtttttccaggttgtttgtgtcatataatgccataaattgttcttcttccccttcatatttgaagttttctttatatctatgtaatgtatctgtctgtctgtctacctatctatctacttacctaactgatagaactattaaattgggtgttcccaggaagcacatgtaatttcgtccttaaaatcagtaacagtctccctgtttcctatttactttgagtagaattacctggcattttttcttcttatttaattccattataatgttttgctgaaatatcgtgttg

SEQ ID NO: 622774 - DNA, 586 bp, Homo sapiens
cagaaattttaagaaagaataaaaaagaaatgctactgatcaaaaagactgtaacagaaatgaagactgcctttaatgggcttattagtaaactagacaaagctgaggaaagaatatctgcacttgagagtatctcaacagacacctacaaaaccgagaagcaaaaggaaaaaaagactggaaaaaaaaaagcctggaacaaaatatccaataactgtacgacaaccacaaaagcataatgggaacaccagaagaagaaacagagaaaagaactgaagaaaaatttgaaacaatgacagagaatttctacaaattaatgtgagacattaaaccgcagatgaagaaagctcagaaaacaccaagcaggataaatggcataaaaatggcatagacaccctttcctgtgcccttttaaggttgaygcagtgctttaaggggctaacacagaagggtaaaggaagtctccataaaccccagagaagagattgtaaagctcctctttagaacctttctggagtcacacctgagaaaacaaaaacaaacaagcaaaaaaccctgacagctaggcatataattttcaaactac

SEQ ID NO: 622775 - DNA, 436 bp, Homo sapiens
gactaggattttgagtgaaatgggtttggcgtatctatactgtttgttacctttgttgaagattgtatgtggaaaccatgaacagtttagtatagaggctaaaatgggaggaaggaaatggtgagggatgtgtgtgcatacatacggatacatacatagatacatacatacatagccagaactagtatgtcaagcctgtttgtgaagctaaggtgctgggctttatcctgtagaaatggagaaccattaaaggatttaagaagatttgtggttaagaaatatccagagagacaagttatgaagctgttttaaagtacagatatgattycactcataggagttatctaaagtagtcaaattcatagaagcagaaaatataatggtggtttccagtagttggggagaagagggaagagacaagttattttatgggtac

SEQ ID NO: 622776 - DNA, 584 bp, Homo sapiens
gttattctcttttgcctcttaggaatctatggatttcctgaaatatgttgttgagtaagtatttgaattttctctttggggttatgtgttcttaccagcgagagggcatggagccacaattcagttaattgttactaaacacccaattgaaatactacttgtagtagatttttttgaggctggtgtacaaggcaattgaaaagttagaaggcctagcttcttatagtttttgggtgcctcagtgacccatactgattctcttgcagcaaaytaaacttcaagcctctggagcaggagatgcctgtgcagttccaggtggtagagctgcccagtggccaccatctatgcaaagtgaaagctctgaacaagggtgatgccaactctgaagtcactgtgtactaccaggtcagttgggtgtactaaagactggcggaaggcccagtgcctggggatcagggaccccgtgaccttcaaggcccttttatagttacttctgtagtttcatgcttggggccatttgtcctcttgaagcaactacatttaaaaattgctcctgttggtaaaatggatcctttttcaatcac

SEQ ID NO: 622777 - DNA, 491 bp, Homo sapiens
tagatttctcagagatctttagctaaaaaacaaagggatattttaatttggccattacttgccactcctgaaccagtaatggatgaacaggaaaaataacagtagaaaagaaaaccttacgacacacagaattttgtgagacccctttatttctccctggtaaagtcagaaaaggcacacaagtttaacaaaaaaatatatctttagcattaggctagtgtgaaggaccaagagataagattatgccaaccatcctacrcccattctaaaacttacatcctcttggaaggtttttccgtactaacccatattacattaacctctcctttttgccatctcatcagtacttttatattccacttgttttacattaatgtacacttgctgaggttttaactcataggtcttctttttaggctttatatatatatatatcatacatatatatgatttatgttttcctttgattcacttcttatatttagtaagaa

SEQ ID NO: 622778 - DNA, 498 bp, Homo sapiens
ggtatctccacactgttttccatagtggttgtgctagtttacatgcccatcaacagtgttaaagtgttctcttttcactgcattcatgccaacatctattttttttattrttattattatggccattcttgcaggagtaagatgatatctcattgtggttttgattgcatatccctgataattagtgatgttgaacattttttcatatgtttgttggccatttgtatagcttcttttgcgaattgtctattcatgtccttagcccactttttgatgggatttgaaacaacagtttttagatattgcagaacaaatatggtgaaactgatgatcatcgttttcacctagaggcactttacagattaaaactattacgctcagcaagcagtaccccaaaataccattttgacatgctggctgaatgaaggaagtagcctcgaggtctctctctgacctttccctgcttgcctgtttatctgatctgcttactttccctaa

SEQ ID NO: 622779 - DNA, 645 bp, Homo sapiens
tgatcctgtagtgaaaatataatggttttcctcttcatctttgctttagtgaaatgcttgaaggcctactctctctctgagctgaaagtatgatttgttattccaaaactattttagtctcagcagagatggagtttgcacatgcattttcgataactaaggctgactcccattagggtggaaaataaagcctataattcataataagagattgctgcctttgaaatcacttcctaccataatactggccacttcattacagtggtaattagaaagaaaaaaaccagaagtggccatttgaaggggaaattagtgcttaatttccaagactrttttattttaatggatgcaactctggcaagattttatacttcaattgcaaacccaagaatgataaggctggtgtttcagatctgtcttctaaatggaaaacacttcatgcagcatgtgatgaaagagcatctaatgactgaatatatcccttaaagtcagatatactgtctttaaaggagggtttaaaaaataagtatgtatgtgaaggtgggcatgtgtgggtgtaagttacatccatttaatcagctgctactgtcattaaccaagtacacaacttgagcgtgttaaaattactccaattaaaagaaagtg

SEQ ID NO: 622780 - DNA, 581 bp, Homo sapiens
atgaaaaataaaactattatgaacgttggcacacaaatatttgtatgggtgtatatttcttttgaataaatattcaggagtgcaatggctggatcatatgctagagaaatgcttcactttttcaagaagctgctaaagtttttttccaaaatggttgcactatattatatttccacccgcaatgtttgagagttccagttcccccatattctccccaaaacttgctattgtcagtctttttaattttaataattctcataggtaaatagttgtatctcattatagctttaatttgtatcaccttgagttttaggagttctttatatgttctggatacaaatgtttatcagacatgtgctctgcaaagattttcacccagtccgtagttcgttttttcattcttttagcygtatcttttgatgggcagacatttttcattttgattaagtccaacttatcaattttttaatggatagtgcatgtggtgtcatatctaagaaattttttgcataatccaagatcaaaaaaattttctctcatgttttcttctaaaagttttattcttttagattttacattta

SEQ ID NO: 622781 - DNA, 617 bp, Homo sapiens
gttttcttctaaaagttttattcttttagattttacatttaggtctataatctttgagttaatcttgtatatagtgtgaggtatgaaccaaagttcatttttagggggagacaggtttcttcttattttatagtttcatgcttataccttaggcttgatacttgggacccctccttgatggttaatagttacactgattacagctggttacacactggttatgcactgattacagctgctctggccaatactttgctgagtagagcttagccttaggaccaaacttcatgatgatggttggggccagtctgtggcttggytagctttggccccatggccagggtccacatggagccctttctttgagtctaactgatcgttgttgttttcttttttttatttgctgtgtatccctcttgatctaaccttttcttctttaagtgctcatatcacatctctagattaattacagcaaggacgtagcatttatacctcctctcttctatctaatgtgtgcctcactgagagccacctctatagtcactcctagattctcatctcaaataccaaaccaaattcatttaggtcattcagttcattgatccagtgtttgctga

SEQ ID NO: 622782 - DNA, 611 bp, Homo sapiens
gaagctctgatgtcagcgttattaattctacaccctagtgatggctgctgtcagagccacctgtgctgtgactatggcggtcaccagtgctgtcacccctattgtcaccaatggtgcctctggtgcccagtgacccacaaagatacagacaaatgtttcctttattatttaattccttttccattgcttcccttctttatatatcttgtgcctctcagaatcctctttctcctctgaagatgggtcaacccattgtctttgaaagaaatttctgggcctttcawctgttttttatgttgggttacttaccaaggaacatctactacatctactctatgtaattccccaaactggccatgcaattcccttcctttgtcctttgtctttctcttctcttttcccagaatatcattcccaaactgtattcacctgcagagctctgattaatccttcaatctcatctaacccagactggaatgattaattgcagtcaatccacattctgtctcatagccctcagggcagtatattgaaatgatcagtttatatttctgtctccccacctaaactctgagctccttgagggcaggacctgggtttatttatttctc

SEQ ID NO: 622783 - DNA, 544 bp, Homo sapiens
gcaaagcaagatcttagggcaagttttggtgctaaggagagatttttgatttttttaaattggtaatcttcagatggtataaaattgtcatttgtattattcaatcaaccggattctctgatgcccagtgattctagagaaataattacttgtcataccaatgttagaaatttcattctaaaagttgaattgcstggctgttgaatatgaaagtatacattaaggaatccaatataaattctcaaaattaagtgaattttctgaattattttaattgtttacaagaaagatataatttaggggcaactcttgaatagcagggtatctttcaaggactgcataaaaatagttcagtatttatactcattttctaaatacattttcattttcattaaaaaaatgtacttagtgatatggtttggctgtttccccacccaatgtcatcttcagttgtagttcccatatccccatgtgttgtgagagggacctggtgggaggtaattgaatcatgggggcagttcccccatgctattctcatgatagt

SEQ ID NO: 622784 - DNA, 558 bp, Homo sapiens
gacatggagtcaaaggagattattttggagttttaagatttaattactacctagttggatttcatacttgcatggggcctgtagcctctttgtttcagccgtctcttccatttagaacaggtgtgtttacccaatgcctgtacctccattgtatctcagaactaactaacttgcttttgattttacagactcataggccaaagggacttgccttgtctcagatgagaccttggacttggacttttgggttaatgctggaatgagttgagatttgggggactgttggaaaggcatgattgtgtttggaaaggcatgattgtgttttgaaatgtgaggacatgagatctgggaggggccagaggtggaatgatatagtttggctgtgtccccatccaaatccaaatctcatcttgaattgtagttcccataacccccacatgttttgggaggtgggrggtaactgaatcatggggcggttcccccatgctattctcatgatagtgagtaggttctcatgagatctgatggttttataaggggcttcccccttccacttgg

SEQ ID NO: 622785 - DNA, 547 bp, Homo sapiens
agatttgggtggggacacagccaaaccatatcaccaggtcattccattaaaggaagggwactatcccaaagcttatatacatttaaccaagactgactgttgctgggtggtaggggaagtaggatactcctggcccccagaatggatcagagagtcagattctaagtgttaagtactgcacagctgtcctggaggcccggtggacagatagagctcaggcctcatgttcatgcaagtgggaaggaacatcatgggatttcagttgggagacctctgcacatcccaaaagattatctaattagaaaataaaatgaaaaaccagctcccctccccaggcatctcatcacagaatattgctttattccttctgcctttcatacaatgggaggtgtcaaaatgaatgatgtagaagtggttattggaaaagtgccatgtagtacatttgtgtggtattgttaaaatgtaaatcaagtcaacttcattaggatgcttagtagtttcaaaatcaggctacagtcctttctgaggctcagcttccagctggaag

SEQ ID NO: 622786 - DNA, 424 bp, Homo sapiens
aacggcagacagggcttagtataaacatgttatagtctcattgtaaaatcagcatcaagtcatctggagttgaatggaaggattttggagtatgtgcctgctgatgttagactttactggattcaatcaagccagttttaagactttccgcaccaccaagtagtggcaaggtgggacatcagccagtagtcagcaaatacttattgagtgcctacattgtgtagggcacagcagaaagacaatggggtgaggaatcttggggtgtcggtgaggacatcctgaaaagttaaattatgtggttcattctgtaaaaggagccaactagggtcagaaaaggatagatggatgaaagatggatggatgaatggatggrtttggagttcagaagggttaaaaaacaagaagtggctgagagggaaagaac

SEQ ID NO: 622787 - DNA, 606 bp, Homo sapiens
gctttcacttttgcaattgagaaaggtaaatttcccaaggactgtaaagctactcttgtctcctatattgatatttttctctgaaaaaataaatgtctttttgcattatttaaatagcacataattaaatactaagggctctctgttacttgtacccaaagcaatgcccggtgaggtatggaggcccagagggctgtagagaagtatcgcctctcagagcaggagagaggaaaaacaatagacagagacagacagggacccagggcaggaggaagagaaaggaagtgtttaacattcagaatttgtccacagccgataatttattggaactcatctgtaacaaggcctggcactgatttataagttgatttgaaaaataaataaaagygatagaaacctgcatttggttttaatgatagactgttgcagcgtgaaaagtaaggatatgaaacattgcaaggaaattagatattatgccctgaagacaattgcagctaccagcccattaattgttagatatttattattaaaaatttcttttcatgagtgactgcagaatatttgcgctactcaagctgttgggttctgacatgaatgaagtgtgag

SEQ ID NO: 622788 - DNA, 605 bp, Homo sapiens
agacagagacagacagggacccagggcaggaggaagagaaaggaagtgtttaacattcagaatttgtccacagccgataatttattggaactcatctgtaacaaggcctggcactgatttataagttgatttgaaaaataaataaaagtgatagaaacctgcatttggttttaatgatagactgttgcagcgtgaaaagtaaggatatgaaacattgcaaggaaattagatattatgccctgaagacaattgcagctaccagcccattaattgttagatatttattattaaaaatttcttttcatgagtgactgcagaatatttgcgctactcaagctgttgggttctgacatgaatgaagtgtgaggagctcatttgtttctgtgtgtytgtgtgtgtgtgtgtgtgtgtgtgtgtaaaactgacaagccagctgaccaaaataggtgatagatctctttacagcaaaaacacaaacatagaggggctgccttttaactcagaacagagcaaggagtcctggggcacttgtcatttctgaagctgttattaaataataatttcataaataataaaaataatttttaacccaggtgtcaacccag

SEQ ID NO: 622789 - DNA, 665 bp, Homo sapiens
accatttaatggtccagatacatatttttttttgaaatcagaaggcactttatagccaatcttaattcatgattcactcttagggctattttccattaacttttctactgtgccatttttctgaagcacacagaaaactgttttacagtggagaggaccagcatagtaaagataaagatggcattattcacataaatagcatattttaaaaacagcttcggtgagttgcagtgcaagttaataaatttaacttgccattatttaatatgtaataaaatgcagtctaaaactacaatctaggtggtccatgtgtcacaatgcccagctttgccatcaaggaatttacaaatgctattcctacatactttgtgctgctgacggctttttttctctagagtgctaaattctatggtaaaccatcgaagacctgagcaaatgcttgaactcaaatttgggctagactgtgagcttcctgaggrtagagactgtgtctatatccatctttgtggcttctgaggtcagcctggtgccaatcactttatgaatgatgggtaggttaggttacttcctaaagccttcattgttcaggtcttagaaaatcaatccacaagcatttgttgcatccctcctcttctttttccactaaggagtatggtatttcagat

SEQ ID NO: 622790 - DNA, 659 bp, Homo sapiens
acacaaaagcaggcaggcaggagtttgctgatgtctgttatacccagccccaccatggttgatttcaagccactaataattgtggctcactaaattaataaaaatttaactgtcagctcttgccaactggtaaaagggggctccagtaagatgttcataagttcacttgttttttttttttaaatgtgcactctcaaacacrtttttaaagactgtcaagaggaggtctagactacagtgtttctcaatggatctgacaaacatctggaacaagggtgttcctgaaaagcatttctcaggaacactgtttggaggattctgtcttggtattctaattgctcaaaaggttcttcttgaccactgcacagataaacccaattcaccaagagagcgctattgcagtagagaaagagtttaattatcacaaggcagctaaacagaaggatgggagttactacttaaatctgactccctgaaaatttaggagactagggttttttcaaggacaatttagcaggcagggggctagggaatagggaatgctgattggttgggttagagatgacatcataggaggtcaaagctgtcttcttactattttcagttcctgggtaggatcacaagaccaattgagccaatttaccaaaccaggtggtgcc

SEQ ID NO: 622791 - DNA, 631 bp, Homo sapiens
cccctttcactcttaaaagcatgtgggtttggatgataaggtatactatttacctttaccctctttcactcctatctgccaaaatcttctcattcatgagctacctgcatataaagcctcttctgatccttttgactggctatgatctatccctttccaaaatcccatcgactttcttctttcctctcttaggctcccagttagagttatttatagacctcttttatttcttcttatgtttttaagcacagagactgtgctatattagatgccaccaaagtgccaagaacaatgcsttgctcagaagtaaataataactatgggttgaataataaataactgaccaactaaaagttcaaagggaagatgtatcatcagtgtaaggattttgagacccatgagtttgagcagaaagtcagcattctctgccatctcctttcttcatcaaaattttacacaatgatcaatttttctcccaaattgttaagtggaggcattatgtaagagtttacaaactacaaagaacaaaagtatttatttagctagttgattcacaacagtgttttctaagatgtgttccttggaacactagttgagcatgatattagtggagtatttattaaaacaagat

SEQ ID NO: 622792 - DNA, 566 bp, Homo sapiens
gccaacatcgtgtaaccctgtctccactaaaaatacaaaaaccggcgtggtgatgcatgcctgtaatctcagctactcaggaggctgaggcatgagaatcrctggaactcaggaagtagtggaggttgcagtgagccgagatcacaccactgcactccagccttggtgacagagcaagactcggtcacagaagaaaagaatttagaaaaagcagttgagatgtcacaatatttgatgaaatctccaaagaaatggttggaaaaaataatacaaaaggtggaggcataggaaagtgttagtaaatggtatttctgaaataaatacaagaggtaaacataaacatgttcaatttgttctaggttgttagaaaaatctggcaataagtgttatggtggaaggaagcacatgcaaatatagatattacactctaataatgtttaaaaatgctgatactggagaacaatgataaactttaaaagatacataatatcagttctggagatacgtttgttatctctctcattagaggcgccttgcatgtgagtttagaaaacatttttacaata

SEQ ID NO: 622793 - DNA, 612 bp, Homo sapiens
ttgtcattatggatttgtgtatcttttaatatttaaaatgattttcttttattattgccttttactccctgaatttttcacaatgaacaagcaaatcatttttaaggggaacatctaacatttattaaaatacctaggtgaacagggaatggctttctcctttttctactttatgataaaatccagatgaatgtaggaatcrtaaaacttcaaaaaagttattgttgttttaggtctattcatatgtgcaaggttttcaattttacgaataactcataccattttggggcaagttttggggctgagggtttacacccatacctccactaagagaaccgggtattcctttcctgctgtgtaggtgttttcatccctttctttttaataaaataattaaggagtttttattagtatagttaaagatttaccgaaaaattgagtacaattccatatatgcatcccattcccaccacatatattgtttctctattattaacatctttcactagtgtggtacatttgttacaactaatgtaccaatatcaatatattattaactatagtccatagttcactttcaggttcactcttagttgtacttctataggtttt

SEQ ID NO: 622794 - DNA, 634 bp, Homo sapiens
caaggtcatagtgctccaaattaaaccccagcttattccacgttttatatttgcttttgttgttcacatagccattacttagtttgtcttagtcaaactaaaacctatattgagtttggcttctgaaatggtgaactctgttaccaggagaggttcaatagaagatatatgagcatatatgatgtagatgggattataacattaaataaaatattggaataaatgccttctaagttccctctgaaatataaaattttattataataggaatcattaaatcagattgaagcaccataggcagatcatcctctgatgccatgccagcaagcttagcactatttctcagctcttcccgaacccaccagcaggtcaaataaatgtttggccccacaatttagcagccagttggaaaagttgtactatgctatgacagctacagccatcgttttagacactttgtgaagtttttactgggtttatttgccaatctcattataggtaaagagctaaaaaacttgggaataacaaaggtgaacatgtaagaaaagtgagaatcatcaacaaataaawcaattctattttcaaactagcacactggcagttaaggctcagtattttattatattgccaatga

SEQ ID NO: 622795 - DNA, 599 bp, Homo sapiens
ggtggaatgatagctcacagaagcctcaaactcctgggcttaagggatcctcctgcctcagcctcccatgtagatgggactacagtgtatgccaccatgactggctaatttttattttttttattgttgttggtggggatgaggtcttattgtactgctaggctggtcttaaaytcttggccgtcaagagatactcccaccttgacctccaaagtgctgggattacaggtgtgagccaccacacccagcctgacatttgaaatcctttactggaagttaccatcagatatggcaaagaaaatacagaaagaagatatttaccaatatgctttacttccagtttgtacaaaatggatatatttacttttttaatcctgaagataatgtacatagttttaaatccttgatttaaagagctcttagaacaggcacaataagaggaactgaacaatacccatgtaactaaatctctgaaaaatatatttaatagatcagtgagtgatcatagaatctcagaggaaagttgctttatgcatgcaaccaatagcataaataatatacattgtatttttatcttaactaattttgcacattttttc

SEQ ID NO: 622796 - DNA, 599 bp, Homo sapiens
ggtggaatgatagctcacagaagcctcaaactcctgggcttaagggatcctcctgcctcagcctcccatgtagatgggactacagtgtatgccaccatgactggctaatttttattttttttattgttgttggtggggatgaggtcttattgtactgctaggctggtcttaaactcttggccgtcaagagatactcccaccttgacctccaaagtgctgggattacaggtgtgagccaccacacccagcctgacatttgaaatcctttactggaagttaccatcagatatggcaaagaaaatacagraagaagatatttaccaatatgctttacttccagtttgtacaaaatggatatatttacttttttaatcctgaagataatgtacatagttttaaatccttgatttaaagagctcttagaacaggcacaataagaggaactgaacaatacccatgtaactaaatctctgaaaaatatatttaatagatcagtgagtgatcatagaatctcagaggaaagttgctttatgcatgcaaccaatagcataaataatatacattgtatttttatcttaactaattttgcacattttttc

SEQ ID NO: 622797 - DNA, 602 bp, Homo sapiens
ttaaccattttaatatactcaactttcctgggtgatactcttgtccacatgtggcatacaagtcacacgatgcttcttaattgtttcgcatacctaagtctccttacccaygtagatcctaagtttctcgaggcctgggactttataatacccttttcttatgaccctcaatgcttaccacaatcatggatatataaaaagttttaaatactatcgattactcctgttgatattccaacatccaaaataatatagaaattgcacatttaaactataaacaataatactttgatattttctaaatatcttttaaaactatgtatgaaaaagtatgcttatgaaaatattttattattttaaatcatatgagtaaattattatttaatttaacaaatacaaaatttgaaataaaatttaaatcctctaaatatcaattaatccaaattcaaacaatatttactaggcctcccacttcatggcaccataattagtacgtgataagtaaatcaccgtgtttactcttaagaagctgctgtataattaaaataaagtaatattctattaaacaacatagaattaaataatgaatgagttaatacctg

SEQ ID NO: 622798 - DNA, 559 bp, Homo sapiens
gatcccctaagttaaatgaatagcttctgtgaaatatgctgaattaaatgcatcataactgaaaaaaaaggctaaatttctacctcaataattataggaaagaagttacatattaacaataaagtttcactttacaatttgtattactaatattttttagtatattgtactaaataattccaaattattatcatggggaaaagagagaaaaggctcaaacatrttaattaaattaggaaaaaatctaaatatctttttatccaatctctataaatcccccaaattccttcattgggaatcatgacataataataagatgctttagatacccccagacatttttatttcatccagtattatgaactccgtatcactgctatcagaaacttcccagagaaagtgcaaaattaaatgtaaaccacaatgtggagtggatatgcataatactattacagatttgtccttagcaaagaggaagaatagtgacttatatgttttatcactaaagtaaccaggttttttcaatgaatccaattacatccaatcctttgagaagcca

SEQ ID NO: 622799 - DNA, 541 bp, Homo sapiens
ttaatatgaccaaatatgaaattattccttctaagtttaggctgaaggttattgggcatgaagaaataatttggacccaggctataaatatgaatggataaaatatttaaagaatgcaaactatttccagtatgtacttatacttctacaagtatgtagaagtatcaaatggcagaaactttgacatgaagaaaatctgggttgggttttgcctgctctgtgatttctgaggcttgttttcccactctgtataatggagattttaaaataagaatacccacctcatagctttgatatatggtttaaatgagatagccaagctytattttcaaggtaagagctcaaaatattagttattattattgttgaattcagcatctttttaaaagaatcaaatgaaatattaatgataaattaaccaaccctgctagtgacctaaggctcactccctattcaacatattgttagcctagtttcaattctattacacttaaaagaatctcaattaaattattgtaaaatagcctgcattttaagaaga

SEQ ID NO: 622800 - DNA, 579 bp, Homo sapiens
tatggagattgaagaagccgctccagaatcatttcaattgctaccaaattaacccctcccagagaggaatggataatgacatcaaccctttgaacctattgaaaactaatctaattagagacattttgctgaaaggcaagagtagataaaagaagaaggagagagagcaaaaattgcagcaacttttttggggggtctggctcttgtaaaatgtattagtcacaaaaagtatagaaacacctttaggaaactttcttttcttgtacccactaacgactcaaggaactcaattaaatcaagatatttctagtcttccaaagatagataagaggaagagaagaaaggagatatgaataaaggaaaaagggaaaggaaaggaaaagcttttagttattgagcaattcctttgtatcagaattccattaagggcttttcgtagattagctaatacaaatcttacataagaaaattattagtrtccccatttcatagatgaagaaacaaaggcacagaaaggtaaaatggtgagtaattttcccagaatcagacagttatctaaaagcaacactgtgattttaa

SEQ ID NO: 622801 - DNA, 529 bp, Homo sapiens
atttaataactatttactcttcataattatgataaaaactacaaatgtgtaacttaaatggaatagtttactaatttgttttagacttaacactaaacacttactaaggagataatcttgtttctactagaatacgtttggtcagaagcagaagttgaccacatgatggaaaatacaattattaggtgagtgaacactggccttgggatgaggctatgcaggtktatgtctaacacactcagagccagctactcataattatttgaattgaatgtgagtctatatctatccactatatctatccacttttgctcataagtggaaattggtttatttgttaataatttaaatgaaggaaagcaacaaaagagtcaaagttgattaaactggcaatcccattagaaatggacaaatcttaatgtttcaagtatatgagttgactattctataagcataataaaccattacaaaaatgaaaatgtcatctaagtgttgataactagaaaatcaggaagcaggtgtggcagtt

SEQ ID NO: 622802 - DNA, 395 bp, Homo sapiens
agggaacaagtgcaaagtttctaaggtggattttctcctctgagaatgttggatagaaaactggaagtaatctttccataaaggacaataaaaaatctgaccaatatattgaaaaatatttaatcaaaaacatcaatgaactaaaaagaaagtgaatagttactgggcaaaatcaaaagaggatgggaacctgaagagagaagcccagcatttcagaactgcttttgccctggggatgtttgcaaataatgatgagttgcttgagaagctaacccaaacttttgatatctcacgggtatagagagagaaagtcaaccaggacttgccaaaaacagaytgagcccctaggagtaagagtgacccagaagacacatggtcttcagcctgatatcaaa

SEQ ID NO: 622803 - DNA, 384 bp, Homo sapiens
agaagtttgaggactcatgactagagcatcccaacattaacagtttgggaagaagaagatgaaccagcaaaggagactaagaaatgataataaaaaagggagatagaggaaaaacagagagactayggagttctaaaatactctagaggaaaatatatcaaagaggagggtgtgagcaactatctcaagttctgttgctgtcatctcaactcaggactgggtttattgcaatgcagaggacttcaggaaccttggaaaaaggggttttggtgacataaaaaaaggggatctaagaggaaactggagaaaaggaattgaaagtagaatatataaactttttttaactttttcaaattcatccccatcacaacttctccccttaat

SEQ ID NO: 622804 - DNA, 609 bp, Homo sapiens
gattaggtctgtggtaacttaagatttgcaaaataggtcaaattttcagccaagtatttagaaataaatagatttatgttgtaatgtaaaaagagctttaaacttactttatagtcagaaaaagcaaygaaaagaaatggcaattatttttaatgacaagaattttctgcacttgaaaatggaatttatcatttcagtagacagtacatgtcgtaaattacaggtagattaactcaatactctacaaggagtcttgcttgaagtaaaatgcatgaatttaaaattatactcacacagaagaataaagttattatcttccagcattggatcatattttgaacaatgtaggttccatggataatatgtgaaatttaactgttagtggtttgattttcatataactgctaaattatttttataaacattttataattatcccatactgtctaaaacttcatactaaaagccactaaaatattagtgtcatacaagcaatagatatttcataagtgcttttgttaatgataaaaaaatgttttccccacaggagtttccatttctgttatgtatggaattagtgaaggcaaccttatatatcaacaaaatttc

SEQ ID NO: 622805 - DNA, 600 bp, Homo sapiens
catttctactaaagttggccaaccatttataaaattatttgtccaggaaaatgaattctgaggtttaccttaggactaccagaaacactcctctctttcagagaagtagaaagaccatctggcttctgactggggggctgcagggggtctggctggagtgaccacgcagatactctttaagggctggcatgtgcatgggtgaggagaaaaaggcagaattcataycatttccccaaatcactacccggcctctgtcctactgtatgggaagaacgctcagtattagatgatttcgcatttaggagcacgtaaatccttcagctgaaagatgccacggcatctactgtgctttcagggactctccccagacacacagtgagaaagggattatgaaatgtaggagaaagcacgcacccactcacttatcagcacactcagtgatccctgtgatattacagctactctgacaggtgctggggatacagaggatagagatggataaggaactgtccctgtccaacgggctcacattctaagcaggagtgacagatatctatctaaagggtggtctgcaagcataatagaaaacacaagcaagca

SEQ ID NO: 622806 - DNA, 509 bp, Homo sapiens
ctactgacattttagtaatccttttctgactgttttgtagttcttacttatattcctttcttcttctcttgctattttcctttgtgatttgatgattttttaaaaaaatastgtatgttttgattatctttatattttgtggtctactataggtttttgtttcgtggttaccatggggcttgcatataacatattatagttataaagtgtattttaagcttataacaacttaacttcaattgcatacaacaactctccacttttactttctcattttatgtttttaatgtcagactttacttctttttatattgtgtatccattaacaaattattgtagctatagttatttttaatacttttgtattttaactgttatactagagctaaaagtgatttatacatcatcattacagtattagagtattctgaatttgactgtacttacttactcttacttaccttgaccaatgatgttattaattagtgtcttctcatttcagcttgaag

SEQ ID NO: 622807 - DNA, 627 bp, Homo sapiens
ttagtctcctggcccttgaggattttcctgaatcayccatcactctttccacttgaatctatctggtgcaagacacctattctactgatctttgcatccacaaagggtgcccatcatcatcttcattcttagtcagattcttggtcccttttcttcttgcacagccttgttcagcccagaatgacatctccctcataggaatttaactttccagtgttctgttatgcgcttggttcatgtctgtttagtgaatgaataaaccaattctatcattttttaaagaatttatgtaaagacaaatagaatagttgttctccagttcatttattagtcagctgtctgtcagttatatcactattcctaggacccaaatagaatgggtaaaattccaactttaaaaacctgcaggatgagagaaaatgaaatctgctactatcttttaatgtttttaaactgataggtaataagaaagttaccaaaatcagaatcaatctaaaatattttttttcctctgggagtgattgaaagggagcataaaaagatgtcaggctgacagatggactactactacttcagatctgcaactagaaaacaaggccaggctgtggatcttggtgtgaaattgca

SEQ ID NO: 622808 - DNA, 627 bp, Homo sapiens
ttagtctcctggcccttgaggattttcctgaatcacccatcactctttccacttgaatctatctggygcaagacacctattctactgatctttgcatccacaaagggtgcccatcatcatcttcattcttagtcagattcttggtcccttttcttcttgcacagccttgttcagcccagaatgacatctccctcataggaatttaactttccagtgttctgttatgcgcttggttcatgtctgtttagtgaatgaataaaccaattctatcattttttaaagaatttatgtaaagacaaatagaatagttgttctccagttcatttattagtcagctgtctgtcagttatatcactattcctaggacccaaatagaatgggtaaaattccaactttaaaaacctgcaggatgagagaaaatgaaatctgctactatcttttaatgtttttaaactgataggtaataagaaagttaccaaaatcagaatcaatctaaaatattttttttcctctgggagtgattgaaagggagcataaaaagatgtcaggctgacagatggactactactacttcagatctgcaactagaaaacaaggccaggctgtggatcttggtgtgaaattgca

SEQ ID NO: 622809 - DNA, 571 bp, Homo sapiens
tttgtaagtacatataactcatttattgaacaagacagacctgatataggtaaaattaaacaagaattgcatggtttcatcataccactgccttccagcaakctttttaaattattctctgtacccagatgaaatctcagccaggtcccacaccttttccaggcacctttctgacattggtcaaaggtcttgtctaacctgctggtcatctaacactttccgtaccccgtctcaggctatctgaggattagcagatcatagctgggatgagggtgcagtagtaacgatgctcactgtttcccttctgtgctcttccattcaactcctggagttccttctgcctcttcaggcttggatgcaggagagaggagaaaaaagtgttctcaagactccctttctttatgaaaatgagcatatattcatgaagcacatactaggtactactgcaaataatggcttaaggattttgtttaattttctcaacagtcccaggacataactattactattcccatagagtgttcattgtgccgaagtaacttgcccaaggccctatggctgtcagtgctgg

SEQ ID NO: 622810 - DNA, 529 bp, Homo sapiens
gcatattatcactacctctgaacagtaaaatgcctcctctacagcctagagaacagcctacgagccaaactgctcctaaagtagctgggatacattaagaggtgcggctgaatcagctcctcgcctccagtcatcccatcacctgctgccttagtccattaattggctgagaaggcttttgagagtagtttgagtgaaaaaggaatagtatagctgcataaagacaatttctttcctagtctccaaccccggtttttactactacatcaaatgctactttttgacccatgctccttttattatttacatgcaaaaaaaaaaaaaaaaacctaaactaaaacttggctgacctttgggatcagggatgaggacagagtggaagcagtactgaatttaatttaawgttctgtaacaaacaagggggaaagatatagagataccgattttgagggaaatgttaattatctaaagcttaattacagataacgtcatgaggagaatacataaaaggcttgaaatgcagccaaag

SEQ ID NO: 622811 - DNA, 590 bp, Homo sapiens
tatgaaactgaagaaatttatttttcttattgtgttttatggtctgaaagacacatcacagtggataaatccagtgaaaccttaccatgtagttaacttgataagacaggcgggatagaagcttgcttaatacaatcggattctctataccttccccaaatcacccatgatgaactcaacctgtatcagagaaagcactccaatctcttgcatttaaatactgatgcaagtccttgaagtggaaatgtggctcacagtatcacagtcaatatgtgtgctttaagtgttcataattttcaagtgtgaaaattttatttatttgaagcctagtccagaagaactagttataagagagaaaaccactgttgcaggtacctgttctgtgaattaccagacactcagacacatctacaggcccacagggctscgtaggcaccaggctgggggaggcttgaagtctccaatgtcttcaggttcaattcttactaagccgctggcatcgttactgaaataacttctcccacttccaagcaagcaaagcttagtgtttcaaaaaggtttcattcattttgaagcctccctggggcaca

SEQ ID NO: 622812 - DNA, 569 bp, Homo sapiens
ttattattttttaagatactcttacaagtcagtctgcaggatttatggaatactcgctctgcagagtcctattcaatgccctgagtgcatgcaaaggaatcagagaagcrgtccttgtctatggagcacttgccatcttgtttggaattttcagcctgtctagtgtgagttaaaattacgccctctccttgaatactattttcttgtattaatttaaactgtgattaaaataggttgataactggtttatagccttctttacagaattttcattgtagctccaggcctggaaatagcaatttaattagagacttacagccatgcatttcatcgtgataaatgccctgtgaatatttagactattagcaaaggtaaaatatttttggctttcctttaacttatttaatattcttctttcctgtaatttacttcacaagcagatttcaaactgttattccagaggaaaatagggccaacaatgctctattttgaggacaggtctaacactgctacttcccaaagaaaccctatgtcaggaaagttcactgttacatttttcccatagaaac

SEQ ID NO: 622813 - DNA, 596 bp, Homo sapiens
aaccacactcaccctcccacctctccactgcccttgtccacttggggaaattccgttcagctctacagtttctgctatggtttgaatggattccctcccaaattcaggtgttgccaatgtgacggttttacaaggtgggcctttaagatgtgattacactataagggctcttccctcgtgaatgggatcaggtgtgggaggagttcaccctctcttgaccttctgccttccaccacatgaggacacagcattgtcccctccagagggggcaccagataccaaatgccagtgccttgatcttagacttccagactccagaactatgagaaataaaagtctgttctttataaactacccagcctttggtattctgttatagcagcacaaaatgaactaagacattctcctcctctttgatatgtractctaccagactgacttgggtgcatcttctgtgcacctataggccttgtgtagatgtgtagacctcagcctgagctctttccacaccatgttgcagttgtgtgcttgtctccctgtggcccatttcccattcataggctaagggagcaaacaggcatctgggacctggccag

SEQ ID NO: 622814 - DNA, 570 bp, Homo sapiens
ttattgatttctagtttcttacttttgtggttggaagagataattgttatgatttcaatatttttgagtttgttaaggcttcttttgtagactaatatattgctataaactgaaagtttatgcctccctacatttcacatgttaaaatgtaataatcaatacattttatgatatgatatgataattaggagccagggcctttyggaggtgactaggtcatgaggtggagccctcatgaatgggattagtgtccttatataagaagctcttgccccttccattagtgaggacagctgtccatgagccaataagcggaccctcactagacagtaaatcttctgccacctttatcttgaacttcccagcctccagaactgtgagaaatacatttctgttgtttaaaagccatttagtttatggcattttgttatagcagcccaaaagggctaagacacatataaggatcctggagaatgttctatgtgtgcttgacatgcatgtgtactctgatgctgttagatgaaatgttctgtatatgtatgttcagtccatttggtctaaagtatagtt

SEQ ID NO: 622815 - DNA, 527 bp, Homo sapiens
caaacatttatatttgttttaragccactgtgagcccctagctgttcttcatttttgtcattgctgagctctcctttccttcccagagctgcaccagatttaaggaagcttatacaatacccagtaaggcaaaccaccttgactatggtctcaccagcacaccccactgtcccagaccacagtggcccctttgatgcccagcagctctctgcttcctccatgacctctgcaagtaggagaatctttgtggaggctgtgaatcccagtcccatcacttctcttcctgtgacatcccttaagtcttccttcctagggtcttctgcctcccagaagaaagccggggagccatgcttctctacgacctttgcacctcgccctcctcctagaccaggggaagtgttttcctacatgaaagcaccaccacacccaccatggcttgtttcacagagacattctttcctcaaattccatctcccctttggaaatcaggcttttagaaaacaccaggaagccttgcacgctaggtc

SEQ ID NO: 622816 - DNA, 527 bp, Homo sapiens
caaacatttatatttgttttaaagccactgtgagcccctagctgttcttcatttttgtcattgctgagctctcctttccttcccagagctgcaccagatttaaggaagcttatacaatacccagtaaggcaaaccaccttgactatggtctcaccagcacaccccactgtcccrgaccacagtggcccctttgatgcccagcagctctctgcttcctccatgacctctgcaagtaggagaatctttgtggaggctgtgaatcccagtcccatcacttctcttcctgtgacatcccttaagtcttccttcctagggtcttctgcctcccagaagaaagccggggagccatgcttctctacgacctttgcacctcgccctcctcctagaccaggggaagtgttttcctacatgaaagcaccaccacacccaccatggcttgtttcacagagacattctttcctcaaattccatctcccctttggaaatcaggcttttagaaaacaccaggaagccttgcacgctaggtc

SEQ ID NO: 622817 - DNA, 586 bp, Homo sapiens
tcttctgcctcccagaagaaagccggggagccatgcttctctacgacctttgcacctcgccctcctcctagaccaggggaagtgttttcctacatgaaagcaccaccacacccaccatggcttgtttcacagagacattctttcctcaaattccatctcccctttggaaatcaggcttttagaaaacaccaggaagccttgcacgctaggtctgttttctaccatactaaggcgcggaggcatggagagacataggaaaaggagaaaaatacacagaaggagaaaaagggggaaaaactctaaattaaaacctccgaaccctgttgctaatatgtatggtagtgataaacatagcactttgcattcctcaggagcatctagcctgctcttcaagaaattgaatcaacatcgkgcaaagagaagaaacttggggtttctttttttattttattttatttttttttttttgagacggagtctcactctattgccaggctggagtgcaatggcacgatctcggctcactgcagcctctgcctcctggttcaagcaattcccctgcctcagcctcccaagtagttgggac

SEQ ID NO: 622818 - DNA, 630 bp, Homo sapiens
accatgcaaattcaaggtagcctcttgttttgttaaatcatggttgtccaaactgccattttgaaaattctcccctcattttgaaactctctttcaccccggctccagcactgccactacatgtgtcaccagttcccctggcaggtgggtggtggcttcccgtgagagagctaagtcagcagccccagaargtgcctcggggagctggtggcaactcattagcctctcttacgcgccttttagtctgtgtcatggacagattacctgccagcacagacacccagtgacaggcacagcccagggcaggagggactgcaatttactatgaaccaatggctactcaacctgtgtgaaccaacagaaatggattttggagggcctggtatatttccacagtggctttctatcataattaatgcacccaacctctcctgtggtcagcaggttgttatctgaactgtgtagattgtgagacatagagatttaataacaggcttggtgctctctggttaatgagtgggctgggagtgagaaatctaaggctctggtgatttcctacagaatgttggacattgtctctcagccttctccaccaggaggatcagagtggttcttccatcaagagttctc

SEQ ID NO: 622819 - DNA, 630 bp, Homo sapiens
accatgcaaattcaaggtagcctcttgttttgttaaatcatggttgtccaaactgccattttgaaaattctcccctcattttgaaactctctttcaccccggctccagcactgccactacatgtgtcaccagttcccctggcaggtgggtggtggcttcccgtgagagagctaagtcagcagccccagaaggtgcctcggggagctggtggcaactcattagcctctcttacgcgccttytagtctgtgtcatggacagattacctgccagcacagacacccagtgacaggcacagcccagggcaggagggactgcaatttactatgaaccaatggctactcaacctgtgtgaaccaacagaaatggattttggagggcctggtatatttccacagtggctttctatcataattaatgcacccaacctctcctgtggtcagcaggttgttatctgaactgtgtagattgtgagacatagagatttaataacaggcttggtgctctctggttaatgagtgggctgggagtgagaaatctaaggctctggtgatttcctacagaatgttggacattgtctctcagccttctccaccaggaggatcagagtggttcttccatcaagagttctc

SEQ ID NO: 622820 - DNA, 611 bp, Homo sapiens
attttgctgtcctcagccttgtcctctagtgttccctgtggagttaataattgggtcaatccctagcacaaatgtgccccctctgttcaaagttttttatttgctcactgtctacccactgacacccggcccctctccaggctactgctccaaaatggatgagccaaccagaccttcccaaccaaattaagcattggcaaagcatcccattacattgggttttcctgggaacagcactatctgtcccaccctgattttccatgtcctccagagcagcactgtcccctggcccctcccatgctgatggaaatgtccagtctctgcatttgccagcrcagtatacccaataggagcagtaactactgagcatttgtaatgtgccagtgtgacttaggaactaaattcttccttttatttcattttaaatcatttaaatgtaaactctatagactcatgtggctagtggctaccacactgaacggggcagctctggatgctgtgagttagactgatgactgtcctcttagtttctagatctccatcccgaacagttctaaaattatttccctttccctcagttctattatgccacacagccaagcttattagtg

SEQ ID NO: 622821 - DNA, 614 bp, Homo sapiens
cttttatggcacaaatgaaaagctcagttgaaggataagaagattaagttgaaaaagtctcccagaaaatagaaaaaaaatgacaaagggatggaaattaggaaagaaaaatactaagaaaatgcaggaattatactaggaggcccaacgtaagcagatcagagaaaccaaacmgaagaaaaatatttatgaaatagtggaaggaaaattcttcagaactgaacaacatgattttccaggttgaaaggctcaccaaatacccagtggtatgggtgaaaatagcccctttttgaatggcacattgtcagaaatttcagatcatctgcaacaaagatctacaaacttacagagaagaaaatacaatttcatacagagaatcaaaacacagaaatattggacttttcaatagcaagactggaagtagatgttttctaaattcccaagggaaagaattttcgacctacaatcctacaaccagccaataaagtcacatttagacattcacatatcaaaaatttaatcatctatcatcctttcctacaaagctactggcacatgtgttcagaaaaacgaggttgtgaaaacaagagaaagaaaaacctggaacccaggaa

SEQ ID NO: 622822 - DNA, 614 bp, Homo sapiens
cttttatggcacaaatgaaaagctcagttgaaggataagaagattaagttgaaaaagtctcccagaaaatagaaaaaaaatgacaaagggatggaaattaggaaagaaaaatactaagaaaatgcaggaattatactaggaggcccaacgtaagcagatcagagaaaccaaaccgaagaaaaatatttatgaaatagyggaaggaaaattcttcagaactgaacaacatgattttccaggttgaaaggctcaccaaatacccagtggtatgggtgaaaatagcccctttttgaatggcacattgtcagaaatttcagatcatctgcaacaaagatctacaaacttacagagaagaaaatacaatttcatacagagaatcaaaacacagaaatattggacttttcaatagcaagactggaagtagatgttttctaaattcccaagggaaagaattttcgacctacaatcctacaaccagccaataaagtcacatttagacattcacatatcaaaaatttaatcatctatcatcctttcctacaaagctactggcacatgtgttcagaaaaacgaggttgtgaaaacaagagaaagaaaaacctggaacccaggaa

SEQ ID NO: 622823 - DNA, 614 bp, Homo sapiens
cttttatggcacaaatgaaaagctcagttgaaggataagaagattaagttgaaaaagtctcccagaaaatagaaaaaaaatgacaaagggatggaaattaggaaagaaaaatactaagaaaatgcaggaattatactaggaggcccaacgtaagcagatcagagaaaccaaaccgaagaaaaatatttatgaaatagtggaaggaaaattcttcagaactgaacaacatgattttccaggttgaaaggctcaccaaatacccagtggtatgggtgaaaatagcccctttttgaatggcacattgtcagaaatttcagatcatctgcaacaaagatctacaaacttacagagaagaaaatrcaatttcatacagagaatcaaaacacagaaatattggacttttcaatagcaagactggaagtagatgttttctaaattcccaagggaaagaattttcgacctacaatcctacaaccagccaataaagtcacatttagacattcacatatcaaaaatttaatcatctatcatcctttcctacaaagctactggcacatgtgttcagaaaaacgaggttgtgaaaacaagagaaagaaaaacctggaacccaggaa

SEQ ID NO: 622824 - DNA, 608 bp, Homo sapiens
gaatcatgggagcagtttcccccatactgttctcgtggtagtaaattggtctcacaagagctggtggttttataaagggaaacccctttcacttagctctcattctctcttgactgccgccatgtaagacgtacctttcaccttctgtcatgattgtgaggcctccccagccacgtggaactgtgagcctattaagcctcttttcctttatagatgacccagttttgggtgtgtctttattagcagcaagaaaacagactaatacagccatcccgattggaacaggtcagaagatttcttcaacatggtaaagataatagactacttaataggcttgaacattgtgaaaggagatttacacaattgggggacatttgggaattaaattcatgatggtcwtatagaaaaataaatgaatcaaacaaaagttaattgttaattttagggaaagcccaacattgcacagaaaaaaaagtaattgtagtatcatgttgtaccacatggctaggctgtgaatagtgttcatatggtcataattatgtaaactccagctaatgatctacccaaaatatgatctaaccctgctgagaggagggggaaggtgggaa

SEQ ID NO: 622825 - DNA, 556 bp, Homo sapiens
ataacattatcatttaaatggatggattgatatatacacacactaaaacacaacttaagaaatgggaaatataaatactgactgaagcaaatagtccaagctgctatatggtaatcaaaataaaataacattaaatttgacaaaaatrttatttaaatgtgtattttctggtacaggcgaatgctgagtttttatttatttttagccctaccttatctatatatgtctacctatattttgtatctatttatagcatggttgacaataatatgaaataaaaaaaactttagcatagtacaataaaacaaagttaacatttgtttcacaataaaagtattgctaaattgccataagattatgtaccttaccaagacatacccaacataggggtccaaaaaattaaggttagattcttagtctcattaacaagaaatcaacttagagttcttgctttcaaataatggaatcaatctagctgttttagctgttttaaactaaaagtcactttgggagctaatctcacaaaactgaaataagcaagaacaaaaggcaatgc

SEQ ID NO: 622826 - DNA, 400 bp, Homo sapiens
tcagttcccaggaggaagtggcttctgaagagcacatttggatgcgggagagtgacagcgggaggggcaccccacaggaaggaagccccttgacagagggctggcrgattaacgcagcacacaggtaagcatgggacccaggaaaggctcaagtttgggcacattttctaccaagtggaactaactggtttttcttgactgaggagagggaagaggagagaagttgaggctggactgcagggactggcacctcttgatttgcccgaggttctctggcacctgaagcacagcctgcccctcaacagtcaccaaggcactgtgtcttatcggggaggataacgcttcctgtggggttcatcctgcacagcgtacaaaatcttccgcttcactatcacgccat

SEQ ID NO: 622827 - DNA, 547 bp, Homo sapiens
ggcggtttttctctcatctcagaattgaacaaatgtacaatcgggttttataccgagacattcagttcccaggagcaggcaggagacagtggccttcctctatctcaactgcaagaggctttcctcttttactaatccacctcagcacagaccctttacgggtgtcgggctgggggacrgtcaggtctttctcatcccacgaggccatatttcagactatcacatggggagaaaccttggacgatacccagctttcaagggcagaagtccctgcggctttccgcagtgcactgtgcccctggtttattgagactagagaatggcgatgacttttaccaagtaaactgcttgtaaacattttgttaacaaggcacgtcctgcacaaccctagatcccttaaaccttgatttcatacaacacatgtttttgtgagctccaggttgggtcaaagtagctggggcaaagtggctggggcaaagctacaaattaacaacatctcagcaaagcaattgtctaaagtacaggtcttttccaaaatggagtctct

SEQ ID NO: 622828 - DNA, 547 bp, Homo sapiens
ggcggtttttctctcatctcagaattgaacaaatgtacaatcgggttttataccgagacattcagttcccaggagcaggcaggagacagtggccttcctctatctcaactgcaagaggctttcctcttttactaatccacctcagcacagaccctttacgggtgtcgggctgggggacagtcaggtctttctcatcccacgaggccatatttcagactatcacatggggagaaaccttggacgatacccagctttcaagggcagaagtccctgcggctttccgcagtgcactgtgcccytggtttattgagactagagaatggcgatgacttttaccaagtaaactgcttgtaaacattttgttaacaaggcacgtcctgcacaaccctagatcccttaaaccttgatttcatacaacacatgtttttgtgagctccaggttgggtcaaagtagctggggcaaagtggctggggcaaagctacaaattaacaacatctcagcaaagcaattgtctaaagtacaggtcttttccaaaatggagtctct

SEQ ID NO: 622829 - DNA, 547 bp, Homo sapiens
ggcggtttttctctcatctcagaattgaacaaatgtacaatcgggttttataccgagacattcagttcccaggagcaggcaggagacagtggccttcctctatctcaactgcaagaggctttcctcttttactaatccacctcagcacagaccctttacgggtgtcgggctgggggacagtcaggtctttctcatcccacgaggccatatttcagactatcacatggggagaaaccttggacgatacccagctttcaagggcagaagtccctgcggctttccgcagtgcactgtgcccctggtttattgagactagagaatggcgatgacttttaccaagtawactgcttgtaaacattttgttaacaaggcacgtcctgcacaaccctagatcccttaaaccttgatttcatacaacacatgtttttgtgagctccaggttgggtcaaagtagctggggcaaagtggctggggcaaagctacaaattaacaacatctcagcaaagcaattgtctaaagtacaggtcttttccaaaatggagtctct

SEQ ID NO: 622830 - DNA, 547 bp, Homo sapiens
ggcggtttttctctcatctcagaattgaacaaatgtacaatcgggttttataccgagacattcagttcccaggagcaggcaggagacagtggccttcctctatctcaactgcaagaggctttcctcttttactaatccacctcagcacagaccctttacgggtgtcgggctgggggacagtcaggtctttctcatcccacgaggccatatttcagactatcacatggggagaaaccttggacgatacccagctttcaagggcagaagtccctgcggctttccgcagtgcactgtgcccctggtttattgagactagagaatggcgatgacttttaccaagtaaactgcttgtaaacattttgttaacaaggcacgtcctgcacaaccctagatcccttaaaccttgatttcatacaacacatgtttttgtgagctccaggttgggtcaaagtagctggggcaaagtgkctggggcaaagctacaaattaacaacatctcagcaaagcaattgtctaaagtacaggtcttttccaaaatggagtctct

SEQ ID NO: 622831 - DNA, 613 bp, Homo sapiens
gcactttgggaggctgaggcgggcagatcaactgaggtcaggagttctagactgagcaacatggtgaaaccctatctctactaaaaatacaaaatttagctgggtgtggtggtgcatgcctgtagtcccagctactcaggaggcsgaggcagaagaatcgcttgaacctgggaggtggaggttgtagtgagcctagtttgagccactgcaatccagcctgggtgacagagcgagactccatctcaagaacaaacaaacaaaatatgtcaaagaaatatattttaggataaaatacttggacttctttcaaggcctgctatctgtcatgtgatgctatattaaagtcaggctggaatttgctgtcattgctacaagacgtcttaagatctctgttttggtgttaatgctggtcagctatgcctggatcccaaagggaggagggtataatgaggcatgtccagctccctcttcccatcatggcctgcactagtttttcaggttaattaagaaagcctttggctaagaggaggggtgtattcaattggtcggtcggtggggggggggggcgcttagaattttattttaggcttacattcctcacaaaacttctagg

SEQ ID NO: 622832 - DNA, 571 bp, Homo sapiens
ggtccatcagaaagtcattcattaatatgctgcctactgtttaaaaggtagggaaggatataatcatttgagaaagaggcaaggagaaagacttttcactgttaccttttaatcttagggccatgttgtttagtcagcttgggctgccataaccaaataccacagactgagtggcttaacagaaatttatcttcttacagttctggaggctgaaagtccaaaacaaaggtgacagsaggcttaggttcgtgaggcctctcttcctgacttgtagatggcctccttcccactgtgtcctcacatgatctttcctctgcatgcatgcactccccatgtctcctcttcttataaggacactggttctttgtattagggccccactcttatgaccgcatttaaccttaattaccttctcagaagccctatctccaaatagagtcatattgaggattagagattcaaaatatgtattttggagggaggggggacaacaaaacataacaatgtgaatataatacttattcaaaaaatgaaatgagtttaaaaataaaaaagcaaacattatcctgct

SEQ ID NO: 622833 - DNA, 571 bp, Homo sapiens
attctcctccctcagcctcagtcctcagtagctagggctacaggcatgcacaaccaagcccagctaatttttgtaattttttagtagatacggggtttcaccgtgttggccaggctggtcccgaacttctgacctcaagtgatycgtccactttggcttcccaaagtgctgggattacaggtgtgagccaccatgtccagctgacatggcaatgtttaaataaaatatatcacattggtggttacacagaaaagagattagatgaagatatcaggaagtggagagacacaagattctgaactagggcatggtggtagggatggattctagaatcaagaattaggtagggcttaatatagagaggaagaggtaaaggagaacctataggtctcatcctaggtgattgaaatgcaataaattaagaaagtccagggaaattgtgaggtttctaatctcaccctatcctccaggatcctgaaatatcctacaattatggcagtagttggaatggagagtgatagtgaaagctagagacttccatgaaatagaatgacattagggctccataagc

SEQ ID NO: 622834 - DNA, 571 bp, Homo sapiens
attctcctccctcagcctcagtcctcagtagctagggctacaggcatgcacaaccaagcccagctaatttttgtaattttttagtagatacggggtttcaccgtgttggccaggctggtcccgaacttctgacctcaagtgatccrtccactttggcttcccaaagtgctgggattacaggtgtgagccaccatgtccagctgacatggcaatgtttaaataaaatatatcacattggtggttacacagaaaagagattagatgaagatatcaggaagtggagagacacaagattctgaactagggcatggtggtagggatggattctagaatcaagaattaggtagggcttaatatagagaggaagaggtaaaggagaacctataggtctcatcctaggtgattgaaatgcaataaattaagaaagtccagggaaattgtgaggtttctaatctcaccctatcctccaggatcctgaaatatcctacaattatggcagtagttggaatggagagtgatagtgaaagctagagacttccatgaaatagaatgacattagggctccataagc

SEQ ID NO: 622835 - DNA, 571 bp, Homo sapiens
attctcctccctcagcctcagtcctcagtagctagggctacaggcatgcacaaccaagcccagctaatttttgtaattttttagtagatacggggtttcaccgtgttggccaggctggtcccgaacttctgacctcaagtgatccgtccactttggcttcccaaagtgctgggattacaggtgtgagccaccatgyccagctgacatggcaatgtttaaataaaatatatcacattggtggttacacagaaaagagattagatgaagatatcaggaagtggagagacacaagattctgaactagggcatggtggtagggatggattctagaatcaagaattaggtagggcttaatatagagaggaagaggtaaaggagaacctataggtctcatcctaggtgattgaaatgcaataaattaagaaagtccagggaaattgtgaggtttctaatctcaccctatcctccaggatcctgaaatatcctacaattatggcagtagttggaatggagagtgatagtgaaagctagagacttccatgaaatagaatgacattagggctccataagc

SEQ ID NO: 622836 - DNA, 571 bp, Homo sapiens
attctcctccctcagcctcagtcctcagtagctagggctacaggcatgcacaaccaagcccagctaatttttgtaattttttagtagatacggggtttcaccgtgttggccaggctggtcccgaacttctgacctcaagtgatccgtccactttggcttcccaaagtgctgggattacaggtgtgagccaccatgtccagctgacatggcwatgtttaaataaaatatatcacattggtggttacacagaaaagagattagatgaagatatcaggaagtggagagacacaagattctgaactagggcatggtggtagggatggattctagaatcaagaattaggtagggcttaatatagagaggaagaggtaaaggagaacctataggtctcatcctaggtgattgaaatgcaataaattaagaaagtccagggaaattgtgaggtttctaatctcaccctatcctccaggatcctgaaatatcctacaattatggcagtagttggaatggagagtgatagtgaaagctagagacttccatgaaatagaatgacattagggctccataagc

SEQ ID NO: 622837 - DNA, 634 bp, Homo sapiens
caaggctaggccagggacaaagaaatccagtaataagtaaggattattagcccatagggaactcaaaattttaaataataaagcaatttagttagggctgtggctgccatggatttagtccacctaggagaagagagrgtaaagatattatcaatatttggaagttataccctaaaacttgaaattcaggactgcctcctgaaaaaaattaaactgaaaataactctgagaggtggaagttgttcctaaaaatatcaggcactgtcctgggcaatgacttgtaaataggaagctgaaattgtccttgaatcagagtgcagctctggttgggatctctcagtatttaaacctgtggcattgacaaccatattaagatatctaaggaagagaacaaaaagaaaaggaataatacagctacctgatcctcatgcattctgtcacactgtaactccagagattgacccaaaggacttcaagagttccgtttctgggtgtaagttctttgtagagagcattgattcacactagtgactgttttcacagttacattttgataaaatttccaactgacagaaaagctgcaagaatagtacaaagaattcctgtttactcttaacccaaatgttaatgttaa

SEQ ID NO: 622838 - DNA, 564 bp, Homo sapiens
ttatgaaattaattacaattaatgattaaagctgggcacagtttttacacttgatcttagctgaaaggctgagaagtgatgggcacagttttygtatgtttttctagtttctaatagctaccatcatctgtattgtctttcatctccactgagaatgtgaaccacctaagcacaggaattttgtctatcacctcccctccatcatgccatatatatcattgagaaagtgctcaataactgcttgtggaaaaaaattacataatttaataaaagaaaagaagaccgattttgatcttctcagactcacttattgcaaatcttaaatttgtgattgatatagttatttcaaagggtatcatgaatcattttaagcttaatgtccttaaattaaaagaaaattaccctgtcacaaagtttctactcaaagaagcgttaggatacattatatcaacaaagatcccttctctagattgttccaaggtagaattctttggaaagaacatcaacataaccttttagataataatttcccaattgttacaataacattttagattattacaa

SEQ ID NO: 622839 - DNA, 564 bp, Homo sapiens
ttatgaaattaattacaattaatgattaaagctgggcacagtttttacacttgatcttagctgaaaggctgagaagtgatgggcacagttttcgtatgtttttctagtttctaatagctaccatcatctgtattgtctttcatctccactgagaatgtgaaccacctaagcacaggaattttgtctatcacctcccctccatcatgccatatatatcattgagaaagtgctcaataactgcttgtggaaaaaaattacataatttaataaaagaaaagaagaccgattttgatcttctcagactcacttattgcaaatcttaaatttgtgattgatatagttatttcaaagggtatcatgaatcattttaagcttaatgtccttaaattaaaagaaaattacsctgtcacaaagtttctactcaaagaagcgttaggatacattatatcaacaaagatcccttctctagattgttccaaggtagaattctttggaaagaacatcaacataaccttttagataataatttcccaattgttacaataacattttagattattacaa

SEQ ID NO: 622840 - DNA, 355 bp, Homo sapiens
ttctaccttcaaacatgtgtttgaaattttaagagaataaaaacaatctatttttttaaaacaaaatgcttaccttttcattgttttttatttctgattttccaagttttcttttattatttatttatttattttttgagacagagtttcactcctgttgctcaggctggagtgcaatggcagatctcagctcactgcaacctctgcctcccaggttcaagygattcttctgcttcagcctcctgagtggctgggattacaggcatgcgccaccatgcccagctaattttgtatttttagtagagacggggtttctccatgttggtcaggctggtctcgaactcctgacctcagg

SEQ ID NO: 622841 - DNA, 457 bp, Homo sapiens
aaactgggaaatgaaaatgaggcacarataaaactttgatggcatttatagtaatagttgaaagaactgacacactccagagatgtaagacttccttcaccaactcctacctcaccccaaccaagagtaaattgctgtgaataaccttgcaacattaatcccgggatgataaacatccctaacattattgatccctgagatgtaagcccctccaggcattgatctcttttgcctatctcttccccatactaatgcctgcttgctcttccataatcaattttccaaagttcccactaccaaaacttctcctatgccacctagaatctctgttcccaagtagacaaactctccttctctctaccattttgcctccagtcttctcaactacaatttattttgcacatcttacatttttcaaggtcagagggcactctctcattaatggcactctttcact

SEQ ID NO: 622842 - DNA, 414 bp, Homo sapiens
aagttaaaataaaattattaaacaaaatttaaatttaatttaagttaaatacttgtaaagactttgcctatttgtgagcttagttactgcacacagtttcttgcagagagatttttgtcagtgactttcacattttaaataatatttaaaatataattgaatatgttttaataaattactgttaagaataagtctatcggctgggcatgatggctcatgcctgtaatcccagcactttgggaggccgaagcakttggattgcttgagctcaggagttcaagaccagcctgggcaacatgacgaaaactatctctacgaaaaataaaaaaaaaaaaaaaaattagccagttgaggtggcacacacctgtggtccccactacacaggaggctgaggtgggaggattgcttgaaccc

SEQ ID NO: 622843 - DNA, 414 bp, Homo sapiens
aagttaaaataaaattattaaacaaaatttaaatttaatttaagttaaatacttgtaaagactttgcctatttgtgagcttagttactgcacacagtttcttgcagagagatttttgtcagtgactttcacattttaaataatatttaaaatataattgaatatgttttaataaattactgttaagaataagtctatcggctgggcatgatggctcatgcctgtaatcccagcactttgggaggccgaagcagttggattgcttgagctcaggagttcaagaccagcctgggcaacatgacraaaactatctctacgaaaaataaaaaaaaaaaaaaaaattagccagttgaggtggcacacacctgtggtccccactacacaggaggctgaggtgggaggattgcttgaaccc

SEQ ID NO: 622844 - DNA, 323 bp, Homo sapiens
atttattcctgacaataaatgtatgaagtctccatttaacaatgaggaaactaaggcacagagaggtaaagttacacatagagcaaagactgaaaaaagaaattactccaaagcctgtgctgctaaggcttcatcacattgtctgcattccattgcttttcaatttcctgtggcattaataacaatagtgagaatggcaagaatgggamaaaagtataaggaaagagtattaattaggactagatttgattcatgtaacagagaacctaaaactgatttttaaagacaaatttatttatatctcatatgaaataaatgcagaa

SEQ ID NO: 622845 - DNA, 628 bp, Homo sapiens
cccttcttttttactttcctctgtggttgcttggcaaaatcacaaccttgattcagttcaactttttgcattccacacctgcactcgtgcaactaaatgtagctggagggaaaaacgcatcttcctggactggtctgactttaaattagtaagaatgaatctcraatgcactcaatgtcaccaggcatttgtaagagggtttattgggctagtctgattttaaatcagtgataatgaacctcaaatgcactcagtgttaccaggcatttgtaagaggctttacactcccaggagttatcattcaccctccttctctcctagatgatttactgtcttcttgttttgccttaaacttgaaacacatttcccctatctttccctccttgctttctactttactaaaatgattcgaaaatcagaagagaccctccatagacttttgcatccaactatacaccaccagtatctgccacatcttgcattcttgcctgtaaccagaggtaaactgtaatgctccaatctaaatccaaagccaatctgtctacattattgactggatcccatttttcatcactccttccatcccacaaaaatcaatctttttactcacacaactgggtcatactca

SEQ ID NO: 622846 - DNA, 628 bp, Homo sapiens
cccttcttttttactttcctctgtggttgcttggcaaaatcacaaccttgattcagttcaactttttgcattccacacctgcactcgtgcaactaaatgtagctggagggaaaaacgcatcttcctggactggtctgactttaaattagtaagaatgaatctcaaatgcactcaatgtcaccaggcatttgtaagagggtttattgggctagtctgattttaaatcagtgataatgaacctcaaatgcactcagtgttaccaggcrtttgtaagaggctttacactcccaggagttatcattcaccctccttctctcctagatgatttactgtcttcttgttttgccttaaacttgaaacacatttcccctatctttccctccttgctttctactttactaaaatgattcgaaaatcagaagagaccctccatagacttttgcatccaactatacaccaccagtatctgccacatcttgcattcttgcctgtaaccagaggtaaactgtaatgctccaatctaaatccaaagccaatctgtctacattattgactggatcccatttttcatcactccttccatcccacaaaaatcaatctttttactcacacaactgggtcatactca

SEQ ID NO: 622847 - DNA, 628 bp, Homo sapiens
cccttcttttttactttcctctgtggttgcttggcaaaatcacaaccttgattcagttcaactttttgcattccacacctgcactcgtgcaactaaatgtagctggagggaaaaacgcatcttcctggactggtctgactttaaattagtaagaatgaatctcaaatgcactcaatgtcaccaggcatttgtaagagggtttattgggctagtctgattttaaatcagtgataatgaacctcaaatgcactcagtgttaccaggcatttgtaagaggctttacactcccaggagttatcattcaccctccttctctcctagatgatttactrtcttcttgttttgccttaaacttgaaacacatttcccctatctttccctccttgctttctactttactaaaatgattcgaaaatcagaagagaccctccatagacttttgcatccaactatacaccaccagtatctgccacatcttgcattcttgcctgtaaccagaggtaaactgtaatgctccaatctaaatccaaagccaatctgtctacattattgactggatcccatttttcatcactccttccatcccacaaaaatcaatctttttactcacacaactgggtcatactca

SEQ ID NO: 622848 - DNA, 628 bp, Homo sapiens
cccttcttttttactttcctctgtggttgcttggcaaaatcacaaccttgattcagttcaactttttgcattccacacctgcactcgtgcaactaaatgtagctggagggaaaaacgcatcttcctggactggtctgactttaaattagtaagaatgaatctcaaatgcactcaatgtcaccaggcatttgtaagagggtttattgggctagtctgattttaaatcagtgataatgaacctcaaatgcactcagtgttaccaggcatttgtaagaggctttacactcccaggagttatcattcaccctccttctctcctagatgatttactgtcttcttgttttgccttaaacttgaaacacatttcccctatctttccctccttgctttctacwttactaaaatgattcgaaaatcagaagagaccctccatagacttttgcatccaactatacaccaccagtatctgccacatcttgcattcttgcctgtaaccagaggtaaactgtaatgctccaatctaaatccaaagccaatctgtctacattattgactggatcccatttttcatcactccttccatcccacaaaaatcaatctttttactcacacaactgggtcatactca

SEQ ID NO: 622849 - DNA, 466 bp, Homo sapiens
tgtttttttcctctctcaaagctttcaagatctctttatccccagagtgctacagggtgctttttaaaggtttatttatttagttttttttattgtacctgttcaatctggtcattcattctcttcagttcttagaaacttattatgtaccttacaactttctccccatggttctctctggtctctctggaacacctgtagattacgtgataggtctcctagtgattctttaattttccgatcttctgtcttccatttcccacctctgtttccttgttttactttctgggatgttcccctcaactttrttttctaagtctgccattgaattctttatttctgccatctctttgttcatatccaagaactcttttttgttctctgaacgttctctttcagaatctcctgtattttttttcacaaatgcactgtatcttttcatttctctaaagaccttaatttaatt

SEQ ID NO: 622850 - DNA, 466 bp, Homo sapiens
tgtttttttcctctctcaaagctttcaagatctctttatccccagagtgctacagggtgctttttaaaggtttatttatttagttttttttattgtacctgttcaatctggtcattcattctcttcagttcttagaaacttattatgtaccttacaactttctccccatggttctctctggtctctctggaacacctgtagattacgtgataggtctcctagtgattctttaattttccgatcttctgtcttccatttcccacctctgtttccttgttttactttctgggatgttcccctcaactttattttctaagtctgccattgaattctttatttctgccatctctttgttcatatccaagaactcttttttgttctctgaacgttytctttcagaatctcctgtattttttttcacaaatgcactgtatcttttcatttctctaaagaccttaatttaatt

SEQ ID NO: 622851 - DNA, 613 bp, Homo sapiens
taggtattttctaagaaaattgaggttctctctccacctcttctcttttcttttggagccctcaccatcattgcttttaatgattgtttatgacaatgtaggctttttatagcatgcacttcaaaactcttctatcctctacccatcactcaattccaaagccaattccacatttttagttatttgttatagcagtacctcctgtctcagtaccaacgtttatcttagtccattcaagctgctataactaacatagaccgggtagtttacaaataacagaaatttatttcttacagttatggaggcygcaaattccaagattaagctgctgacagattcagtgtcgggagagggttgatttcctggttcatagatcatcttcttactgtgtccttatatggcagaagaggtgaagaaactctccagggcaagggagccctttggagtctcttttataaggcatcagttttattcatgagatttctgccttcctgacccaatcacctaccaaagattctaccacctaatatcatcacgttggggattaggatttcaacatatgaattttggggggacacaaacattctgtttaatgcagtacaattttataggc

SEQ ID NO: 622852 - DNA, 613 bp, Homo sapiens
taggtattttctaagaaaattgaggttctctctccacctcttctcttttcttttggagccctcaccatcattgcttttaatgattgtttatgacaatgtaggctttttatagcatgcacttcaaaactcttctatcctctacccatcactcaattccaaagccaattccacatttttagttatttgttatagcagtacctcctgtctcagtaccaacgtttatcttagtccattcaagctgctataactaacatagaccgggtagtttacaaataacagaaatttatttcttacagttatggaggccgcaaattccaagattaagctgctgacagattcagtgtcgggagagggttgatttcctggttcatagatcatcttcttactgtgtccttatatggcagaagaggtgaagaaactctccagggcaagggagcyctttggagtctcttttataaggcatcagttttattcatgagatttctgccttcctgacccaatcacctaccaaagattctaccacctaatatcatcacgttggggattaggatttcaacatatgaattttggggggacacaaacattctgtttaatgcagtacaattttataggc

SEQ ID NO: 622853 - DNA, 613 bp, Homo sapiens
taggtattttctaagaaaattgaggttctctctccacctcttctcttttcttttggagccctcaccatcattgcttttaatgattgtttatgacaatgtaggctttttatagcatgcacttcaaaactcttctatcctctacccatcactcaattccaaagccaattccacatttttagttatttgttatagcagtacctcctgtctcagtaccaacgtttatcttagtccattcaagctgctataactaacatagaccgggtagtttacaaataacagaaatttatttcttacagttatggaggccgcaaattccaagattaagctgctgacagattcagtgtcgggagagggttgatttcctggttcatagatcatcttcttactgtgtccttatatggcagaagaggtgaagaaactctccagggcaagggagccctttggagtctcttttataaggcatcarttttattcatgagatttctgccttcctgacccaatcacctaccaaagattctaccacctaatatcatcacgttggggattaggatttcaacatatgaattttggggggacacaaacattctgtttaatgcagtacaattttataggc

SEQ ID NO: 622854 - DNA, 613 bp, Homo sapiens
taggtattttctaagaaaattgaggttctctctccacctcttctcttttcttttggagccctcaccatcattgcttttaatgattgtttatgacaatgtaggctttttatagcatgcacttcaaaactcttctatcctctacccatcactcaattccaaagccaattccacatttttagttatttgttatagcagtacctcctgtctcagtaccaacgtttatcttagtccattcaagctgctataactaacatagaccgggtagtttacaaataacagaaatttatttcttacagttatggaggccgcaaattccaagattaagctgctgacagattcagtgtcgggagagggttgatttcctggttcatagatcatcttcttactgtgtccttatatggcagaagaggtgaagaaactctccagggcaagggagccctttggagtctcttttataaggcatcagttttattcatgagatttctgccttyctgacccaatcacctaccaaagattctaccacctaatatcatcacgttggggattaggatttcaacatatgaattttggggggacacaaacattctgtttaatgcagtacaattttataggc

SEQ ID NO: 622855 - DNA, 622 bp, Homo sapiens
ctaatcttacatgatacagaatatggtaactgcaataagcatgctgaaagtaagatgatccaaatatatagcattgagttgaagcagagaggaggtaaacagtgagatttcagataccaaaggttagggaattgatgacttacttatatctgcccaatgtaacattaggagaaataggaaagggtgtgtctgtagttgtggaattttttttttcttgatgcttgcagttaactcctattagagataaactccggttagtgatcatagtttttaagcagagataacaagggaacacaaatttactaagggaagcactttcccctgtaacatgcttgactaagagtctgtaatgtagagagagaatgagcttctgtgcttcaagttgaagcagtcgtgagtagtggggtttgaagggtagtcttttgtttttgttttgtttttttcctcattagagcaatgcacatctaaaccacaacgagataccatttcagaccagtcagaatggtgattattaaaaagtaaaaagaataacatgctgctgaagttgtggaaagaaaggaacacttacacackgctggtgggagtgtaaattagttcaaccattgtggaagacagtgtggtt

SEQ ID NO: 622856 - DNA, 467 bp, Homo sapiens
atcatgtaaataaaaattaattgtatcatttttattcatttcttaaatatctgccttttgattggagtatttcatccatttacatccaatgtcattagttataggtgaggatttatgttcgctattttgtgattttatatgtgcgtgtgtgtgtgtgtgtgtgtgtgcgcgcgcactatgtcttttctctttgtctatccctctattattgcttttctttgtgytaaacagtgtacatttaaattctacttagtgcgtgtgtgtgtgtgcacgtgtgtgtgtattagttattttcttagtggttgacctcccctgaaatgtttagtaataaatagttgacaatctcatttttgttgtttttttaagttgcttattttgcttagtaggcaattatcttggctattcttcgagttctaattgtttcattattctgaggggcagggaataaaatctgtatgagcttcttt

SEQ ID NO: 622857 - DNA, 606 bp, Homo sapiens
atatactagcaaaccaaacagaatttagcagcatattaagataattataaaacatgagcaaatggaatttattcctggagtgcaaggatgattygagatgtgaaaattgattaatgtcatatgccacattaatggaataaggaaaaaatacatatgttaatctcagttgatgcagaaaaggtatttgacaacatacaagacacttttatgataaatagaacactcagcaaaatataaatagaaaaaagatatatataataagagccacatatgaaaaacctacaataaaattatacttaacagtgaaggactgaaagtttttgtgtaaggttaaggaacaagacaaagatgcttgctttcaccatttctacttacatagtattggaaattcaattaagagacattagacaaaaaaaaaattaaaaggcatccatattagaaagaaagaagtaaaattatctttgttgacagatgatatggtcttacatagatacaattcttatttttccacaaaaaaatgataaaactgataaattcagcaaagtggtagaataagtcaacatgcaaaaatcgatttcatttccattcactaacaatgaacaatcc

SEQ ID NO: 622858 - DNA, 573 bp, Homo sapiens
taactattgcatgtcctcttattttacttttgtactattaattctcctcacagcagccagaggagctttataaatataaaaataaaatatgscttcttaaaacattcttatagccctctgagatttggcttcccaccacctccagcctcatctcttccactgttcctccacacctcaatacacctcagccatataagcgtaatttatgtgacttaaacagagttctttttcaattgaactttctatagtttctaataaagtaatactccttttctcaaggtatgctttttataatttggaatttagcttaaatagtttttcttagattttgcctgacaaccataccaatggatcatatatgtcagtatttctatgtattttatagactaaaattaacatctttgattgtctatggtattcttttcccatttgaatttaaatgtatttaaatgtctcttttgttcgaatgtgtagagtagctcctcactaacattagatgatcaataactatttgtagaatgaataaatgttttatatttaataatccaataatttctacatggtacatttata

SEQ ID NO: 622859 - DNA, 573 bp, Homo sapiens
taactattgcatgtcctcttattttacttttgtactattaattctcctcacagcagccagaggagctttataaatataaaaataaaatatgccttcttaaaacattcttatagccctctgagatttggcttcccaccacctccagcctcatctcttccactgttcctccacacctcaatacacctcagccatataagcgtaatttatgtgacttaaacagagttctttttcaattgaactttctatagtttctaataaagtaatactccttttctcaaggtatgctttttataatttggaatttagcttaaatagtttttcttagattttgcctgacaaccataccaatggrtcatatatgtcagtatttctatgtattttatagactaaaattaacatctttgattgtctatggtattcttttcccatttgaatttaaatgtatttaaatgtctcttttgttcgaatgtgtagagtagctcctcactaacattagatgatcaataactatttgtagaatgaataaatgttttatatttaataatccaataatttctacatggtacatttata

SEQ ID NO: 622860 - DNA, 563 bp, Homo sapiens
gaaggtttttagaaatcagaccttagcttagtagacaatctaatataaatgtttgtattttttattttttttttcaaatagattaaaatagcgatacacccacatgattaatttggcagactggaaaacattgacctaattggtactcttagtcattaggaagcaattcctggctatgtgcatgaaacatcagcttcatagtatgtgtatgtgtgtatacagaaacaacttaatattgatcattatccaaaatgcaattaaagtaataaaaaacagtctaagattgtgtaagtaaaaatgggttaaggttgacagaaaagaaataaaactggyaaaagtcagaaatgtttttctactaaatttatgagataatattgtttgaccattaaaaataactctatatagaatactaaaagatatgctgatacaagtaaattaataatattttgtttagcttttttgaaagctcctcaaattctttgatatctatggttttgctgagacagggctagaaaacttagaaaataaataaaaacaaaatatataaattttaaaattgtaaa

SEQ ID NO: 622861 - DNA, 616 bp, Homo sapiens
ttgactgttttttacaaaggggttttgggtaaagaactttgccaagtggatttggaatgtggttgctgtttatagtaatgagcacccaaagagagtagagagagataaagaagggctccatttttccatctcaacaaaaactcatgggaacaatgtctctccaaatcttcccataccagagaattcctggttggctccagccatgactgcactcaacagcgttcacagctacatagccacaacctacctcctggccacatttgtatcaagatgcccagtccatgttgctgatatttacttactactggtaatttggcttctctaaagttgacagtttgttttatttgtattttaaaaatttatttgcatatcatcagagagtattcctggtttgcttttggagcaaaataccaaactatagacacaaaaatatcccagcaactattatcattagcttgttttccttagcactgaagtaactccctgaaacttgctagtgattatttgataacaagatcaccacgttgtctgtaaaatggtgatctaactaaatakgctaattttctcactttttagaaattcttccctgctaggttatcctgagaataggacctga

SEQ ID NO: 622862 - DNA, 471 bp, Homo sapiens
tagtggtctccatagaaatgtgtgcattttctcattttattcaacaaatatttatcaagtgcctcctgcatgccaggtgtactgttctaggccctggggatgcggcagggaacaaagtccattaaaaactctgccctcatggagctgatatccttggggagaggaaggaagatgataagcaagayacatagaaatgcaagtggccaggcacagtgacacacgcctgtaatcccagcactttgggaggctgaggcaagtggatgacttgaggccaggagttcgagaccagcctgcccgttatggtgaaaccccatctctactaaaaatacaaaaattagccaggcgtggtggtgggcacctgtagtcccagctatctgggaggcttgaggcatgagagttacttaaacccaggtggcagaggttgcagtgagcctagatcatgccactgtactccagcctagacaacagagt

SEQ ID NO: 622863 - DNA, 471 bp, Homo sapiens
tagtggtctccatagaaatgtgtgcattttctcattttattcaacaaatatttatcaagtgcctcctgcatgccaggtgtactgttctaggccctggggatgcggcagggaacaaagtccattaaaaactctgccctcatggagctgatatccttggggagaggaaggaagatgataagcaagacacatagaaatgcaagyggccaggcacagtgacacacgcctgtaatcccagcactttgggaggctgaggcaagtggatgacttgaggccaggagttcgagaccagcctgcccgttatggtgaaaccccatctctactaaaaatacaaaaattagccaggcgtggtggtgggcacctgtagtcccagctatctgggaggcttgaggcatgagagttacttaaacccaggtggcagaggttgcagtgagcctagatcatgccactgtactccagcctagacaacagagt

SEQ ID NO: 622864 - DNA, 523 bp, Homo sapiens
ggtgatgtgacttagtcaaggtcacccagcttaggagggatgaaagccaggaagtggcccactgctctttaatttattttttattttatttttctgcgacagggtctcactctgtcactcgctgaagcacagtggtgcaaacacggctcactgcagcctcaacttcctgggatcaagcaatcctctcagctcagcctcttgtgtagctgggaccacagacatgcactaccatgcccagctaattttttatgtttttttgtgagacagggatctcactttccccaggctggtctcgaactcctgggcttaaatcccaaagtgctgtgattacaggcgtgagccaccatgtcyggccgctccactgctcttaaccacgtaacatgtccctagtgatccatgtgactgtctcgagggtaaaaattaaaagcctctggaatgaactcttctgctgcctcttagctcgtggagcacagggactgggtctgatgtgttcacagctttatcccaatacccagcacagtac

SEQ ID NO: 622865 - DNA, 523 bp, Homo sapiens
ggtgatgtgacttagtcaaggtcacccagcttaggagggatgaaagccaggaagtggcccactgctctttaatttattttttattttatttttctgcgacagggtctcactctgtcactcgctgaagcacagtggtgcaaacacggctcactgcagcctcaacttcctgggatcaagcaatcctctcagctcagcctcttgtgtagctgggaccacagacatgcactaccatgcccagctaattttttatgtttttttgtgagacagggatctcactttccccaggctggtctcgaactcctgggcttaaatcccaaagtgctgtgattacaggcgtgagccaccatgtccggccgctccactgctcttaaccacgtaacatgtccctagtgatccatgtgactgtctcgagggtaaaaattaaaagcctctggaatgaactcttctgctgcctcttagctcrtggagcacagggactgggtctgatgtgttcacagctttatcccaatacccagcacagtac

SEQ ID NO: 622866 - DNA, 584 bp, Homo sapiens
tttaattttattcttatttttattatttttagagacagggtctggctctgtcttccaggctggagtgccatggtgcaatcatagctcactgcaccctccacctcccaggctcaagcaatcctcctccctcaccctcatgagtagctgggactacaggcacgcactacctcccctggctaatttttttttatttttttgtagagacggggggtggggggtctcactttgttgcccaggctggtcttgaacttcttacctcaagcaatcctcctatctctgcttcccaaagtgctacaatgacaggcatgagctaccatgcccagcctaggttttaaagatcacactggctgctgtggtgaggctggctcagaggggatcaggaggagaagcaggaaggcccgttgggagacggatgaagcctggagcaggaaatgttggaggcctggggcraggccatggcagcggacagacacatgtagacagaatcaagagcaactctagaggcagaattgacaggtcctgtcgaggcatcagtccaggcttagtaatagtcaccatcgttgacttcctgtcactcacattgg

SEQ ID NO: 622867 - DNA, 551 bp, Homo sapiens
aaagacatggttgcagtttgtctgtatcatctatttaaaatggacaatgtaggtacccttagaggcagcaayttttgtcttgtatccaaccaagacaaacactctgacattgcttgaggaagtatgtacatttcatcttggattgtgatagtaaaaactggaatcaacctggagttcatcatcagggaactggctgaacaagcagtgatatttccgattctggctttccatcccgtcactaaaacagagtgtctgagcatatggcttgggcagagggagcgaaggagcccaggaaaggcagtgaggtcggaggggtgggcagagcccatgcagggccttgggggtcactgcagagtttagattttactttaggtgcacagtgaggcagactgtacccaatgcaacgttaacgactcctagtggactgagcaaaaagaaggtgctgtataaatattgcttgttgctgccatcattgttgttactaaagtctggcaccatcgatggcataaaaccccttcacacctgttattgagaagcatcaaggtaaggaa

SEQ ID NO: 622868 - DNA, 551 bp, Homo sapiens
aaagacatggttgcagtttgtctgtatcatctatttaaaatggacaatgtaggtacccttagaggcagcaacttttgtcttgtatccaaccaagacaaacactctgacattgcttgaggaagtatgtacatttcatcttggattgtgatagtaaaaactggaatcaacctggagttcatcatcagggaactggctgaacaagcagtgatatttccgattctggctttccatcccgtcactaaaacagagtgtctgagcatatggcttgggcagagggagcgaaggagcccaggaaaggcagtgaggtcggaggrgtgggcagagcccatgcagggccttgggggtcactgcagagtttagattttactttaggtgcacagtgaggcagactgtacccaatgcaacgttaacgactcctagtggactgagcaaaaagaaggtgctgtataaatattgcttgttgctgccatcattgttgttactaaagtctggcaccatcgatggcataaaaccccttcacacctgttattgagaagcatcaaggtaaggaa

SEQ ID NO: 622869 - DNA, 578 bp, Homo sapiens
gcctagacaacagaactttattttctcacagctctgggagctagaagtcccagatggaggtgccagcagattctcttccttgtgagggcttgcttgtatatgctcgctctgtgaacacatggcctctcctctttgggttcacagagagagaaatctccggtgtctcctttttttgaaagacagggtcttgctctatagcccagactgkagtgcagtggtgcaatcgtagtcactataacctcgaatgcctggactcaagcgatcctctcgtctcagcctcctgagtagctgagactacaggtgcacaccaggctgctgctgcttataaagacaccagttattaccttgtaactcttatgacctcatttaatcttcattactactctggaggccctgtttccaaatacagtcacaattgggggttacagcttcaacataacgaatctgggggccacaattcagttgcaacacgcagtgggtaaggaaatgagcaaatgacaagatgatgtcaactgtgatgagtgctccaaggagaataaacagggagatgtaacaaagagaaaccaggaaggacgcca

SEQ ID NO: 622870 - DNA, 578 bp, Homo sapiens
gcctagacaacagaactttattttctcacagctctgggagctagaagtcccagatggaggtgccagcagattctcttccttgtgagggcttgcttgtatatgctcgctctgtgaacacatggcctctcctctttgggttcacagagagagaaatctccggtgtctcctttttttgaaagacagggtcttgctctatagcccagactgtagtgcagtggtgcaatcgtagtcactataacctcgaatgcctggactcaagcgatcctctcgtctcagcctcctgagtagctgagactacaggtgcacaccagsctgctgctgcttataaagacaccagttattaccttgtaactcttatgacctcatttaatcttcattactactctggaggccctgtttccaaatacagtcacaattgggggttacagcttcaacataacgaatctgggggccacaattcagttgcaacacgcagtgggtaaggaaatgagcaaatgacaagatgatgtcaactgtgatgagtgctccaaggagaataaacagggagatgtaacaaagagaaaccaggaaggacgcca

SEQ ID NO: 622871 - DNA, 328 bp, Homo sapiens
ttctgttggttgaaggaagattaactctaggtggaagaacaggtaaaaggagatcagcaatgttatggtaatgacaggaggaaacgggggttggggaagagggacagattaaagaacacagaggcagaaaacgtagttaagtaaaatgcctggctaagtaagaacatctctttggtagaagggaacttatcttgtgacttcttagagttcataactttagagaaatgaagagaataaaaaattcagaaattaaaatgaaattataatataaggtggkgccaaacttaatcatcataaatcataatgtcatttggtaccttctaaggat

SEQ ID NO: 622872 - DNA, 575 bp, Homo sapiens
aattttgacatgatgttgaatctagcaagtttaagtaaaattgacaagcgcttccaagtcatttattayacctattaggatccgacagcaggcatggttagagaaatgccagatgtcaacacctttcatttcagaacaataaacacagttttaacaaaagtcataaatatagcagactgtaaagaaacttaagcaaacaatatatttaaaaaaaactgattagtttcaaaaataaattatgttttgttatttttttttctttcctcaggaacttgctgattcagagcagccccagtggtctttatgaacttacagtcttctatgaatatttgtagtggcagctttaacaataattaacattgactgttaaaatatttcactttgaaagagcacttactttggaatagagaagacagtagtctaattttcaaagaatatgaactttaatttctttgagtggattaaattttctctagacatttttttaaattactgcattccctatagacaactgttacttcatcttttcacccctccactttttctttacattgtctctctttcagtgtatggtt

SEQ ID NO: 622873 - DNA, 558 bp, Homo sapiens
cctaggtcactcacccacccctaggagctgctcaaggccaggaacgagwccagctacttggcaaccctgtgaagagttcccagtttccttctgtttcagcccagggtctgcatcctccctctgtccactcccaatgctttatttccaaagatccgtttggagtgtgccagtctacttggtctggtctctctctatgggagaagctcttcctggctgcatctagtcagccatattggctgtcccccagagtataaatttttaacaaacaaaagatgtatggatttataaattttaattttataaatttattatgtgctttttccatttaaaaaagtcttatctatttttccagttgattattttaatatttaattatttaacatgtctagaaactattcagaaagtaaatatctaagtgaacgtatatcgcactgtgtaaactattgtcccagaaccatatattacgtaatacttttgtttatcctttatcatatactaaattcttacatgtactaggccttttttctgtcatttctagtttttactgctatttaccta

SEQ ID NO: 622874 - DNA, 631 bp, Homo sapiens
ctgtgtagattacatgttcttctcttctccttagatataatccgtatactaacttatctgataaaattatcttcatatatatataattcttgaaaaaaatagtatatttttttctgcttttcaagtttacaggaatggaattatactggatatattaatttctgagctacatccgagttgatgcacaatgctgtgcttcattcaatttcattgctgtaataatccactgcataaacacatcaattatttttcagttctcccagggctggctatataatttgtgaagccctgttcaaaatgacagtatgaaacccctagttccatagtattaaaaaatttaagatggaaacagcagagccttaaaccaagtagaggatgccgaagtatgggcccctgaaagtccacacgggtcacatgctcatgaagttaatgcggattccattgttgatttacatgtgaattattatttttttwaattaccaacacagctgctaaatttctcctggaatacctgttccttggagagtttctctagatgctagagtttgtgtgccaaaaggtaggcccttgaaatttagtagctaatgaaaggttatttatcaaactgcttagtacaagttacatttcaaca

SEQ ID NO: 622875 - DNA, 631 bp, Homo sapiens
ctgtgtagattacatgttcttctcttctccttagatataatccgtatactaacttatctgataaaattatcttcatatatatataattcttgaaaaaaatagtatatttttttctgcttttcaagtttacaggaatggaattatactggatatattaatttctgagctacatccgagttgatgcacaatgctgtgcttcattcaatttcattgctgtaataatccactgcataaacacatcaattatttttcagttctcccagggctggctatataatttgtgaagccctgttcaaaatgacagtatgaaacccctagttccatagtattaaaaaatttaagatggaaacagcagagccttaaaccaagtagaggatgccgaagtatgggcccctgaaagtccacacgggtcacatgctcatgaagttaatgcggattccattgttgatttacatgtgaattattattttttttaattaccaacacagctgctaaatttctcctggaatacctgttccttggagagtttctctagatgcyagagtttgtgtgccaaaaggtaggcccttgaaatttagtagctaatgaaaggttatttatcaaactgcttagtacaagttacatttcaaca

SEQ ID NO: 622876 - DNA, 555 bp, Homo sapiens
tgcctataacaaccaaaggacttgcatctggaatatataaaataagtctgtaaattaytgagaaaggaagaagactaggaactctaatacacatacctcttactactattatgccaaggaaaaggattcctgaatcatacaatatatgaactgtgaaatgatcgtatttaaaaggcaatgctaaactcttttagagcatttgcaccaatttagaattccatcagcaatctgtaaatcatcattcttgaccatttctttaacatttaaatttttgccaagaaaataggtatagaatattatttttgtggtcttgatttgcatttccttgactagcaaagatattaaaaattactttacatatttattggtcatttccgtttcatctgtgaaatatctgttcaagtctcttgtccatttttctgtggatcctttgtcctctttacaagtgaaacttaattgctgtttagaatcacaggctacatacctgctatttaaaaaatgttaatccagcaaatataatatttacttcatccctttaaagtagcaggagcctgt

SEQ ID NO: 622877 - DNA, 622 bp, Homo sapiens
cacattattcttaatgatatagttcaatcatttatcatgacatgaaataattttatgttctatattcttatgctgtatatctctcacacactagagtttaaactacgtaagattagaggcttgtgctggaacatttttatgaggmgtgttaatgtctggaatagttgctacagtttagaaagcactcagtaatgctatgttgtatgaataaatgaatgaatgaatgaatatctgcagcctaattcttatgcttcttttatgggcaacccttgtctttgtagatgctgcctatttggtattactcttttcagctgatatttccactaacagaccccaccagaactcagaaaagaatcatagaggagagaaaggcataatttgttcttatatcaccccccacctctattctactttgctccaagtagcaaggaatttctgacaatcctgagtgtttatttaccttcctttctcactcagtactccatcttctgttcacagctggggacagtctatgccagaatattattttttttcttagctctgatttttttttttaatttcacagcatgcagttatgctcttgtttatttggctgtttgatatctttttttttttgcctttg

SEQ ID NO: 622878 - DNA, 622 bp, Homo sapiens
cacattattcttaatgatatagttcaatcatttatcatgacatgaaataattttatgttctatattcttatgctgtatatctctcacacactagagtttaaactacgtaagattagaggcttgtgctggaacatttttatgaggagtgttaatgtctggaatagttgctacagtttagaaagcactcagtaatgctatgttgtatgaataaatgaatgaatgaatgaatatctgcagcctaattcttatgcttcttttatgggcaacccttgtctttgtagatgctgcctatttggtattactcttttcagctgatatttccactaacagaccccaccagaactcagaaaagaatcatagaggagagaaaggcataatttgttcttatatcaccccccacctctattctactttgctccaagtagcaaggaatttctgacaatcctgagtgtttatttaccttcctttctcactcagtactccatcttctgttcasagctggggacagtctatgccagaatattattttttttcttagctctgatttttttttttaatttcacagcatgcagttatgctcttgtttatttggctgtttgatatctttttttttttgcctttg

SEQ ID NO: 622879 - DNA, 385 bp, Homo sapiens
agaactggctagccatatgcagaaaattggaactggacctctttttttcaccttatataaaaattaactcaagatagattaaagacttaaatgtaaaacccaaaactataaaaaccttagaagacactctaggtaataccattcaggacayagacactagcaaagatttcatgacaaaaacatcacaagcaattgcaacaacaaaaaaatgacacatgggatgttaaactaagggacatatttcaaattatccagacaattagttcctgagtcatagaaatctcaatacccaggttagccagtgctatgaatgtcacaggcttctccattttaacatatttctattgtcttagttttgtactgctaggatagttcagtttgtgaa

SEQ ID NO: 622880 - DNA, 560 bp, Homo sapiens
gggtcccttccataacatgtggggattatgggagctacaattcaagatgagatttgggtggggacagagtcaaaccatatcagttggggaagttttctttgaattctcttcaaggcttcaattgattgggtgaggcagtctacccaccttattgaaagtagccttctttacccaaaatttccagatttaaatgttaatctcatccaaaaatcacccttaaatttacatgtaaacttaaattgctgaaagaagaaaaaggtcaacagagagtcttctatgaagcagaattatatttcccaaatgaagacaaaacatacrtattctcagataaactaaactgagggaatttgctgtttgcaaagttgccctatagaaaacaacaaaaggagtctttcagggtaaactgtaaggacattagtaacttgaatacacacaaaaagatacagagcaccaatacaagtaactacagaagtaaatactagaataaaaaaaattttgagacaaggtctggctctattgcccaggttggtgtgcagtgacacaatctcagctgactgcaa

SEQ ID NO: 622881 - DNA, 656 bp, Homo sapiens
ctttttggggttcatttttatatctattttatatctatttatttatatctattttccaacccttcagttttagtctagctgtgtcactaaagctgaagtgaatcatgaatccttcatagggcatataaaattgaggcttgttttttgttkttgtttgttcttaccatttggccactctgtcttttgattgaagaatttaaacccttttatattaaggaaattatttataggtaagtccttactactgctattttgtttatagttttctggttgttttgttgatcttttgttcctttctttctatgtcttcctctatggtttaatgattttctgtaatatgtttgatttctttgtctttatcttttatctatgttggatagattttggctttttgggttaccatgaggcttacataaatcatttatatatgtaacaagctattttaggctgttaagtttgatcatatataaaaactctaaacttttactccccaacatacattttatgtcacaatttataaatttttatattgtttatccactaagaagttattgcagctacagtaatttttaatactgttctacattttaacctttatactggagatatacatgatttatacactactatttcaatattaaagtattctaaaattt

SEQ ID NO: 622882 - DNA, 656 bp, Homo sapiens
ctttttggggttcatttttatatctattttatatctatttatttatatctattttccaacccttcagttttagtctagctgtgtcactaaagctgaagtgaatcatgaatccttcatagggcatataaaattgaggcttgttttttgtttttgtttgttcttaccatttggccactctgtcttttgattgaagaatttaaacccttttatattaaggaaattatttataggtaagtccttactactgctattttgtttatagttttctggttgttttgttgatcttttgttcctttctttctatgtcttcctctatggtttaatgattttctgtaatatgtttgatttctttgtctttatcttttatctatgttggatagattttkgctttttgggttaccatgaggcttacataaatcatttatatatgtaacaagctattttaggctgttaagtttgatcatatataaaaactctaaacttttactccccaacatacattttatgtcacaatttataaatttttatattgtttatccactaagaagttattgcagctacagtaatttttaatactgttctacattttaacctttatactggagatatacatgatttatacactactatttcaatattaaagtattctaaaattt

SEQ ID NO: 622883 - DNA, 641 bp, Homo sapiens
ctgcacccagcctgtctgcatttctgtctggtggtgagctatgtgctgcaggtagtgtgtttaatgtgtttctctcatgtttccgtgtatctggtggaagatgtgtgtctgcaggatgagtgtctcttttgtcggtgtgtcatggattgtgtgtttgtgtgtgttgcagggaatgtgtttgtctcagtatctgagtgtgtcgggtcgtgtgcaggtgtgtgtttttttgtgtgtttgtttgtttgaaacagagtctcactctgtcgccaggctggagtgcagtggtgtgatctcagctcacctgcaacctccrcctcccgggttcaatcgattcttctgcctcagcctcctgagtggctgggattacaggcgtctgccagcacacccagctaattttttgtatttttagtggagacagggtttcaccatgttggccaggctagtcttgaactcctgatctcaagtgaaccgcctgcctcgtcctcccaaagtgctagaattacaggcgtgagccaccgtgcccggccgcacgtgtattttgtatgatatatatctgcttctgactttggtgaagtgtgtgtgtcgcagggttgtgtctatcttgtggtttctatgtggcctatggtgtgtgtgctgcaatg

SEQ ID NO: 622884 - DNA, 641 bp, Homo sapiens
ctgcacccagcctgtctgcatttctgtctggtggtgagctatgtgctgcaggtagtgtgtttaatgtgtttctctcatgtttccgtgtatctggtggaagatgtgtgtctgcaggatgagtgtctcttttgtcggtgtgtcatggattgtgtgtttgtgtgtgttgcagggaatgtgtttgtctcagtatctgagtgtgtcgggtcgtgtgcaggtgtgtgtttttttgtgtgtttgtttgtttgaaacagagtctcactctgtcgccaggctggagtgcagtggtgtgatctcagctcacctgcaacctccacctcccgggttcaatcgattcttctgcctcagcctcctgagtggctgggattacaggcgtctgccascacacccagctaattttttgtatttttagtggagacagggtttcaccatgttggccaggctagtcttgaactcctgatctcaagtgaaccgcctgcctcgtcctcccaaagtgctagaattacaggcgtgagccaccgtgcccggccgcacgtgtattttgtatgatatatatctgcttctgactttggtgaagtgtgtgtgtcgcagggttgtgtctatcttgtggtttctatgtggcctatggtgtgtgtgctgcaatg

SEQ ID NO: 622885 - DNA, 648 bp, Homo sapiens
tattttatgtatgactcagaaagaaaaaaaaaacactcaactttgatatttcttgtaatatcatgggggattgtttgcaaaaatgttctcagaaatctctcccatcccaagatatacactccttggcaacatgactggagtcctcctcttatcaagaggcaggctatttctacaactggtgggggggaacaccatctgaagaggctggataagtgctggtgcactgaaagagggctcttgccgctgcctttctaccatgtgaacacatcccagcaagtctactaaaggaaggagactatggcaatgccagctaccccagcctcccctagacaactcactggactttgcacaaattatgattgtggtttaagtccctaaccctgatttcagagatacttaaaggtgaaaaactgtagatttttgaatcaatgaaatatgctatgttatggtatcagtatataagtatctaaagggtgtttctaagaggagaaaagcatamaaattttagggaacagagtttttatgccacattttggctgctagaggttatttttgtttattttctggttttcagttacatttcatatagcttaagtcactgaacaagtgacggctggtactgaagggatactgctttctgccacagaa

SEQ ID NO: 622886 - DNA, 497 bp, Homo sapiens
gggacccaccctcctgcaggatgacctcatctcaactaattatatctgcaatgagcctattttcaaatcagatcacattccaaagtactggggattatgacttcaacatatcttttttttatgtgtaggggaagggacacaatcccacttctaacagtagtgattcataaattatactgtggggagtataatgctmaatctaactatgagctccttcaaagcaaaaaatgttctttctctctcttattacccccacagagtatttttcatggcagcttacccaatccctgcttggtatattcttattagttaacagacttcattagaaagacacatttgatcaagtgacaaataagcccctgaacaatcggtcttttatagtgataaaaaaaaaaaaaaaactgcttcttggaattttaaacacatccagaaacccaccacagatattatatatatcaagaaggacagaaagaattatcagacagaataagcaattt

SEQ ID NO: 622887 - DNA, 339 bp, Homo sapiens
aaggcctccacgacaccaaagacttagatcwcgatacccatgtctctttgaaaacctggaaacccttccgaagaagaatggatacaaataagcccagactgtgaagattacaataaatatctaatttttcattgcccagacaatgatgaacatccatgagcatcaagatcatccagaaaaacatgaactcaccaaacaaatgaaataaatgaaataaggcaccagtgacccatcctggagagacagagacatgttacttttcagacagataattcaaaatagctattttgaggaagctcaataaaatataagataacacagaggagaaattaagaattc

SEQ ID NO: 622888 - DNA, 514 bp, Homo sapiens
gaattcatgacctcaagtgatttgcccacctcggcctcccaaagtgctggaactacaggcgtgagttaccgtgcctggccgagctaggttctttcaattcttagtttgttgagagttttttgtcaggaagagatgttaaattttatcaaatgcttttaaggagtctgttgagattaccatatggttcttttcctttattttgttaatgtgatatgtcacatttattgatttgcatatgttgaaccatccttgcatccctgctataaatcccactgctataatgatcatggtgcattatatcttacatgtgctgttggatttggtttgttagtatttttttaaggaactttgcatctatgttcatcagggatattggcctatagatttcttctttgttgcatccttgtctggttttggtatcagagtaatggcagccttttagaatgaattagggcaactttactttccttgaatwtttttggaattgtttgagaagaataggtgttagttcatc

SEQ ID NO: 622889 - DNA, 548 bp, Homo sapiens
tcatctgtgtcaccatattacgataaatcttgaaatgtgaggctatgtgaacatttggagggagaaagaaaggaaaggaaatagatgaaaaagagtgataaaggtgagattgtttacatgtgtatgttctctgaaagaattgatttagagagttcttctcatattgagcatgtctggcagtcagcaggggaaacgtgagagcaatggtaaactacatcattgggtgaaaaagcatgattaattgtctgccctgtattattctgcacaaatttgttaacttgctctttaaaagtgcttkcttttgtaaaatgagaaccaaactgttagccttttttgcttctcacacagcaggattaattcagaaataaacttggcagatggtgaaaagaaggtgccaaccaaattcaataatctatacttattaatatcctagagttagctagctatattaactaaaaataaaagagaaggtacattagctctgatttgtctgactcataatgacaaccatgcttagcaaagtgatcagatattatggaatatcgcta

SEQ ID NO: 622890 - DNA, 549 bp, Homo sapiens
atgtgaatactgtgtttattatttgaaaaactggagtactattatattttctgttgcagctgcaccattttacgttcccaccagcaatttacaaaatttgcaatttcttcacatctttgctctattaatctgcttaggatgccataacaaaataccacagctgggtggattaaacaacagaactttattttcccacattttgtatcctagaagtctatgatcttaatagagcatagtttctagtgaaagctttctgcctgacaccttctcacaatgtcctaacatggcttctccccagtgcaaaagaggagccagagagagtcaaggatagagacagagacaagagagaccataagagcaagctgtctagcatctgttcatgtaaggacacaaatcctactggaacagggcccaagtcgtatgactttatttaatcttaattatttccttaraaactctattttcagatacagctacactggatggaagttagaggtacagaatacgaattttgggggaagaattcagctcataacattgtaccattgc

SEQ ID NO: 622891 - DNA, 552 bp, Homo sapiens
gtgtttttcagagaaggaactcagatattgtgtagagaaaggcaagtctatcattaggtagacctcctggatttagttttcacataccttgggacactctgaactggaagacatggccactctaccaaaaagtgcctgagatgtgggaggaggtggaggtggagtggtggatgagtatttgactgaaaaactgtggccctgggaaacaatgtgggactgggttcaataagttgacaatttgcatcttccctggcccacagaaaggaagatcattcctaaataccatgctggatgaaaagcccacaccataggtggatggttaaatagaacagatgcttatttcatggtccttacmtaatgaatagaatggcttcagagtagccatggaccctgttacaatacttaagcttctctgatttggtttcactcatctccattagcttgaaagagacagagactgaaaggttggttgatctgatttcaacgcttgtttatcatctcctgctatcaacttatcactgaacctgggcaccacatacttatttatcaatg

SEQ ID NO: 622892 - DNA, 519 bp, Homo sapiens
atgttatatgtatatatttaatatattttgtataattataagaattctgtagttacatataattgtatacattaaaaatactttgctatgtattaatatcaaatttttaaaaaccttaaaatgttaccataagattgtggtattgccaaggttgcaatttgagttatttaattcacatgcttgggtattagtattcatttattttctgtgcatttttaataatatctgtaaattgatatagcttatttcaaggaacattagttagtaaagctgtgataaacamcagtctttagtttcactctttggattaccacaggtttctctaactctttagaatcatatagaagccttaagactctccaaaaaattaaggctcataaaattcttcaaaagatacaacctcccatccttctccaaaagaatgtcatttggaagcaatcgctacccaaacataccctttatatatgtgtatgtttaaatgttcaagaaaaaaaatcaattttagctttcataatggct

SEQ ID NO: 622893 - DNA, 630 bp, Homo sapiens
ttaagtgaacaagaaatataggagggtgtttcaaatcacaggatacttgaattagatatttcagaaattatgctatttattatactgacaggttgaaaagtttgtctatgagattgggggataaaggtggaaaataaagtataattttgttgatgggctacacaaatttggagaccagaattatgggcaaattttccatatggatatggatctcatggaggaaaagggatagaaagaaatagtgtgaaccaagactcaagaacctcataagtagaaaaatgtcttggrtgtttgcagatgacaacaatgaaggggaaatgtgtctatttttggtcagatattcttgtcttcaaactctttgggtttataaagtttattcttatattgtattttagtccttagaaaaatgactcactttcccatcacacaattgaaacatggaaaagaaaacagactcaggaaattacataagtctgttaaataattccaacaagaagtctgttaaccaccccatccttcccatttttgagcaaacaaaatatcacgagcttcaaataagagaaatcaaactttggaattagagctggaaagttgtattgtgcatgctctccttgagtaatgacagtttat

SEQ ID NO: 622894 - DNA, 505 bp, Homo sapiens
  misc_feature 460, 462: n = A,T,C or G
atagtaagaataattttataattctgattttgactgtcataaagcattacgctaacaatattactacaactgctacttctactaagtaaaccaagagatattaaaatgggcctgtttcttgatggtgacatggtattttgttatccaccaacwctcaattggggttatacattactttgtctatctggccttcaaaattatttatgaacctaataattttatcttggttcataatatgttactagaatatagaattatattactaattctctattatatttaattatatattctaattatatatactatattctacgtattatattctatattgctagaatacagaatatattaatagaatagagaaacatcttagcatttccatcctatcacaatgatgctcactccctgaaagacctcctgtgcccacgaggccccggagcatttgggtggttttggngngacaatcttttgggggggggtgaggctggtgtcaatgtttagt

SEQ ID NO: 622895 - DNA, 467 bp, Homo sapiens
ttcaaagtcagcagaacagaaaatgtatttttaaattacattcattttccagaaacaggtattacctatcatcttaactctctcttgcctgtcaagacttgtcgcactgctttttgacaagccaggcaaagagatttgtccatagctatcaatttttattccataagtattcacaaagaaaaaatgtatttttctaagtggtcataggtctaatcccaaatcaaattaccatttcctgcactacctacaaaattttatggttaaaaaaaggacatgatttcacccccwagaaaaaaaaatcatgtatctctctgagtcttcttagttgaaaatttaacaataaataagattttgttatcctatttacaggaaaaaaaacttttcattttaagatgataaattatataagaaaagacagtgctggtaactttgcaagagatcagagaaagaaagcttgtatttatatt

SEQ ID NO: 622896 - DNA, 479 bp, Homo sapiens
gtagctaactttagttgtattccttagttattgcaatctgataatgtatcacagaaataatatcagtggtttycattttgtctaaactaatgagtaattttctgaactatagaatttagtaagcataattacatactgtcttctcataaactttaatataaaaatgtcaatttattatatgataaaattccataagttgtatttctttttattaagatattaggcttagaaagtcaatgatataacagattccattgaaataaaagatgttcacaacaggggagcaagttgttcagtttccatgtagttgagcggttttagcatttggagatatacctaatgttaaatgacgagttgctgggtgcagcacaccaacatggcacatgtatacatatgtaactaacttgcacgttgtgcacatgtaccctaaaacttaaagtataataaaaaataaataaataaaaataaaaaataaaaaa

SEQ ID NO: 622897 - DNA, 509 bp, Homo sapiens
acagtgccatcagtcaatagctctaaatgcctggagccgtcaggtttaacctatctgggactcagtgtctttgtttgtaaaatggggataatgatctatttcatgagattgttgtgatgaaaaagggaggtaatatttgggaatgctctttatagactgtaagtcatggtgccagcattggtgtgtcttttctctccaggaggaaactctgccttctccttctttctcttctcctgtacagtatttaacaaaatgctaggaggtacataaatgatattcagcaaagcccgggcacagtggcttatgcctgtaatcccagcactttgggaagctgaggcgggtgggtcatttgaggtcaggagttcgagaccagcctggccaacatggtgaaaccccatctctactaaaaatacaaaaattagccagacttggtggyggatgcccataatctcagctaccccggaggctgaggcaggagaattgcttgaacctgggtggcagaggttgca

SEQ ID NO: 622898 - DNA, 586 bp, Homo sapiens
ttggtatagttgaccacagcctcattctgctctctctctatctctctctctgtttcttctcagtctcgttcctgacaattttatcctccaatggctcckcaggacccagaggataagtccaaacatcttagtgtgacacataaggctccatgtgatccagcccctgtccactgctcagcttcttcccctccccaactcccagacattgtcaaggcatcagcagcagccaaccagacctcctattcacctattattgcattgactgtcactcatcctcatcctctactccaaacaactgttgtttgatcagaagcaatgttgtaccaaataccatgacagcactaggaggtaatctatgtttataaagtcttggcaaagacagaagactgtttgatttttcagtctgagttcaagaaacactgtacagctctgattttgccatatccttgtctacatgaaagcacctccctatgggtaagagaaattcttcaaaagtgttagatcaggtctgcaaattctccttattgttctctaaagccccaaattttgtttccttttcaaaggtgtgcatcacacattggctata

SEQ ID NO: 622899 - DNA, 605 bp, Homo sapiens
aggcgcagtggctcacacttgtaatcccagcacttcaggaggctgaggcaggtggatcacttgaggtcagaagttggggaccagtctggccaacatggtgaaaccctgtctctactaaaaatacaaaaaaattagcatggcatggtggtgcacacctgtaatcccaactacttgggaggctgaagcaggagaatcacttgaacccaggcagagtttgcagtgagtgagtcaagatcatgccactgcactctagcctggacaacagagcgagactcagtctcgaaaaaattttttataaggccaggcgcagtggctcacgcctgtaatcccagcactttgggaggccaaggcgggcggatcacctgagatcaggagttcgagaccaacctgaccaacatggagaaacccaatctccactaaaaatacaaaattagccaggcgtggtggcgcatgcctgtaatcctggctactcaggaggctgaggcaagagaatcgcttgaacccaggaagaggaggttgtggtgagccaagatcacgycattgcactctagcctgggcaacaagagcgaaactcctcctcaaaaaaattttaaaaaaggaaacat

SEQ ID NO: 622900 - DNA, 516 bp, Homo sapiens
aattaggtatattgcttttgctttttgaagaaatcatatagcttacacttgtaaatctgtcatttttggacattaactttttttttttttttttttttttttttctgagatgtagtttcactctgtcgcccaggctggagtgcagtggcacaatcttggctcactgccgcctccgtctcctgggttcaagtgcttctcctgctgagtagttgggattacagtcatgcaccaccacacctggcttatttttgtatttttagtaraaacagggtctcactatgttagccaggctggtcttaaactcctgacctcaaatgatatgcctgccttggactcccaaagtgctgggattacaggcatgaaccactgtgaccagcccggacattaactcacgatggcagggttattgtccttcctctatgcaaacaattcccaccagcatcacagagattcaggagaaacagattctgcatagcaggagaagaggtatggcttttgaggcagggccaatgagtt

SEQ ID NO: 622901 - DNA, 566 bp, Homo sapiens
tatttataatgttgagagtagtttttgtgtatatattaagatatttacatcagttctcttctattcctagtttgttattattacaaatagtttcaaatgtgaacaagtgcttttcccacagctattgaaataaccatattttkttcttttattcagttaatgtggttaatttcattgtttggttttctaattttaaaccatacattcttgaaattactgcacttagtcacgatgtatttttctttggagtatattgttggattatatttgcaaacatttttgtttagaattattatgtagtatattagtctgtaatttcatttcttttaatatccctgtatggttttactatcatggaggtaccaccatataaaacaagttggaaagtgttatgtcttcccaattctctaaaaatattcatgtaacattggcattatttctttattaaatatttggtaatatttctttattaaatattgcatccacctagccctggagttctttctacaggaaaaaaaaattttctaaataaaatttctacaatgaaaaaaaaactactcagtttt

SEQ ID NO: 622902 - DNA, 552 bp, Homo sapiens
atcagttctcttctattcctagtttgttattattacaaatagtttcaaatgtgaacaagtgcttttcccacagctattgaaataaccatattttgttcttttattcagttaatgtggttaatttcattgtttggttttctaattttaaaccatacattcttgaaattactgcacttagtcacgatgtatttttctttggagtatattgttggattatatttgcaaacatttttgtttagaattattatgtagtatattagtctgtaatttcatttcttttaatatccytgtatggttttactatcatggaggtaccaccatataaaacaagttggaaagtgttatgtcttcccaattctctaaaaatattcatgtaacattggcattatttctttattaaatatttggtaatatttctttattaaatattgcatccacctagccctggagttctttctacaggaaaaaaaaattttctaaataaaatttctacaatgaaaaaaaaactactcagtttttctagtttttttctgatcatttcataaaagtagg

SEQ ID NO: 622903 - DNA, 665 bp, Homo sapiens
ggagatagagagtagaaggaagtataccagaggctgtgaagggtagtgggggttgggagaggtgggggatggttaatgggtacaaaaaaagaaagatttaataagacctagtatttgatagcacaacagggggattgcagtctaaaattcaattatacatttaaaaataactgaaagagtataattggattgtttataacacaaataataaatgcttgaggggatgaatatccaattttccattatgtacttattgtacattgcatgcctgtaccaaaatatttcatgtaccycataaatgtatacacctgctatgtacccacaaaaattaaatttaaaaacaatacattgttatccactatagtcaccatattgcacaatagatctgttgaattcattcctcctgtacaatgcaattttgtaccctttgaccaacatctacccaatcctcctggtaaccatcattctactctgtacttctatgtgttcagccttcttagacctccacatacaagtgagattatgcagtatctggctttctgtgcctggattattttactcagtataatgtcctcccggttcattcatgttgtcacaaatgatactttttttattttttaaggttgtatactattctattgtgtatgtgtaccacattttcttca

SEQ ID NO: 622904 - DNA, 623 bp, Homo sapiens
ctctttgtttaaatttacatctaagtattttttgttgctattataaataggattgttttcttgatttctttttttgtatagtttgttgttgatgtgtagaaatgctactgaattttgtatgttcacattgtatcctgcaactttactaaattcatttatgaattctaaattttttggcagagttattggtgttttctatatataagatcatgtcaactgcaaacagaaacaatttaacttcttcctttccaattttcatgccttttatttctttcttttgcctaattgctctggctaggacatccagtactatgttgaatagaagttctgagagtgggcacccttgtatgaagtttyccacaacatctcttatctttttattagctatatattaatacggatgtttcttcttcatcaggagtttgaaaaatatgtcttttctctatattgttcttaatcagtcttcctagaagtatttcaatttcaaaaagtagcaacaactgtgggagttcagtcaggctggtgggaaaaattttaaagatagttttaagaaatcgacacaaaccttcatggaaggctgggggtgttgtatagcttcagtaatagatctgaatgaaggcggc

SEQ ID NO: 622905 - DNA, 623 bp, Homo sapiens
ctctttgtttaaatttacatctaagtattttttgttgctattataaataggattgttttcttgatttctttttttgtatagtttgttgttgatgtgtagaaatgctactgaattttgtatgttcacattgtatcctgcaactttactaaattcatttatgaattctaaattttttggcagagttattggtgttttctatatataagatcatgtcaactgcaaacagaaacaatttaacttcttcctttccaattttcatgccttttatttctttcttttgcctaattgctctggctaggacatccagtactatgttgaatagaagttctgagagtgggcacccttgtatgaagtttcccacaacatctcttatctttttattagctatatattaatacggatgtttcttcttcatcaggagtttgaaaaatatgtcttttctctatattgttcttaatcagtcttcctagaagtatttcaatttcaaaaagtagcaacaactgtgggagttcagtcaggctggtgggaaaaattttaaagatagttwtaagaaatcgacacaaaccttcatggaaggctgggggtgttgtatagcttcagtaatagatctgaatgaaggcggc

SEQ ID NO: 622906 - DNA, 423 bp, Homo sapiens
gggagcaacacacaccagggcctctcagggggacagggggtaggagaccatcaggacaaacacgtggatacatggaggggaacaacacacaccagggcctctcagggggacagggggtaggagaccatcaagacaaacacgtggatacatggaggggagcaacacacaccagggcctctcagggggacagggggtaggagaccatcaggacaaacacgtgggtacatggaggggaacaacacacaccagggcctctcagggggacrgggggtaggagaccatcaggacaaacacgtgagtacatggaggggaacaacacacaccagggcctctcagggggacggggggtaggagaccatcaggacaaacacgtgggtacatggaggggaacaacacacaccagggcctctcagggggacgggg

SEQ ID NO: 622907 - DNA, 423 bp, Homo sapiens
gggagcaacacacaccagggcctctcagggggacagggggtaggagaccatcaggacaaacacgtggatacatggaggggaacaacacacaccagggcctctcagggggacagggggtaggagaccatcaagacaaacacgtggatacatggaggggagcaacacacaccagggcctctcagggggacagggggtaggagaccatcaggacaaacacgtgggtacatggaggggaacaacacacaccagggcctctcagggggacggggggtaggagaccatcaggacaaacacgtgagtacatggaggggaacaacacacaccagggcctctcagggggacrgggggtaggagaccatcaggacaaacacgtgggtacatggaggggaacaacacacaccagggcctctcagggggacgggg

SEQ ID NO: 622908 - DNA, 576 bp, Homo sapiens
ttgtcgactgcagtcccctatgcttgccagaagatactgtattcaaagtagaagtttcacagtgatgagtaatcactgcaattttcccattgctccatggactctcggaggccggtgttctgttccctgtaaatagagatgtactctgaacctttctgcctccctcagctgttcctagtccttggtatcagcccctggagatgtccacaaccacttaggacaaaaggcaaaagtggaatttcagacaaaactttgataggatcttcagtgataaacttggactaactgtggcccaggtatcagcactcccaagaattgccaggaggaagctttggcagacaccacaggtatggcaaggcctatctccctctgctgaatccaacaggggcaagcaagctggcatgtggcttgaggtgacccgaatatgtcagcacccctcagatgtctttctttgcacttttraaaaaaatctcagaatttgctggcaacatggccaaataggaacagctccagtctgcagctcccagtgagatcaatgcagaatgcaggtgatttctgcatttccaactgaggtac

SEQ ID NO: 622909 - DNA, 378 bp, Homo sapiens
caaggcatctctgaaaaaagggcagcagccccagtcagagacctatagataaaacccccatctccctggaacagagcacctaggggaaagggcgcctgtgggcacagcttcagcagacttaaagcatctttgaaaagcctgatggctctgaagagagcagcagatctcccagcacagtattcgagctctgataagggtcagactgcctcctcaagtgggtccctracccccgtgtatcctgactgggagacacctcccagtaggtgccaacaggcacctcatacaggagagctctggctggcatctggtgggtgcccctcttggacaaaacttccagaggaagaaacaggcagcaatctttgctgttctccagcctcc

SEQ ID NO: 622910 - DNA, 603 bp, Homo sapiens
tgtcggtacaggctagtctgagaagccgaggaaggtcacagtagaagctgtccaacacattagggccacagaaggstaaattaacaagaaatgccagttggaacagggagtgactgacaccaagggtccaggcaacagccagaaatgaaaggcacattcttgggctcataatggtcagatagtggaggggcttacatagggccacatatctgtcaaaggccatggctatgagcagcaccatctccacaccaccaacgacgtggatgaagaagatttgagcgatgcagcctccaaaggagatgactttgcgctttctgaacaggtcataaatcatcttgggagaagtgacagagcaggctcctaagtcaatgaaggagagactggccagtagaaagtacatgggggagtgtaagtgagggtcagtggtcacagaaaacacaatgaggatgtttccagtaatgcttgccacatagagcacagaggaaaacactaggaggaggagctggatctcccatgaatgagtgagtcccagaaacaaaaactcagataccactgagtgattctctccatccattggtccagccaactgggctgtggctaaaa

SEQ ID NO: 622911 - DNA, 603 bp, Homo sapiens
tgtcggtacaggctagtctgagaagccgaggaaggtcacagtagaagctgtccaacacattagggccacagaaggctaaattaacaagaaatgccagttggaacagggagtgactgacaccaagggtccaggcaacagccagaaatgaaaggcacattcttgggctcataatggtcagatagtggaggggcttacatagggccacatawctgtcaaaggccatggctatgagcagcaccatctccacaccaccaacgacgtggatgaagaagatttgagcgatgcagcctccaaaggagatgactttgcgctttctgaacaggtcataaatcatcttgggagaagtgacagagcaggctcctaagtcaatgaaggagagactggccagtagaaagtacatgggggagtgtaagtgagggtcagtggtcacagaaaacacaatgaggatgtttccagtaatgcttgccacatagagcacagaggaaaacactaggaggaggagctggatctcccatgaatgagtgagtcccagaaacaaaaactcagataccactgagtgattctctccatccattggtccagccaactgggctgtggctaaaa

SEQ ID NO: 622912 - DNA, 603 bp, Homo sapiens
tgtcggtacaggctagtctgagaagccgaggaaggtcacagtagaagctgtccaacacattagggccacagaaggctaaattaacaagaaatgccagttggaacagggagtgactgacaccaagggtccaggcaacagccagaaatgaaaggcacattcttgggctcataatggtcagatagtggaggggcttacatagggccacatatctgtcaaaggccatggctatgagcagcaccatctccacaccaccaaygacgtggatgaagaagatttgagcgatgcagcctccaaaggagatgactttgcgctttctgaacaggtcataaatcatcttgggagaagtgacagagcaggctcctaagtcaatgaaggagagactggccagtagaaagtacatgggggagtgtaagtgagggtcagtggtcacagaaaacacaatgaggatgtttccagtaatgcttgccacatagagcacagaggaaaacactaggaggaggagctggatctcccatgaatgagtgagtcccagaaacaaaaactcagataccactgagtgattctctccatccattggtccagccaactgggctgtggctaaaa

SEQ ID NO: 622913 - DNA, 580 bp, Homo sapiens
caactgtagcagactagagtaagtggactttcacaagaaatagaatcaccaccattatctaccacattttctcatgcttactgctatttaagtgcctcagtttctatacaatctttcacaattacgaagccctaaatggcttcccatcctgcartgatttcataaggagcctatgccacctgtcatgtaaggctttttccatgcctaataaatatgttttggagggatttcaccagtgtttctgctaagatacatgcataaaatggccacagaggttgtgagaaatctctgcagtttctctttgtctacacacatgaaagtattgaagaccagcacttggattagttaagataatgttttaattcatcactgtctcctcctccccttggtaccagcttttatgttcattgcattccccacccttttaagtactcagtacctcctgcatggtaacctattctgatatttgatattatcatgcttaatttgactgaatccattcggatattttatctttaagaaatttgtagttttatacttttaatttatgataaaattagattaatatcaaacattaaca

SEQ ID NO: 622914 - DNA, 553 bp, Homo sapiens
caatctttcacaattacgaagccctaaatggcttcccatcctgcaatgatttcataaggagcctatgccacctgtcatgtaaggctttttccatgcctaataaatatgttttggagggatttcaccagtgtttctgctaagatacatgcataaaatggccacagaggttgtgagaaatctctgcagtttctctttgtctayacacatgaaagtattgaagaccagcacttggattagttaagataatgttttaattcatcactgtctcctcctccccttggtaccagcttttatgttcattgcattccccacccttttaagtactcagtacctcctgcatggtaacctattctgatatttgatattatcatgcttaatttgactgaatccattcggatattttatctttaagaaatttgtagttttatacttttaatttatgataaaattagattaatatcaaacattaacaagtgacttttaggaaggtatatgagctttcttattgacttcaaactataaagtacaaactgtgacactagaaatttagtcc

SEQ ID NO: 622915 - DNA, 598 bp, Homo sapiens
tcaatcattttcctatagtagaaagtagttcctgaaaacacttaatagagattattttagaagttgctgaggtacaaataaaactgctatgctgacatcatacttttttgcaccaacaactccagttcttctgacacaaaggaccatcttcctagtgccataatttatcttagaccccaaaactcacagaggcacacatcatatctctaatacttgctcaccaccactggcatgagtctctctctatcytcttctacgtgaagtgattatactgtcacctctggagctaactgtccacagtctcaagatgcacactttttacaaccagaagcctatggactgggtgagggagcagaaacagccacaggtactgcccatcagggtaatgtaagtcagcatgcaaacaactgatcagatgaacatgaatagcaaggtgctgaggcactgggaagagggaccggaaaactctataattgttgaaaaagactcaagcccttgggaagggaaatgcctacgaaattatataaagaccattttatccaagttggtcatcattcagatgaaaaccatgaggcccagaaaagtaaactgagtttcc

SEQ ID NO: 622916 - DNA, 629 bp, Homo sapiens
tgattgacaagtaagactaataatcccagatcatagtaaggtcttaacttcaagtcaataatctttattacttatggttcattcctctccctcatgttttccaataattttaaaatgcataattaaaacaattctcatttaaaaacatagtagccatgactaatgatcttccagtgggaaggtactaagactttacaacatgtttcttgctggggataagacagcctacagccagcattcaactcatttttctaaagtctatggatcaatttgaaatacagaaaaagtagaacagagataaagttaaaaaaagattaaaaatatgggaagaatgggagaaaggggagattagaagatatgaacaatgatttaaaaataaaagagcctcaaaggagaagagaaactgctaagcaagactaaggtaggatgaaatacagtagtctctgtttctgagaacacaggttaaaaagaacatamataaaataaatttatcacctttaatacactcattcaaggatgctactgagtttgactttgggaatttctcacctttaatacactcatctggggatgctacggactttgacattgggttgcatttaacgggggagagaaagggcagttgcttc

SEQ ID NO: 622917 - DNA, 581 bp, Homo sapiens
cccaaaacatgtacaactatgatacatcaataaaaaacaacaaaaaaaccaaaagaatagaaatcaaaaataaatacataaatacataaaatagggataataatacctcccttgyttgcttgctcccttgctccatttgtaagaaataagtgatataatataggtaaaaatacttaacctcatgcctaccacatagtatagcacaataaatgttatttattataatctgaggcctacctacataagtgactttcaagtatagaaaattatttctcaaattttaaatactccctgattctcaggtatggtaattagacctggctttaggtaaagctctcatgtctacacttggatttaatcacttaagtatatttcccagtgccccccccaaaaaaaattgctcctaggtggacacactaatcaaagacttcctgagaaatgcaggaagaagttttgtcctctgaccacgctacgccctttccttgatggtaagccccataatctaaagccataagtttcaattcctcacataaaaagaaaaaaaatgtcttttatgaccacttcagataacactggatatt

SEQ ID NO: 622918 - DNA, 508 bp, Homo sapiens
tgatggagttgtcaaaagctgaattaattaaaagtccccacgagaggttagatgacaaaattttcagaaactttccatgccactctgttgtgacatcaacagtgctggacccttgaaatcaaaccaaaaggattccaccatgagaatgaaaagggctgagaaggggaatgctgggtgacacagaaggtgacaaagggcgaaaggtttctaggcatttgatagactgatggacgtccgcgctgaccataaggcacaggccacacaggaaggaaaatgagacccaacgcgaagaaaagtagggctaaacagtcgggaaaatgtgggaagaaggatgaatagtcatacgatcaactcagattcctccctgacattcttctacagctttattctcrtcctttgggagccgagatgttcattttcctacattcttagctgcctacacacggcgacttttctccacggtgcctgatccctgctgcatcctccttctctagtggcaacagcaaat

SEQ ID NO: 622919 - DNA, 471 bp, Homo sapiens
gggaggctgaggcaggagaatcgcttgaacccaggagatggagtttacagtgagccaaaatcayaccattgcactccagcctgggcaacaagagcaagactctgtcggggaaaaaaaaaaaaaaaaaaaaccaccaccatcattttgcaagtgttaccactattgtgtgttaatattgtagaagtattcctaattatgatttctttgtattcctaattgtaatagctttgtatttgaaaaattattgattcatactctatatgttattattttgtatgcgatgacaacagaatatattatcatgctccttttgtgaatctcattcataatataaagtataaatttgtgattttgctttaatttgaaatattaatttcaaatatgttatcacaatttgatacaaactattgacagtaaatctgtggattaagtaatgtcttagtaggtattgggaaaatttgaaactagtaa

SEQ ID NO: 622920 - DNA, 377 bp, Homo sapiens
agctgggtgtggtggcaggcacctgtaataccagctactagggaggctgaggcaggagaatcgcttgaacccaggagatggagtttacagtgagccaaaatcacrccattgcactccagcctgggcaacaagagcaagactctgtcggggaaaaaaaaaaaaaaaaaaaaccaccaccatcattttgcaagtgttaccactattgtgtgttaatattgtagaagtattcctaattatgatttctttgtattcctaattgtaatagctttgtatttgaaaaattattgattcatactctatatgttattattttgtatgcgatgacaacagaatatattatcatgctccttttgtgaatctcattcataatataaagt

SEQ ID NO: 622921 - DNA, 471 bp, Homo sapiens
gggaggctgaggcaggagaatcgcttgaacccaggagatggagtttacagtgagccaaaatcacaccattgcactccagcctgggcaacaagagcaagactctgtcggggaaaaaaaaaaamaaaaaaaaccaccaccatcattttgcaagtgttaccactattgtgtgttaatattgtagaagtattcctaattatgatttctttgtattcctaattgtaatagctttgtatttgaaaaattattgattcatactctatatgttattattttgtatgcgatgacaacagaatatattatcatgctccttttgtgaatctcattcataatataaagtataaatttgtgattttgctttaatttgaaatattaatttcaaatatgttatcacaatttgatacaaactattgacagtaaatctgtggattaagtaatgtcttagtaggtattgggaaaatttgaaactagtaa

SEQ ID NO: 622922 - DNA, 570 bp, Homo sapiens
cattgtttatttcaaagccagttaaaattctgcaaagcagygtacataaaaataatttcaagaaatttataaaataccgagattatggtgtataaacaactttagattctttgtttaagaaattctgccagtttgtaatatatgcttcattcaatgcagctaagggctgtacctggctaatagtaggcacctaatatttgttgaaaaggaatactgagtagctgggacctcctgagtagctgggaccacacacatttaacctgtatttataaaattactgtttagagaataacatttgatggaatcatgcttttactttctgcttatgactcaattgtttgtactgacattaacatcccaaatccttagcatggcctacaaggccctgagcaatgtggcacctgctgaagcctgctgcctcatttaataactctttgtctctttcccagatccagccactctaacattttttagctcctggaccaagacaagctcttcccagaacctgacctttgtacctgttctttattcctggagtatttttcccctgacaaattacttatcatctat

SEQ ID NO: 622923 - DNA, 570 bp, Homo sapiens
cattgtttatttcaaagccagttaaaattctgcaaagcagcgtacataaaaataatttcaagaaatttataaaataccgagattatggtgtataaacaactttagattctttgtttaagaaattctgccagtttgtaatatatgcttcattcaawgcagctaagggctgtacctggctaatagtaggcacctaatatttgttgaaaaggaatactgagtagctgggacctcctgagtagctgggaccacacacatttaacctgtatttataaaattactgtttagagaataacatttgatggaatcatgcttttactttctgcttatgactcaattgtttgtactgacattaacatcccaaatccttagcatggcctacaaggccctgagcaatgtggcacctgctgaagcctgctgcctcatttaataactctttgtctctttcccagatccagccactctaacattttttagctcctggaccaagacaagctcttcccagaacctgacctttgtacctgttctttattcctggagtatttttcccctgacaaattacttatcatctat

SEQ ID NO: 622924 - DNA, 395 bp, Homo sapiens
aattattaagtaattttaaaaaacactactgcttttcccaatcctaccaagtaaaggatgctagataaaagaaatcccaagtcaggccaggtacagtggctcacacctatagttccaacagtttgagaggcagagatgggagtatgttttaaggccatgagtttgagagcagcctgggcaacacagcaagacctcctctctacaaaaataaaaaaaataaatttaataaaataaaataaatatagccaggcatgatggtatgtacctatggccccagttactcatgtggctgagatgggcagatctcttgattctaggagtttgaggccagcttgggcaacatarcaagtcttctctctctacaaaaatgaaaaaaatgcctgacatggtggtac

SEQ ID NO: 622925 - DNA, 458 bp, Homo sapiens
tgtggtggctcacactggtaatcgcaacactttgggaggctgaggcaggaggatggcttgaggccaagagtttgcgataggccttggaaacaaagggggagtcaccatccctacagaaaaatacatgaattagyctagtgtggtggcatgttcctgtagtcccagctacttgggaggctgaggtgggaggatcacttgagcccagggaggctgagactgcagtgagtcatgatcaggcctctgcactccagcctgggtgacagagtgagaccctgtgtcaaaacaacaaaaaagtagcagctaacatcaactgaccttttaccaggtgcctattgataccatagtttaatttcttataactgtttcttatttcacttaccaactctgtcttcagttactcccagatttttactgtgtgtgtacagatgaccttttgcttagattgaattgtctcccca

SEQ ID NO: 622926 - DNA, 597 bp, Homo sapiens
agggtaaggattcccacctaggtgggctcacttgctctgccatacctgggtaggatcccagcctgcttctgtgattgtcaggaggcaccaaaaaggctaccctaggttttctgtcattcggcccaaacatttcctctgctgggcaaatgtggaaaagaggcattaagctggtgctcccacaactgaaaggaaagcaattctctttctgttgtggttccttcctctttggactcttttcttccattccagcctatccccttcttggaaaagctgttctaccaatagcagggaagaaacagcrccgtgtacctgatacgctaccctgggcacaggcgatcagaccagggatagacacctgaactgatctgggcagatgccctcttctggccattgagaattgacagcatcagacatctagaacataatagtatttttaaattctgcagggacatccaccaggctgagggggaccaattttgttttaaaaatgtatcctgaacttggccaggcatggtggctcatgcctgtaatcacagcactttgagaggccaaggtgggcggatcacttgaggtcaggagtttgagaccagtctggcc

SEQ ID NO: 622927 - DNA, 597 bp, Homo sapiens
agggtaaggattcccacctaggtgggctcacttgctctgccatacctgggtaggatcccagcctgcttctgtgattgtcaggaggcaccaaaaaggctaccctaggttttctgtcattcggcccaaacatttcctctgctgggcaaatgtggaaaagaggcattaagctggtgctcccacaactgaaaggaaagcaattctctttctgttgtggttccttcctctttggactcttttcttccattccagcctatccccttcttggaaaagctgttctaccaatagcagggaagaaacagcgccgtgtacctgatacgctaccctgggcacaggcgatcagaccagggatagacacctgaactgatctgggcagatgccctcttctggccattgagaattgacagcatcagacatctagaacataatagtatttttaaattctgcagggacatccaccaggctgagggggaccaattttgttttaaaaatgtatcctgaacttggccrggcatggtggctcatgcctgtaatcacagcactttgagaggccaaggtgggcggatcacttgaggtcaggagtttgagaccagtctggcc

SEQ ID NO: 622928 - DNA, 434 bp, Homo sapiens
atgggtacaaaagaccaggggttgttaaccaaaagcctggaacattcaggtgaatggctgttctgcagggaaggagggaaacagcagggkgagatggatggtcaaccttcaaaggccttacacagtcccggccaggataatcttcgcctctcccttctgctggggaaaagtctggattgctaagaccagggtctctatagtggcatctccaacactcaggccgagcttcatggctgggttcctgttttttcatttgctcatgcccctcagtggtatcatctgactcagctcctttccctcctgttgggccagtacttacagtgggtctcctgatgaagctgaggtcatgggttcatgagcccaattatcaccatgctgaccgcaccactaacctggctccgtgtagttgcaaacttggctgcacattggaattc

SEQ ID NO: 622929 - DNA, 416 bp, Homo sapiens
atgggtacaaaagaccaggggttgttaaccaaaagcctggaacattcaggtgaatggctgttctgcagggaaggagggaaacagcagggggagrtggatggtcaaccttcaaaggccttacacagtcccggccaggataatcttcgcctctcccttctgctggggaaaagtctggattgctaagaccagggtctctatagtggcatctccaacactcaggccgagcttcatggctgggttcctgttttttcatttgctcatgcccctcagtggtatcatctgactcagctcctttccctcctgttgggccagtacttacagtgggtctcctgatgaagctgaggtcatgggttcatgagcccaattatcaccatgctgaccgcaccactaacctggctccgtgtagttgcaaactt

SEQ ID NO: 622930 - DNA, 434 bp, Homo sapiens
atgggtacaaaagaccaggggttgttaaccaaaagcctggaacattcaggtgaatggctgttctgcagggaaggagggaaacagcagggggagatggatggtcaaccttcaaaggccttacacagtccyggccaggataatcttcgcctctcccttctgctggggaaaagtctggattgctaagaccagggtctctatagtggcatctccaacactcaggccgagcttcatggctgggttcctgttttttcatttgctcatgcccctcagtggtatcatctgactcagctcctttccctcctgttgggccagtacttacagtgggtctcctgatgaagctgaggtcatgggttcatgagcccaattatcaccatgctgaccgcaccactaacctggctccgtgtagttgcaaacttggctgcacattggaattc

SEQ ID NO: 622931 - DNA, 418 bp, Homo sapiens
ttttgagtgtgaatgggtacaaaagaccaggggttgttaaccaaaagcctggaacattcaggtgaatggctgttctgcagggaaggagggaaacagcagggggagatggatggtcaaccttcaaaggccttacacagtcccrgccaggataatcttcgcctctcccttctgctggggaaaagtctggattgctaagaccagggtctctatagtggcatctccaacactcaggccgagcttcatggctgggttcctgttttttcatttgctcatgcccctcagtggtatcatctgactcagctcctttccctcctgttgggccagtacttacagtgggtctcctgatgaagctgaggtcatgggttcatgagcccaattatcaccatgctgaccgcaccactaacctggctccgtgtag

SEQ ID NO: 622932 - DNA, 434 bp, Homo sapiens
atgggtacaaaagaccaggggttgttaaccaaaagcctggaacattcaggtgaatggctgttctgcagggaaggagggaaacagcagggggagatggatggtcaaccttcaaaggccttacacagtcccgkccaggataatcttcgcctctcccttctgctggggaaaagtctggattgctaagaccagggtctctatagtggcatctccaacactcaggccgagcttcatggctgggttcctgttttttcatttgctcatgcccctcagtggtatcatctgactcagctcctttccctcctgttgggccagtacttacagtgggtctcctgatgaagctgaggtcatgggttcatgagcccaattatcaccatgctgaccgcaccactaacctggctccgtgtagttgcaaacttggctgcacattggaattc

SEQ ID NO: 622933 - DNA, 401 bp, Homo sapiens
atgggtacaaaagaccaggggttgttaaccaaaagcctggaacattcaggtgaatggctgttctgcagggaaggagggaaacagcagggggagatggatggtcaaccttcaaaggccttacacagtcccggccagsataatcttcgcctctcccttctgctggggaaaagtctggattgctaagaccagggtctctatagtggcatctccaacactcaggccgagcttcatggctgggttcctgttttttcatttgctcatgcccctcagtggtatcatctgactcagctcctttccctcctgttgggccagtacttacagtgggtctcctgatgaagctgaggtcatgggttcatgagcccaattatcaccatgctgaccgcaccactaacctggctccg

SEQ ID NO: 622934 - DNA, 416 bp, Homo sapiens
atgggtacaaaagaccaggggttgttaaccaaaagcctggaacattcaggtgaatggctgttctgcagggaaggagggaaacagcagggggagatggatggtcaaccttcaaaggccttacacagtcccggccaggataatcttygcctctcccttctgctggggaaaagtctggattgctaagaccagggtctctatagtggcatctccaacactcaggccgagcttcatggctgggttcctgttttttcatttgctcatgcccctcagtggtatcatctgactcagctcctttccctcctgttgggccagtacttacagtgggtctcctgatgaagctgaggtcatgggttcatgagcccaattatcaccatgctgaccgcaccactaacctggctccgtgtagttgcaaactt

SEQ ID NO: 622935 - DNA, 416 bp, Homo sapiens
atgggtacaaaagaccaggggttgttaaccaaaagcctggaacattcaggtgaatggctgttctgcagggaaggagggaaacagcagggggagatggatggtcaaccttcaaaggccttacacagtcccggccaggataatcttcgcytctcccttctgctggggaaaagtctggattgctaagaccagggtctctatagtggcatctccaacactcaggccgagcttcatggctgggttcctgttttttcatttgctcatgcccctcagtggtatcatctgactcagctcctttccctcctgttgggccagtacttacagtgggtctcctgatgaagctgaggtcatgggttcatgagcccaattatcaccatgctgaccgcaccactaacctggctccgtgtagttgcaaactt

SEQ ID NO: 622936 - DNA, 421 bp, Homo sapiens
atgggtacaaaagaccaggggttgttaaccaaaagcctggaacattcaggtgaatggctgttctgcagggaaggagggaaacagcagggggagatggatggtcaaccttcaaaggccttacacagtcccggccaggataatcttcgcctctcccttctgctggggaaaagtytggattgctaagaccagggtctctatagtggcatctccaacactcaggccgagcttcatggctgggttcctgttttttcatttgctcatgcccctcagtggtatcatctgactcagctcctttccctcctgttgggccagtacttacagtgggtctcctgatgaagctgaggtcatgggttcatgagcccaattatcaccatgctgaccgcaccactaacctggctccgtgtagttgcaaacttggctg

SEQ ID NO: 622937 - DNA, 434 bp, Homo sapiens
atgggtacaaaagaccaggggttgttaaccaaaagcctggaacattcaggtgaatggctgttctgcagggaaggagggaaacagcagggggagatggatggtcaaccttcaaaggccttacacagtcccggccaggataatcttcgcctctcccttctgctggggaaaagtctggattgctaagaccagggtmtctatagtggcatctccaacactcaggccgagcttcatggctgggttcctgttttttcatttgctcatgcccctcagtggtatcatctgactcagctcctttccctcctgttgggccagtacttacagtgggtctcctgatgaagctgaggtcatgggttcatgagcccaattatcaccatgctgaccgcaccactaacctggctccgtgtagttgcaaacttggctgcacattggaattc

SEQ ID NO: 622938 - DNA, 515 bp, Homo sapiens
aggccattcatccatgggtctatcccgtgccttgatcagtcttcctaaatcccacctttgccaaagtcactccagtctgtgaattttccatggcttcctgatgcatatggaaagacgttcagactcccaatctgaggtccaatgctctccagaattccatctttccctaccttcctggaatsatttcccattgacttgccatctacctggacaagctggaatggctgctttggctgtcttctgaaaatgccctgaggtgtctctgccccaggcctgtctcctgtgcccccagagctgcccaggcccctgcttcctacagagaccagctcacagtcttcttgtcagtggtcatctaacagtggtcttgtaaaagcagagcaagttccaatcttatttatagcattcagcagttttttttttttttagagctggtgtcttgctctgttgcccaagtttgagtgcaatggctcaatcacagctttactgcagccttgaactcctgggccctagtgatc

SEQ ID NO: 622939 - DNA, 604 bp, Homo sapiens
ttccatggcttcctgatgcatatggaaagacgttcagactcccaatctgaggtccaatgctctccagaattccatctttccctaccttcctggaatgatttcccattgacttgccatctacctggacaagctggaatggctgctttggctgtcttctgaaaatgccctgaggtgtctctgccccaggcctgtctcctgtgcccccagagctgcccaggcccctgcttcctacagagaycagctcacagtcttcttgtcagtggtcatctaacagtggtcttgtaaaagcagagcaagttccaatcttatttatagcattcagcagttttttttttttttagagctggtgtcttgctctgttgcccaagtttgagtgcaatggctcaatcacagctttactgcagccttgaactcctgggccctagtgatcctcctctttcagcctcctgagtagctgggaccacaggtatgcaccaccatgcccacctaaacacagtctacctttatgtgtgtgtgtccatccatcaccagatgctcacggaaggtagggcagaaacattttgaaaaataatttttacctttgaagagtaatcttaatgataac

SEQ ID NO: 622940 - DNA, 604 bp, Homo sapiens
ttccatggcttcctgatgcatatggaaagacgttcagactcccaatctgaggtccaatgctctccagaattccatctttccctaccttcctggaatgatttcccattgacttgccatctacctggacaagctggaatggctgctttggctgtcttctgaaaatgccctgaggtgtctctgccccaggcctgtctcctgtgcccccagagctgcccaggcccctgcttcctacagagaccagctcacagtcttcttgtcagtggtcatctaacagtggtcttgtaaaagcagagcaagttccaatcttatttatagcattcagcagttttttttttttttagagctggtgtcttgctctgttgcccaagtttgagtgcaatggctcaatcacagcttyactgcagccttgaactcctgggccctagtgatcctcctctttcagcctcctgagtagctgggaccacaggtatgcaccaccatgcccacctaaacacagtctacctttatgtgtgtgtgtccatccatcaccagatgctcacggaaggtagggcagaaacattttgaaaaataatttttacctttgaagagtaatcttaatgataac

SEQ ID NO: 622941 - DNA, 548 bp, Homo sapiens
ggggctccaagtcctctttgcaagctcactggttgtcagtagaattcagttcctgtggttgtaggactgaggtccccatattcttcttgctgtttgtcagtctggggtgctcccagcaactcaaggccactctcaggttgttgacacagggtgccaacatctatcttcaaaaccagtaggaggatttctcttgcactgaatctcttttgcatctctgacattctcagtctctgacctctagatccagatttaaagggttcacttgattctgtcagacccactcaggacaattattttgttgtgcgtccctttttctgggaagtgggtcyaccacttctatcacgttcttaaaagggtctgggaatgttcacccatcacagacatccacaccaggccagttaagtcagaactgctggagattccacattctcctgggcagcctgggtggagaaccacctatgtggaaggaacactgggctccaaagataaggggccttgcattttatttcattaccagtgtctattggctctgagaccttacagaaatc

SEQ ID NO: 622942 - DNA, 609 bp, Homo sapiens
gattgtctgtttaggatctcacagggttgagatcggggtagccagggttgcttctcatctggggctccaagtcctctttgcaagctcactggttgtcagtagaattcagttcctgtggttgtaggactgaggtccccatattcttcttgctgtttgtcagtctggggtgctcccagcaactcaaggccactctcaggttgttgacacagggtgccaacatctatcttcaaaaccagtaggaggatttctcttgcactgaatctcttttgcatctctgacattctcagtctctgacctctagatccagatttaaagggttcacttgattctgtcagacccactcaggacaattattttgttgtgcgtccctttttctgggaagtgggtctaccacttctatcasgttcttaaaagggtctgggaatgttcacccatcacagacatccacaccaggccagttaagtcagaactgctggagattccacattctcctgggcagcctgggtggagaaccacctatgtggaaggaacactgggctccaaagataaggggccttgcattttatttcattaccagtgtctattggctctgagaccttacagaaatca

SEQ ID NO: 622943 - DNA, 571 bp, Homo sapiens
gattgtttaattacacatgaaatattatttaaacgtgaacattatattgcctttaaatatttgacatggaaagaagcttaaaactcagtcctatttccttatcaatgttctatcaacaaggggcaggaggtgtcacctccttgggaatcagagttggcccctcaggtaggtgtttggagcttccwggtaggggctggggacaaagtgtggatggggcacctgctggacctgtggcgagatcatcaggggttgctattggtctcagcaagggagtgaggctgaccagttctcagctgcatttcagagaaggatgaaatgccctaatcagaagtcagctcccctcatgaccctggagggaattctgcccactcacagactctttcttattctgggcctctgctgttatctgggtatagctccctgtcacagtcagtttggggactgatcctccaggaaagtcctgggacctctcggcaggctgagtgcttctcctttgtgactcccctgccatggcggttgtgccccttcttaccttctacagacacgacttttcatgggcctcttcctttct

SEQ ID NO: 622944 - DNA, 571 bp, Homo sapiens
gattgtttaattacacatgaaatattatttaaacgtgaacattatattgcctttaaatatttgacatggaaagaagcttaaaactcagtcctatttccttatcaatgttctatcaacaaggggcaggaggtgtcacctccttgggaatcagagttggcccctcaggtaggtgtttggagcttcctggtaggggctggggacaaagtgtggatggggcacctgctggacctgtggcgagatcatcagggrttgctattggtctcagcaagggagtgaggctgaccagttctcagctgcatttcagagaaggatgaaatgccctaatcagaagtcagctcccctcatgaccctggagggaattctgcccactcacagactctttcttattctgggcctctgctgttatctgggtatagctccctgtcacagtcagtttggggactgatcctccaggaaagtcctgggacctctcggcaggctgagtgcttctcctttgtgactcccctgccatggcggttgtgccccttcttaccttctacagacacgacttttcatgggcctcttcctttct

SEQ ID NO: 622945 - DNA, 571 bp, Homo sapiens
gattgtttaattacacatgaaatattatttaaacgtgaacattatattgcctttaaatatttgacatggaaagaagcttaaaactcagtcctatttccttatcaatgttctatcaacaaggggcaggaggtgtcacctccttgggaatcagagttggcccctcaggtaggtgtttggagcttcctggtaggggctggggacaaagtgtggatggggcacctgctggacctgtggcgagatcatcaggggttgctattggtctcagcaagggagtgaggctgaccagttctcagctgcatttcagagaaggatgaaatgccctaatcagaagtcagctcccctcatgaccctggagggaattctgcccactcacagactctttcttattctgggcctctgctgttatctgggtatwgctccctgtcacagtcagtttggggactgatcctccaggaaagtcctgggacctctcggcaggctgagtgcttctcctttgtgactcccctgccatggcggttgtgccccttcttaccttctacagacacgacttttcatgggcctcttcctttct

SEQ ID NO: 622946 - DNA, 543 bp, Homo sapiens
gtcgtgtctgtagaaggtaagaaggggcacaaccgccatggcaggggagtcacaaaggagaagcattcagcctgccgagaggtcccaggactttcctggaggatcagtccccaaactgactgtgacagggagyaatacccagataacagcagaggcccagaataagaaagagtctgtgagtgggcagaattccctccagggtcatgaggggagctgacttctgattagggcatttcatccttctctgaaatgcagctgagaactggtcaagcctcactcccttgctgagaccaatagcaatccctgatgatctcgccacaggtccagcaggtgccccatccacactttgtccccagcccctacctggaagctccaaacacctacctgaggggccaactctgattcccaaggaggtgacacctcctgccccttgttgatagaacattgataaggaaataggactgagttttaagcttctttccatgtcaaatatttaaaggcaatataatgttcaagtttaaataatatttcatgtgtaattaa

SEQ ID NO: 622947 - DNA, 573 bp, Homo sapiens
gtcatcttcccaaggtgtcagggaggaggtggaggaccactgttctgatcagcctccttcaacctcacagtggggttggtctcagatggtgcccaggaacctgccagcagcggcactttgatggcaccaagatcgtgggtgcagggacccagatttgcttcctactcatgtctccctacccactgaaaaatggaatatcagtgaggaatatcttagagggctgcctttgctccttttgccagagaaccaatattggttattaacaattgggccacatctggtgtgcagaaaaatgaatattttaatagtgcttcatagggtatcgtagcatcttataaaaagtggcccatcaaattattgattcaatcatttaaaatgcattagcagargatgcctatcagactaagacatccatgtttctgatccagtgaaaagggtccaggtaaggaacacatatgaagcctcttggcatccttgtgtgagcacggtgcatgacgtggccatcagtatcattgttttctttgagtttttgcttgagtgttgagatgtgtgagggatagaagatccttgttt

SEQ ID NO: 622948 - DNA, 527 bp, Homo sapiens
ggtggtattttccatttagcggggtctgggtttctacaaaacaactcagggacatatgttaagatgttatctctagtttctatagggaaacaaacattttgtggctctaattttctttttttttttaattatactttaagttttagggtacatgtgcacaacgtgcaggtctgttacgtatgcatacatgtaccatgttggtgtgctgcacccattaactcgtcatttaagattagtttgtggctctaattttcttgactattgttttaagctattattaccttcttacttatcagggtgctcatctacttcttgaggctagccaggtggctggaattttccttggagggactcaagagtttcctttatttttcrtgccttaaatgggtctgttctccctcttcaaagctcaagctcttaaggactatgctattgttagatttttcgtattggagcagtccttccctcctactcaagaacaccccttcttcagacagcctggctgggtcttcatcctgggagagctc

SEQ ID NO: 622949 - DNA, 516 bp, Homo sapiens
ggtggtattttccatttagcggggtctgggtttctacaaaacaactcagggacatatgttaagatgttatctctagtttctatagggaaacaaacattttgtggctctaattttctttttttttttaattatactttaagttttagggtacatgtgcacaacgtgcaggtctgttacgtatgcatacatgtaccatgttggtgtgctgcacccattaactcgtcatttaagattagtttgtggctctaattttcttgactattgttttaagctattattaccttcttacttatcagggtgctcatctacttcttgaggctagccaggtggctggaattttccttggagggactcaagagtttcctttatttttcatgccttaaatgggtctgttctccctcttcaaagctcaagctcttaaggactatgctattgttagatttttcrtattggagcagtccttccctcctactcaagaacaccccttcttcagacagcctggctgggtcttcatcc

SEQ ID NO: 622950 - DNA, 516 bp, Homo sapiens
ggtggtattttccatttagcggggtctgggtttctacaaaacaactcagggacatatgttaagatgttatctctagtttctatagggaaacaaacattttgtggctctaattttctttttttttttaattatactttaagttttagggtacatgtgcacaacgtgcaggtctgttacgtatgcatacatgtaccatgttggtgtgctgcacccattaactcgtcatttaagattagtttgtggctctaattttcttgactattgttttaagctattattaccttcttacttatcagggtgctcatctacttcttgaggctagccaggtggctggaattttccttggagggactcaagagtttcctttatttttcatgccttaaatgggtctgttctccctcttcaaagctcaagctcttaaggactatgctattgttagatttttcgtattggagcagtmcttccctcctactcaagaacaccccttcttcagacagcctggctgggtcttcatcc

SEQ ID NO: 622951 - DNA, 618 bp, Homo sapiens
ttgcatgccccagccaattcagagtcaagatccacgctcagctccttccctgcaaagtgctaatgatgaaggatggggatcaagtcagcaaactccagaaatggtcttagactaggagtcaagccttgagatcctattacacaccagattcattccctgattagagctgctgaattcttttactctcactgcactcatgctaaagtttctttcctccagcctcrtaaccccagaggaggctgagccatgatacccattgtctagcaataaatatttaaggagcccctgagatatgtcaggcaccatcgcaggtgctgggacaagtgaatgtgaccaggaaagtccctcccctctcagaggttcttttcaagttggaggacagcaaatacagaaatatagagtctaacataacaacagggagtaataaacactttgaagaaaaataaagtggaataagagggtagggttgccatagggttctctgggcagtcttctatggaaaggccacttgttggggcagagaaaaaaaagatgtctgaaaggaggactaccggccccccataagtgcgctccggtccatgcacagggcaatgggcatgtaatttcctatgattaaga

SEQ ID NO: 622952 - DNA, 619 bp, Homo sapiens
tcatgcctgtaagcccagcaatttgggagtctgaggcagtcagatcacaaggtcaggagttcaagaccagcttggccaacatggygaaaccccgtctctactaaaaatacaaaaattagctgggcatgggggcacgtgcctgtaatcccagctactcaggaggctgaggcaggagaattgcttgaacagagacccgggaggcagaggttgcagtgagccaagatcgcaccactgcactccagcctgggctacagagtgagactctgataaataaataataaataaataaatgattccctaggaagctgactcccactgaatgtgccactcaggagtccctgctctctagattacagttgagtttgctcaatgcaaggccccagcagaaatgttgaaagtaagagcaaatagatagttaaccactctttaagacaacaatggatgtatacttctctggcctcagctcctgtggggaagctccagtgccagtccctgggtgcttcaccattttccgttagttcctgaaccttgtaaactgacccttcactaaattcttcctagttaaccctttgagaatgaaaccatttcctgccaggactctgacagatacaaagaaccc

SEQ ID NO: 622953 - DNA, 619 bp, Homo sapiens
tcatgcctgtaagcccagcaatttgggagtctgaggcagtcagatcacaaggtcaggagttcaagaccagcttggccaacatggcgaaaccccgtctctactaaaaatacaaaaattagctgggcatgggggcacgtgcctgtaatcccagctactcaggaggctgaggcaggagaattgcttgaacagagacccgggaggcagaggttgcagtgagccaagatcgcaccactgcactccagcctgggctacagagtgagactctgataaataaataataaataaataaatgattccctaggaagctgactcccactgaatgtgccactcaggagtccctgctctctagattacagttgagtttgctcaatgcaaggccccagcagaaatgttgaaagtaagagcaaatagatagttaaccactctttaagacaacaatggatgtatacttctctggcctcagctcctgtggggaagctccagtgccagtccctgggtgcttcaccattttccgttagttcctgaaccttstaaactgacccttcactaaattcttcctagttaaccctttgagaatgaaaccatttcctgccaggactctgacagatacaaagaaccc

SEQ ID NO: 622954 - DNA, 543 bp, Homo sapiens
atccttgaagttagagagagccacrtgactcatttagccaatgaactgtgagcagaatgacatgtcacttccagcagaagctttaagaatctgagagacattcatacgttttccatgtgctgtagccttatacccaaagcctgggtcccaagtgaccatgacaggcagagctccctgttgagccacagagatttagagaatggctgttaacacagcataatccagcccatcctgactaatctgatattaacatgtataataaagaattctatcaatgctgagggaagatgattagttaaggtcctaggttgcaagtctcaaaacctcttctaaggattgtagacaggaaattaaatgacttctagtccctagagttcccaatctcctaccatcccatcctaatatgacagaagtaattcttgagttgcttctgaaaccagagcttccctcagaacccttagcctgccagatggcttcttggagagccctcactcacttttctccttctgctattgctgctcattcattccagcttttaaaaat

SEQ ID NO: 622955 - DNA, 336 bp, Homo sapiens
caggagaaatgtattaatgtgcctttctagtaacaggtttttagaaagtcaaatataaacaaatctgtctatttgtgtgtgtgcatgtggtagtggggagggaagaaaaaaggagggggagagaaagagaaataagaaccaagtttattatactgtattcagggggaaaamattttcccaaggttctaacagaagagcaaagtgccactgtcaatagcctcagtagtgtgagggttgcttttatgtatttatttatttacttatttatttatttttcctttttttttcctttctctttttttcttctttttttttttttggacagagtctcacact

SEQ ID NO: 622956 - DNA, 336 bp, Homo sapiens
caggagaaatgtattaatgtgcctttctagtaacaggtttttagaaagtcaaatataaacaaatctgtctatttgtgtgtgtgcatgtggtagtggggagggaagaaaaaaggagggggagagaaagagaaataagaaccaagtttattatactgtattcagggggaaaacattttcccaaggtyctaacagaagagcaaagtgccactgtcaatagcctcagtagtgtgagggttgcttttatgtatttatttatttacttatttatttatttttcctttttttttcctttctctttttttcttctttttttttttttggacagagtctcacact

SEQ ID NO: 622957 - DNA, 336 bp, Homo sapiens
caggagaaatgtattaatgtgcctttctagtaacaggtttttagaaagtcaaatataaacaaatctgtctatttgtgtgtgtgcatgtggtagtggggagggaagaaaaaaggagggggagagaaagagaaataagaaccaagtttattatactgtattcagggggaaaacattttcccaaggttctaacagaagagcaaagtgccactgtcaatagcctcagtagtgtkagggttgcttttatgtatttatttatttacttatttatttatttttcctttttttttcctttctctttttttcttctttttttttttttggacagagtctcacact

SEQ ID NO: 622958 - DNA, 533 bp, Homo sapiens
caaatctgtctatttgtgtgtgtgcatgtggtagtggggagggaagaaaaaaggagggggagagaaagagaaataagaaccaagtttattatactgtattcagggggaaaacattttcccaaggttctaacagaagagcaaagtgccactgtcaatagcctcagtagtgtgagggttgcttttatgtatttatttatttacttatttatttatttttcctttttttttcctttctctttttttcttctttttttttttttggacagagtctcacactgtcgcctgggctggagtgcattggcgcaatcttgactcactgcaacttctgcctcccaggttcaagtgattctcctgyctcagccgcccaagtagctgggattacaggtgtctgccaccgtgcctagataatttttttatatttttagtagagatgaggtttcactatgttggccacgctggtctcaaactcctgacctcatgatccacccacgttggcctcccaaagtgctgggattacaggcgtgagccaccgc

SEQ ID NO: 622959 - DNA, 557 bp, Homo sapiens
acacacacaaacactaggtttagatgttttcacagagaattccaccaaacctttagaaatcagatcrtccaaaggcaaattaacaaccctcagccatttgaggcaaaatattacaattgaggcaagatatactgtactgaaaacttgaggaaaaagcaggagagaaagttcctttgggaaattcgaatactcaaaagtgcttacatacaatgaaaaatttggaaatccataagcatggccaaggtgggacacatgctcagaaaaggcctgagaagacactaataactcacctttagtaattcctaggctcacagcaagaaaaaatgaaggctaaggcagaattatatatggctccgctaagtgttgagggagccccaatacagagtcagtaagcaaagtctgggagatgtttttcatatttttttcttttttggctccttgcagtcaaggaaatcatttttaaatcactaaatgctaaatgaacacaagctaaaggaaccgagccgccttcaaacatcaaacataaaaaagaatgcagatattacaaaaccagttta

SEQ ID NO: 622960 - DNA, 557 bp, Homo sapiens
acacacacaaacactaggtttagatgttttcacagagaattccaccaaacctttagaaatcagatcatccaaaggcaaattaacaacyctcagccatttgaggcaaaatattacaattgaggcaagatatactgtactgaaaacttgaggaaaaagcaggagagaaagttcctttgggaaattcgaatactcaaaagtgcttacatacaatgaaaaatttggaaatccataagcatggccaaggtgggacacatgctcagaaaaggcctgagaagacactaataactcacctttagtaattcctaggctcacagcaagaaaaaatgaaggctaaggcagaattatatatggctccgctaagtgttgagggagccccaatacagagtcagtaagcaaagtctgggagatgtttttcatatttttttcttttttggctccttgcagtcaaggaaatcatttttaaatcactaaatgctaaatgaacacaagctaaaggaaccgagccgccttcaaacatcaaacataaaaaagaatgcagatattacaaaaccagttta

SEQ ID NO: 622961 - DNA, 557 bp, Homo sapiens
acacacacaaacactaggtttagatgttttcacagagaattccaccaaacctttagaaatcagatcatccaaaggcaaattaacaaccctcagccatttgaggcaaaatattacaattgaggcaagatatactgtactgaaaacttgaggaaaaagcaggagagaaagttcctttgggaaattcgaatactcaaaagtgcttacatacaatgaaaaatttggaaatccataagcatggccaaggtgggacacatgctcagaaaaggcctgagaagacactaataactcacctttagtaattcctaggctcacagcaagaaaaaatgaaggctaaggcagaattatatatggctccgctaagtgttgagggagccccaatacagagtcagtaagcaaagtctgggagawgtttttcatatttttttcttttttggctccttgcagtcaaggaaatcatttttaaatcactaaatgctaaatgaacacaagctaaaggaaccgagccgccttcaaacatcaaacataaaaaagaatgcagatattacaaaaccagttta

SEQ ID NO: 622962 - DNA, 557 bp, Homo sapiens
acacacacaaacactaggtttagatgttttcacagagaattccaccaaacctttagaaatcagatcatccaaaggcaaattaacaaccctcagccatttgaggcaaaatattacaattgaggcaagatatactgtactgaaaacttgaggaaaaagcaggagagaaagttcctttgggaaattcgaatactcaaaagtgcttacatacaatgaaaaatttggaaatccataagcatggccaaggtgggacacatgctcagaaaaggcctgagaagacactaataactcacctttagtaattcctaggctcacagcaagaaaaaatgaaggctaaggcagaattatatatggctccgctaagtgttgagggagccccaatacagagtcagtaagcaaagtctgggagatgtttttcatatttttttctttyttggctccttgcagtcaaggaaatcatttttaaatcactaaatgctaaatgaacacaagctaaaggaaccgagccgccttcaaacatcaaacataaaaaagaatgcagatattacaaaaccagttta

SEQ ID NO: 622963 - DNA, 594 bp, Homo sapiens
acactagaaagtaactcaaaaccacataaagaaataactccagtaaagataactacataggtaaatataaaagcaattatcatattttttgtaagtctttttaaatattctatatgttttaaaacaaatgtgtaaaataatgactataaatctatgttaatgaagcatgatgtataaagatgtggtttgtgaaattaccaacataaagaaattcataggaaactaaataataatagagattttgtatactattgaagttgtttcaatttactctaaattgttccaaattaagaatgttaattgtaaatccccatggtaaccactaagttaatatcttttgaaaatacagaaaaggaaagcagagggtaaacacagtgatatgctacaaaatagcaactaaacacaaaagaaggcrataattgaggaaattaggaacaaaggaggtataagacatacagaaaacaaaagcaaaatggtaggagtaagcccctctttatcagtaattacattaaatacaaatgaattaaactctccaatccaaagaaagagattgacagaatggatttttaaaaaatgatccaactatattgtcca

SEQ ID NO: 622964 - DNA, 608 bp, Homo sapiens
gtttgtgaaattaccaacataaagaaattcataggaaactaaataataatagagattttgtatactattgaagttgtttcaatttactctaaattgttccaaattaagaatgttaattgtaaatccccatggtaaccactaagttaatatcttttgaaaatacagaaaaggaaagcagagggtaaacacagtgatatgctacaaaatagcaactaaacacaaaagaaggcaataattgaggaaattaggaacaaaggaggtataagacatacagaaaacaaaagcaaaatggtaggagtaagcccctctttatcagtaattacattaaatacaaatgaattaaactctccaatccaaagaaagagattgacagaatggatttttaaaaaatgatccaactatattgtccacaagatactcactttagawcaaaatacacaatgagttgaaatgaaaggatgggagaaaatattccatgtaagtaataaccaaaggagatctgaggcaaatatacttatatcagacaaaatagactttaagtcaaaaactgttacaaaatacaaagaacagtatatattgatttcaaaattaaacaagaagatataaca

SEQ ID NO: 622965 - DNA, 602 bp, Homo sapiens
tcgatcttcactgagagtctaaccagcaaaattcacagtgtggacaccaagtgacaaaaatcccaaatttttcaacaaatatattgtatgggaaagaaaactttgaaaagaawcctgtatgttagaagggattttaaaaacacgacaaatgaaaacaaatgggcaagactaaatcatagtgtcttggaatgcatgcaggaaggacacagccgtgaaaatgcaaggacgcctctactggaacagtcacgtttatcgtcacttttcaggagaaaggtggctgcaactgaggagagtcacatgcttcagggctggcaaagtcctatatcttgacttatgtgatgattacagggatgtttacaaaaatcaaactataagtttgttttgtgccatgttttgtattgtgtgtgtgtgtgttttgtttttcaacttaaaaataaataaaatcaaaaccaaggcttcattatcaagtagcacaaagtctccaatctataacctcctttgtctggatatctgcatttaactaccattgccagagctaatcctgacaatgcattcatatttttaacactgaaacacagtaaacagggaaaattttgctcctc

SEQ ID NO: 622966 - DNA, 602 bp, Homo sapiens
tcgatcttcactgagagtctaaccagcaaaattcacagtgtggacaccaagtgacaaaaatcccaaatttttcaacaaatatattgtatgggaaagaaaactttgaaaagaaacctgtatgttagaagggattttaaaaacacgacaaatgaaaacaaatgggcaagactaaatcatagtgtcttggaatgcatgcaggaaggacacagccrtgaaaatgcaaggacgcctctactggaacagtcacgtttatcgtcacttttcaggagaaaggtggctgcaactgaggagagtcacatgcttcagggctggcaaagtcctatatcttgacttatgtgatgattacagggatgtttacaaaaatcaaactataagtttgttttgtgccatgttttgtattgtgtgtgtgtgtgttttgtttttcaacttaaaaataaataaaatcaaaaccaaggcttcattatcaagtagcacaaagtctccaatctataacctcctttgtctggatatctgcatttaactaccattgccagagctaatcctgacaatgcattcatatttttaacactgaaacacagtaaacagggaaaattttgctcctc

SEQ ID NO: 622967 - DNA, 602 bp, Homo sapiens
tcgatcttcactgagagtctaaccagcaaaattcacagtgtggacaccaagtgacaaaaatcccaaatttttcaacaaatatattgtatgggaaagaaaactttgaaaagaaacctgtatgttagaagggattttaaaaacacgacaaatgaaaacaaatgggcaagactaaatcatagtgtcttggaatgcatgcaggaaggacacagccgtgaaaatgcaaggacgcctctactggaacagtcacgtttatcgtyacttttcaggagaaaggtggctgcaactgaggagagtcacatgcttcagggctggcaaagtcctatatcttgacttatgtgatgattacagggatgtttacaaaaatcaaactataagtttgttttgtgccatgttttgtattgtgtgtgtgtgtgttttgtttttcaacttaaaaataaataaaatcaaaaccaaggcttcattatcaagtagcacaaagtctccaatctataacctcctttgtctggatatctgcatttaactaccattgccagagctaatcctgacaatgcattcatatttttaacactgaaacacagtaaacagggaaaattttgctcctc

SEQ ID NO: 622968 - DNA, 515 bp, Homo sapiens
ctgccgtccaaaagcttactgtctagtgggagagttacacacgtaaggacagtaatctaataagagctaataagtgaaaactaagataarttaataatacaagattacagggaaggtttccaaagtcaatgaggcctcaaatgaatcttgaaagtgtgcaaggattaaccaaatgaagaaatgtgtaagtttttcaaacaaaaaggaacagcatgagcaaatgcaaggaggcctaaaataaagagatgtgtaaagaggtgtaagcagctttgtactgctgcctgataattagaagaatatcgggagtaacaagagctatagaagagagtcacaattacggaaaaatatttattaaattataagaaatttatagcataaggaatagtaggaccgttaaatgttttaataaagatgatgcttctttttttaatatttatttttattatactttaagttctagggtacatgtgcacaacgtgcaggttacatatgtatacatgtgccgtgttggtgtg

SEQ ID NO: 622969 - DNA, 515 bp, Homo sapiens
ctgccgtccaaaagcttactgtctagtgggagagttacacacgtaaggacagtaatctaataagagctaataagtgaaaactaagataaattaataatacaagattacagggaaggtttccaaagtcaatgaggcctcaaatgaatcttgaaagtgtgcaaggattaaccaaatgaagaaatgtgtaagtttttcaaacaaaaaggaacagcatgagcaaatgcaaggaggcctaaaataaagagatgtgtaaagaggtgtaagcagctttgtactgctgcctgataattagaagaatatcgggagtaacaagagctatagaagagagtcacaattacggaaaaatatttattaaattataagaaatttatagcataaggaatagtmggaccgttaaatgttttaataaagatgatgcttctttttttaatatttatttttattatactttaagttctagggtacatgtgcacaacgtgcaggttacatatgtatacatgtgccgtgttggtgtg

SEQ ID NO: 622970 - DNA, 515 bp, Homo sapiens
ctgccgtccaaaagcttactgtctagtgggagagttacacacgtaaggacagtaatctaataagagctaataagtgaaaactaagataaattaataatacaagattacagggaaggtttccaaagtcaatgaggcctcaaatgaatcttgaaagtgtgcaaggattaaccaaatgaagaaatgtgtaagtttttcaaacaaaaaggaacagcatgagcaaatgcaaggaggcctaaaataaagagatgtgtaaagaggtgtaagcagctttgtactgctgcctgataattagaagaatatcgggagtaacaagagctatagaagagagtcacaattacggaaaaatatttattaaattataagaaatttatagcataaggaatagtaggaccrttaaatgttttaataaagatgatgcttctttttttaatatttatttttattatactttaagttctagggtacatgtgcacaacgtgcaggttacatatgtatacatgtgccgtgttggtgtg

SEQ ID NO: 622971 - DNA, 525 bp, Homo sapiens
gaacacttgaaatttttccagtttttaacyattacaaacaatgctgctatgaacattcttttgtaaatcacctggttcatatgtgcaagatatcctctggggtatatatttaaaagtaaaattattgagttattcaacattaccatgaaatgctacactattttttttaacaatcctaccaatttacacttctaccacgaacagataagcattaccattggtcttcatttgtaggaaccatatttgtcttttgctctgggggctttgttttgttttgctttgttttttgcttagaagtgctttggctattagggatctttttttggctccatgtgaactttaggatttttttttaattttgtgagaaataacgttggtaatttgatgggaattgcattaactctatagattgtatgggtgatatggtcactttagctattgatttttctaatccatgagcatgggatgtttttccatttgtttatgtcatctataatttctttcattagtattttgtagttctcc

SEQ ID NO: 622972 - DNA, 449 bp, Homo sapiens
cctccagctttgttcttttggcttaggattgacttggtgatgtgggctcttttttagttccatatgaactttaaagtagttttttcccattctgtgaagaaagtcattggtagcttgatggggatggcattgaatctataaattaccttgtaattttttttaacagccagacactgtatcagagtgaaggaactgaggcatatggccttttagagtgaggttttacgtttatctggataggaattagactgtgtttactattcgctgtacctataggtattagaggctaacatttactctagtgtccttgtttctctcttccttgttgtctttgggcttctctagagactccttcttaaatagagtttgtrctctgaaattgctctcagctgtaactcgggttatacaggatccctattgatagagtgtgggtggagggaaggaagtac

SEQ ID NO: 622973 - DNA, 454 bp, Homo sapiens
gcctcccgggttcacgccattctccttaatacaaaaacttttttacagaaaatacagaactgtcatgtattgaatcrcatccattcaaaattcaaatattgaaatgctaaaccccagtgccccaaaatgtggccttatttggagataggatctttacagaagtaatcgaatttaagtgaggccgttagggtgggcttgatgtaacgtgactggtgtcttcataatcataaaaaggggaaacttagacacagatacatatagaaggaagaagatgtgaagaggcataaaaagcatattaatatctataagctaaatagaaaggcccacagcagatccttctcacagcctcaaaaggaaccaaccctactgacatcttgattttggacttctagacttcagaactgtggatctgagtaaggaagattaccctccgtaatgtgagtggctttcaccc

SEQ ID NO: 622974 - DNA, 454 bp, Homo sapiens
gcctcccgggttcacgccattctccttaatacaaaaacttttttacagaaaatacagaactgtcatgtattgaatcgcatccattcaaaattcaaatattgaaatgctaaaccccagtgccccaaaatgtggccttatttggagataggatctttacagaagtaatcgaatttaagtgaggccgttagggtgggcttgatgtaacgtgactggtgtcttcataatcataaraaggggaaacttagacacagatacatatagaaggaagaagatgtgaagaggcataaaaagcatattaatatctataagctaaatagaaaggcccacagcagatccttctcacagcctcaaaaggaaccaaccctactgacatcttgattttggacttctagacttcagaactgtggatctgagtaaggaagattaccctccgtaatgtgagtggctttcaccc

SEQ ID NO: 622975 - DNA, 454 bp, Homo sapiens
gcctcccgggttcacgccattctccttaatacaaaaacttttttacagaaaatacagaactgtcatgtattgaatcgcatccattcaaaattcaaatattgaaatgctaaaccccagtgccccaaaatgtggccttatttggagataggatctttacagaagtaatcgaatttaagtgaggccgttagggtgggcttgatgtaacgtgactggtgtcttcataatcataaaaaggggaaacttagacacagatacatataraaggaagaagatgtgaagaggcataaaaagcatattaatatctataagctaaatagaaaggcccacagcagatccttctcacagcctcaaaaggaaccaaccctactgacatcttgattttggacttctagacttcagaactgtggatctgagtaaggaagattaccctccgtaatgtgagtggctttcaccc

SEQ ID NO: 622976 - DNA, 436 bp, Homo sapiens
aatgtctcagaagaggggatgcatgcaatggaaacagcagcattctggaaccagaataagaatcagataacctgggtttgaatcctgacaccaccttttagtactggtatgattttgaataaacagttttatgggtttrttcacagtttcttcaactgcgacctgtttaaaataatgtttgtcatgttgcaaaggttacataaaaattttaaatgcctggtactcctatcagagactctaagaaaaaaaaaatctctactaggataactttgcttcccctgagaaactgtgatacttctttttttaagagaagaattatgtagccatgcttttcttccattttgcttcacctgctaaaaaattcagagccaatttggggctcaactgtaagaactgggctgaccctgatactctgtgaatgtgtgttcttcctttc

SEQ ID NO: 622977 - DNA, 596 bp, Homo sapiens
gtaaaatactacagctgtgatgggaaatggtttggcagtaactcaaaatgttaaacatagagttaccatatgatccagcaaatgcattgctaggtgtatccccaaaaacattaaaacaaaattatttaaacaaaatctgtacatgaacagcactattcacaatagccaaaaggtgaaaacaacccaaatgtctatcaaccaatgactagatcaacaaaatgtggtacatccatgcaatagaatgttatttgaccataasaatgaagtagtgactcatgttacaacatgggtaaaccttgaaaacattatatactaagtgaaagaagccaaacaaaaaagcccacatattttttattccacttatgttcagaataggcaaaaccatagagatagaaagtagataagtggttgccagggagtggggagatagggaattgggagtgactgttaataggtacaggatttccattaggtgggataacattgcggagttaaatagtggtggtgtttgcacaacttttttaatacaaaaatccactgaattgtacactttaatgtggtgaattttatgtacataaagttttatgttacgttaa

SEQ ID NO: 622978 - DNA, 596 bp, Homo sapiens
gtaaaatactacagctgtgatgggaaatggtttggcagtaactcaaaatgttaaacatagagttaccatatgatccagcaaatgcattgctaggtgtatccccaaaaacattaaaacaaaattatttaaacaaaatctgtacatgaacagcactattcacaatagccaaaaggtgaaaacaacccaaatgtctatcaaccaatgactagatcaacaaaatgtggtacatccatgcaatagaatgttatttgaccataagaatgaagtagtgactcatgttacaacatgggtaaaccttgaaaacattatatactaagtgaaagaagccaaacaaaaaagcccacatattttttattccacttatgttcagaataggcaaaaccatagagatagaaagtagataagtggttgccagggagtggggagatagggaattgggagtgactgttaataggtacaggatttccattaggtgggataacattgcggagttaaatagtggtgrtgtttgcacaacttttttaatacaaaaatccactgaattgtacactttaatgtggtgaattttatgtacataaagttttatgttacgttaa

SEQ ID NO: 622979 - DNA, 597 bp, Homo sapiens
ttcacgtttgttggccatttgtatatctccttttgagaattgtctattcatgtcttttgcccactttgatggggctatttgtttttttcttgctcatttgtttgagttccttgtagattctggatattagtcctctgtcagatgcagagtttacaaatattttctcccactctgtgggttgtctgtttactctgytggttatttattttgctgtgcagaagctttttagtttaattatgtcccatgtatttatttctgtttttgttgcatttgcttttgggttgttggtcattaagtcttcacctaagccaacatctagaagaggtttactgatgttatagtatagatttttatggttttaagtcttagatttaagtctttgatacatcttgagttgactttttttataaggtgagcattcaaaatccagtttcatccttctgcatgcagcttgccaattatcccagcaccattttttgaatagggtgtcctttccccactttatgtttttgtttgctttgttgaagttcagttggctgtaagtatttggctgtatttccaggttctctattctgttccagtggtctgtgtgcctat

SEQ ID NO: 622980 - DNA, 597 bp, Homo sapiens
ttcacgtttgttggccatttgtatatctccttttgagaattgtctattcatgtcttttgcccactttgatggggctatttgtttttttcttgctcatttgtttgagttccttgtagattctggatattagtcctctgtcagatgcagagtttacaaatattttctcccactctgtgggttgtctgtttactctgttggttatttattttgctgtgcagaagctttttagtttaattatgtcccatgtatttatttctgtttttgttgcatttgcttttgggttgttggtcattaagtcttcacctaagccaacatctagaagaggtttactgaygttatagtatagatttttatggttttaagtcttagatttaagtctttgatacatcttgagttgactttttttataaggtgagcattcaaaatccagtttcatccttctgcatgcagcttgccaattatcccagcaccattttttgaatagggtgtcctttccccactttatgtttttgtttgctttgttgaagttcagttggctgtaagtatttggctgtatttccaggttctctattctgttccagtggtctgtgtgcctat

SEQ ID NO: 622981 - DNA, 331 bp, Homo sapiens
gggtgacccaggtggagaaggccatggactccctgaattgaggagataatgctgagagcccagggagacccaggcatttagattttgcaggagtgarcagtggactggaggagtatagaaggaaattgtattgatttattttttttttgaggtgagttctcactttgtcacccaggctggagtgcagtggcgtgatcatggcttactgcagcctctacctcccaggctcaagcaaaggtacattttttcctctgaatcacctttgcactattgttgcagacaattgtccacatatgcatggatctatttctggactttctattctatttct

SEQ ID NO: 622982 - DNA, 654 bp, Homo sapiens
aagtcaaattgtattagtccattctcacactactataaagaaatacctgagactgggtaatttataaagaaaagaggtttaattgtttcatggttctgcaggctgtacaggaagcatgatgctggcatctgttcagcttctcagaaggcctcaggaaacttacaatcatggcaaaaggtgaaagggaaacacacatatcatcayggctagagcaggagcaagagagggtaagagggtaggtgttgcacacttttaaacaaccatatctcatgggaactcactatcacaagaagagcagcaagtggatggtgctaaaccattcatgataaatttgtctccatgattcaaccacctctcaccaggccctacctccaacattggggagtataattcaacatgagatttggtgggaacagatccaaataataccattctgcccctggccccccaaagctcatgtccttctcattttacaaaacaaaatcatccttctgaacagtcctccaaagtcttaactcatttcagcattaactcaaaagtccacagtccaaagttgcatctgagacaagactactcccttttgcttacgagcctgtaaaataaaaaataagttagctacttccaagacacaataggggtaaatgcatcaggtaa

SEQ ID NO: 622983 - DNA, 617 bp, Homo sapiens
gtcccaggcaaaataaacatgaagaaaactacaccatagcaaatcaaaatcaacttgctttaaaaaagtaataaataaaattataaaagcagcctttaggggaaaaaggcaggtaaaatacagagaaacaaagatgctraggacagatttctcatcaggaaaaatgcatgcaagaagagtatggagtaacatcgctaatgtacccccactccaaccttcaccccccaaaacttgtcaacctaaaattctataaccagtgaaagtatctttcaaacatgaacattaaacatagactctttaaaacatataagggctgatgaatttatcaccagcagacttacacaacaacaaatgtcaaatgaagtccctcaggcagaagaaatgataccagatagaaatgtggatttatacaaaggaataaacagcactgaaactggtaactgcatagtgttctataactcatctccaatgtctaaagatgccagccttccagttctccatgaactgcaaagtctgtgttatgaccatttgccagagatgctggagaaacacacgtgtcagtatcattcaatgtcaagtcaattcctgaccattccaatgtgttagaaaaaggaaac

SEQ ID NO: 622984 - DNA, 617 bp, Homo sapiens
gtcccaggcaaaataaacatgaagaaaactacaccatagcaaatcaaaatcaacttgctttaaaaaagtaataaataaaattataaaagcagcctttaggggaaaaaggcaggtaaaatacagagaaacaaagatgctaaggacagatttctcatcaggaaaaatgcatgcaagaagagtatggagtaacatcgctaatgtacccccactccaaccttcaycccccaaaacttgtcaacctaaaattctataaccagtgaaagtatctttcaaacatgaacattaaacatagactctttaaaacatataagggctgatgaatttatcaccagcagacttacacaacaacaaatgtcaaatgaagtccctcaggcagaagaaatgataccagatagaaatgtggatttatacaaaggaataaacagcactgaaactggtaactgcatagtgttctataactcatctccaatgtctaaagatgccagccttccagttctccatgaactgcaaagtctgtgttatgaccatttgccagagatgctggagaaacacacgtgtcagtatcattcaatgtcaagtcaattcctgaccattccaatgtgttagaaaaaggaaac

SEQ ID NO: 622985 - DNA, 585 bp, Homo sapiens
atgatagtaataactgttgaatagtacattttttgtatagcagatgagcaatatgtttcattcaatttatcatcctcatccttgttcaagagattctttttgtaaaaatgagaataaaagtatttttcaatcttgaggctataaccagtcaaaattttaagattccttaatggccaaccaatcaaaatactcatctaggttggatgaatttaatgtaaatctacaatgtaagtcttcattgagtaattcatcaaataattcattcacttggccaatatttattgagtacctgttatgtactagggattgtgccagtactgtagatataacagtaaataagaaagatgtaatctctgaccttttggagtttgtttacttaagatcctattgatttcagatttactacaattttaaaaacaagtaagatgggcaaattgtatagcatctttaaatggctcccatagatcccctctttcctcaaaatttctcactaccctaaattattcatgcytaaacatccaccacctctttgtcttctggctttttgcctagattagggtagggaacacactttagggaaggagg

SEQ ID NO: 622986 - DNA, 600 bp, Homo sapiens
attatttattgcagcactattcacaataacaaagacatggattcaacctaaatgcccatcaatgatagactggataaagaaawtgtggtacatctacaccacggaatactatgcagccataaaaaggattgagatcatgtcctttgcagggacatggatggagctggaagccgttatcctcagcaaactaacacaggaacagaaaaccaaacactacatgttctcacttataaatggaagctgaacaatgagaacacgtggacacatggtagggaacaacacatactgggatctgtcagtggaggtgggggccaagggagggagaatgctgggcttaatacctaggtgatgggttgatctgtacagcaggtcctgtgccttctcaaacaggtttagggcaatcttactgtatctcctgaaataatccccccaaaatcagaatttcagagtttacatttacagttgaagagtcagaagtccagagagggggcatggcttgcttttgacagaggttggtgaaattctagctctcctgagtccctgtcgcacttatttagtcctaacactgtggcacgtgttacatgttatgtaacaaacctg

SEQ ID NO: 622987 - DNA, 600 bp, Homo sapiens
attatttattgcagcactattcacaataacaaagacatggattcaacctaaatgcccatcaatgatagactggataaagaaaatgtggtacatctacaccacggaatactatgcagccataaaaaggattgagatcatgtcctttgcagggacatggatggagctggaagccgttatcctcagcaaactaacacaggaacagaaaaccaaacactacatgttctcacttataaatggaagctgaacaatgagaacasgtggacacatggtagggaacaacacatactgggatctgtcagtggaggtgggggccaagggagggagaatgctgggcttaatacctaggtgatgggttgatctgtacagcaggtcctgtgccttctcaaacaggtttagggcaatcttactgtatctcctgaaataatccccccaaaatcagaatttcagagtttacatttacagttgaagagtcagaagtccagagagggggcatggcttgcttttgacagaggttggtgaaattctagctctcctgagtccctgtcgcacttatttagtcctaacactgtggcacgtgttacatgttatgtaacaaacctg

SEQ ID NO: 622988 - DNA, 585 bp, Homo sapiens
aatacctaggtgatgggttgatctgtacagcaggtcctgtgccttctcaaacaggtttagggcaatcttactgtatctcctgaaataatccccccaaaatcagaatttcagagtttacatttacagttgaagagtcagaagtccagagagggggcatggcttgcttttgacagaggytggtgaaattctagctctcctgagtccctgtcgcacttatttagtcctaacactgtggcacgtgttacatgttatgtaacaaacctgcacatcctccacatttattccagaactcaaaataaaagttgaagaaaaaaaagagccataattccattcaacggctagatatgtcccatgtgcagactagtaatggaccagtacccacagcagcccacagcagcccagtgggtgatcactaggtagcagccaacctctcccccaacacccctctactgcagcacttccacagcaattgctgagtcacagttctgcctagaattagttgcaaatatctaagcattgctagcactattgtatcagacacttatctatcccatgtcattttcatttgttgagtttttggctacc

SEQ ID NO: 622989 - DNA, 585 bp, Homo sapiens
aatacctaggtgatgggttgatctgtacagcaggtcctgtgccttctcaaacaggtttagggcaatcttactgtatctcctgaaataatccccccaaaatcagaatttcagagtttacatttacagttgaagagtcagaagtccagagagggggcatggcttgcttttgacagaggttggtgaaattctagctctcctgagtccctgtygcacttatttagtcctaacactgtggcacgtgttacatgttatgtaacaaacctgcacatcctccacatttattccagaactcaaaataaaagttgaagaaaaaaaagagccataattccattcaacggctagatatgtcccatgtgcagactagtaatggaccagtacccacagcagcccacagcagcccagtgggtgatcactaggtagcagccaacctctcccccaacacccctctactgcagcacttccacagcaattgctgagtcacagttctgcctagaattagttgcaaatatctaagcattgctagcactattgtatcagacacttatctatcccatgtcattttcatttgttgagtttttggctacc

SEQ ID NO: 622990 - DNA, 550 bp, Homo sapiens
aaatacagagatctcagacccagccactctggggaacagtggtttaacatcttatctcagatgcagataatactctaaattctttcattcccatgayatttgggttacaaatgcttccaatattttcaaaagctctgggcaagtctccaaattagagtttgctctggtccatgtttagttatttgtgaagtccttatctgtggtctttgcatctctagttttctcacctgtccattggaagagccatcaatggacatccccacacaacagggtcagaaaaggagattaacacacatgtggtgtgtttaatttttaaaactaaatactggcctgattctcacaagtatgtttaataaatgcacacacttacattaacattcaagaacaggcatcatgggatgagtgccaatgttgctctgagttccccacgagtaaagacactaatggaacagcagtccatttggaaacccacgcttggcctccatgaatgggccacctgaatagtccttcagcagttgaatagtagcatgcatgtagtcccagctactcg

SEQ ID NO: 622991 - DNA, 550 bp, Homo sapiens
aaatacagagatctcagacccagccactctggggaacagtggtttaacatcttatctcagatgcagataatactctaaattctttcattcccatgatatttgggttacaaatgcttccaatattttcaaaagctctgggcaagtctccaaattagagtttgctctggtccatgtttagttatttgtgaagtccttatctgtggtctttgcatctctagttttctcacctgtccattggaagagccatcaatggacatccccacacaacagggtcagaaaaggagattaacacacatgtggtgtgtttaatttttaaaactaaatactggcctgattctcacaagtaygtttaataaatgcacacacttacattaacattcaagaacaggcatcatgggatgagtgccaatgttgctctgagttccccacgagtaaagacactaatggaacagcagtccatttggaaacccacgcttggcctccatgaatgggccacctgaatagtccttcagcagttgaatagtagcatgcatgtagtcccagctactcg

SEQ ID NO: 622992 - DNA, 611 bp, Homo sapiens
tccggctctgccctgcacggtgggcatcacagcagggctctgggcccctctgcccaggcccgggctcctcaggcagccggctgagcccacactcctgggagccgccagggagcctggcctctccagcagcagctggacgctgagaggctgcccaggcaggctctgcccagccagggtgggaactgcgatccgccacccagagggatgtgctttaattgaaaatttatgtttaattgaagagtcacctgtttcatgtgagatcagagagcaggctcccctcagatttgtaatggggacaagaagtatatcattacatgtttactttgtaaggaaaggaagtttcatatttaattcatacaaggattccttggctaggaaagaaaggtttttaaaagccaggttcacatggcagatatttaaaacacccaacatctttattgcacaggtttctgttttgttggctcatatccttctaaacwcggcggtcaacagaagggaaagcactagaaaggctgcattgtcctcaaatcatttaagaattactgtgagcttgaaagccaacttagaaatcaatgccattagaaaaaaagtgtgcagaaatacaattaagg

SEQ ID NO: 622993 - DNA, 611 bp, Homo sapiens
tccggctctgccctgcacggtgggcatcacagcagggctctgggcccctctgcccaggcccgggctcctcaggcagccggctgagcccacactcctgggagccgccagggagcctggcctctccagcagcagctggacgctgagaggctgcccaggcaggctctgcccagccagggtgggaactgcgatccgccacccagagggatgtgctttaattgaaaatttatgtttaattgaagagtcacctgtttcatgtgagatcagagagcaggctcccctcagatttgtaatggggacaagaagtatatcattacatgtttactttgtaaggaaaggaagtttcatatttaattcatacaaggattccttggctaggaaagaaaggtttttaaaagccaggttcacatggcagatatttaaaacacccaacatctttattgcacaggtttctgttttgttggctcatatccttctaaacayggcggtcaacagaagggaaagcactagaaaggctgcattgtcctcaaatcatttaagaattactgtgagcttgaaagccaacttagaaatcaatgccattagaaaaaaagtgtgcagaaatacaattaagg

SEQ ID NO: 622994 - DNA, 486 bp, Homo sapiens
atgggcacaggatgctgggcgcyggacaggcagggagaagctgagcgacgccaggcagtagagggacagagtaaggggactagagtggagctgagggaccacaggtccagggtctagtgagccaggcacacaggcacaggggaggccgcagagccctacagggcaagggcaggagctggggcaaggcaggcagggtggggccagggtgccccatgggtccatcagtcaagagtggagcccagaaaagatcaagctgagggcccctgcactctgaggtggggccagctcagctgcctgccttggcaggaacccccacccatgctgacaccccctgctgcccccatctgctgagcactccctggcctcacacagggtggatgtcctcacaggacccaggttctggggtcgagggcactttccagctctctgtgccggtgactgtctaccaggcagcttctcaggaccagctgagctgggacatgaccc

SEQ ID NO: 622995 - DNA, 486 bp, Homo sapiens
atgggcacaggatgctgggcgccggacaggcagggagaagctgagcgacgccaggcagtagagggacagagtaaggggactagagtggagctgagggaccrcaggtccagggtctagtgagccaggcacacaggcacaggggaggccgcagagccctacagggcaagggcaggagctggggcaaggcaggcagggtggggccagggtgccccatgggtccatcagtcaagagtggagcccagaaaagatcaagctgagggcccctgcactctgaggtggggccagctcagctgcctgccttggcaggaacccccacccatgctgacaccccctgctgcccccatctgctgagcactccctggcctcacacagggtggatgtcctcacaggacccaggttctggggtcgagggcactttccagctctctgtgccggtgactgtctaccaggcagcttctcaggaccagctgagctgggacatgaccc

SEQ ID NO: 622996 - DNA, 611 bp, Homo sapiens
ataaaaataattgaataaaacaagttcttacattgaaagtagaacaatgacacactcttaatttcctgacataaagtagacttcagactgttacagcgtattggcagtttctccattagaaaattgacaagaatggggagaaaactgtaggatcctggggttgctctttgtttacaactttaaatttgacattaacttccataaatatccaattgttctcctagtttttcctaaatagattcatttcatgctcattttgtatcaaaggcaaaagagtccaaagaaaagtgaacaatatacagaatcactattggaagcatcaagaacataaagataataacttaggtttaaaacatttgcaaagtgttgtaagtcattagagaaaaaagttttgacctggaatatttgggtttcactcttctaaagttttaagtagagggcaaagagatkgtcagccttgctttctgtgtaaacacagtgtctggcaaaactaagtctacaggaaatatttgttgaatgaattacttgattgatgttggtattagatgtagtagacaattgaatatctttcctcttaagatttaaacaatgacacacacaaacaaaaaagt

SEQ ID NO: 622997 - DNA, 485 bp, Homo sapiens
gttacagtcacttgatgtggttttaaaggtatttatgaattaataatttcttagcacttgtcagaccactggagattgctatcccaccagaatattgtgacatacctagccaatcaagtctgcattactctaactggtttttccagtcatttacatttttacaaatgataattataattatgaaattacagcctttcagaacaggaagggatcctagaaagacattaatttaacccttcatttaataaatgaaggaaataaatgagggaaagggcatcraacactatgtttgtatgcttaactattccaaaaagcatttgagccttgttgctcattggcggtggtttagacaatgcattattgatatcactgaaccagctttccagactggatgagatagacaactagattgggtgagactcctataagtgattagccacatacaccaacttggtctgaccatactaattcatttcaggtcctcc

SEQ ID NO: 622998 - DNA, 585 bp, Homo sapiens
agaagaacattcatacatgagttcttattttattaacaagtgtgtgttgagccctatgaagatgaggcacattgaaaggggttgattctacagacagaaagataacaggttcaagtttatgcccaaggamaagcacacttatagttctatagttctatagtctagtttataagaattcatacaatctgaggtctctattttgctattgcaaatgtctactttatgtgttggggtgtgacaaactgttttagcaattggtctctcgttctaaatgcaaaggaccttctcagaccatgctaacctggtgacacatcctaataagttgaggctgaatgagatcttttgtcacatctggttactcaaagacatgatgtcctcactccacaggccttgtgctattgagagaggagctgaagtcacacataaataatttaggctcctccactgcatgaaaagcatctgtttaaggagctgtcaagctgtccacctctctagtgaaatcatatttactttattcatctaaataatgtggcttgtttgccttctgtgtgaaattgtcttgcactgtttctcattggtgggttt

SEQ ID NO: 622999 - DNA, 602 bp, Homo sapiens
atgatgtttgcctctcatgtaacaactaatttttatgctaaaaggaaaacagaaaaaaaaggactagaaagagctaaagtgctactttccatgtgctcatctttgttcatcaatatgcagacaatagctaagaaaacagattctgatgtagactgtgttaaagatgttcgcttctctttccagttcttcctgctaaaagattagctgactgccaagtatcatcatttagatgctaaaaagcaaaagttgtgtcttgtttatttcagtaatatctttgcacagtgagatgttcaggaaatgactgagcatgtcaaatgaatgaatgattactattttttcttcagggttttaatccatgtaatagtattgcycttctcattttatattttcctccgtatcccaaaatttgtctccattaggaaataaaagtactatatagtcttctccctagcacctcttttacatacattcttaattgtgggtaacagaaaccaatgactgtttcattacttccaagttttatcacaaagaatcccatgaagaaccagttcttaatttccaaaacccaatctgccttcttcctaatcatattcacagtcgtg

SEQ ID NO: 623000 - DNA, 566 bp, Homo sapiens
cacacacacataaacacacacacacacatatgtatatatatgtatattctgcatatcatattataggatgatacatatgtatgttaatatcaaagggttcaaagaagggagaagacrtgggaagtggctcttagtctgccatttgcactgagtcctctgtagctttaagaagaaatatcgatttatttcattggttgtgcttgtttttgacccaaatgttcactttagcccatggtctgatcttttcaaagacaagcttactcaagcaaagaaagaggaaagctccccattgtcacgtcaattatagataagttcatgccaacataatacctcctcctcatcttatttctgtagctcaggataaaaagataatctccaaaggaggcctaaaaaacagccacattaattaaaggaaagagattttttttttctaggaagtgcctaataactaacggacaagcaaaggagactcattagtggaagtatttcctttgaaagggcacacacgctgtgaaaaaaaaaaaagaaagggttatgccaggcttttctctttgtaaataaagtga

SEQ ID NO: 623001 - DNA, 573 bp, Homo sapiens
ttaaaaagcaataaataaaaatctatatatcaagaaataaatactctgcagagtattaaagcatggaatattagtcttttctcactttgctataaaaaaacacctcagactgggtaaattataaagaaacgaggtttaattggctcatggttctgcaggctgtacaggaagcatagtggcttctgcttctggggagayttctggaagcttccaatcatggcagaaggtaaaaggagagcaggcatcttccatggcaggagcaggagcaaaagaaagagtgaggggaaggtgctacacacttttaaacaaccagatctcacaagaactcattcacggggagcaggcatcttccatggcaggagcaggagcaaaagaaagagtgaggggaaggtgctacacacttttaaacaacgagatctcacaagaactcattcactgtcatgataatggcaccaaggagatggtgctaaactgtccatgggaaacccactcccctgacccaaccacctcccaccaggccccacctccaacactggggattacaattccacatgagattttggtggcgaaaca

SEQ ID NO: 623002 - DNA, 573 bp, Homo sapiens
ttaaaaagcaataaataaaaatctatatatcaagaaataaatactctgcagagtattaaagcatggaatattagtcttttctcactttgctataaaaaaacacctcagactgggtaaattataaagaaacgaggtttaattggctcatggttctgcaggctgtacaggaagcatagtggcttctgcttctggggagatttctggaagcttccaatcatggcagaaggtaaaaggrgagcaggcatcttccatggcaggagcaggagcaaaagaaagagtgaggggaaggtgctacacacttttaaacaaccagatctcacaagaactcattcacggggagcaggcatcttccatggcaggagcaggagcaaaagaaagagtgaggggaaggtgctacacacttttaaacaacgagatctcacaagaactcattcactgtcatgataatggcaccaaggagatggtgctaaactgtccatgggaaacccactcccctgacccaaccacctcccaccaggccccacctccaacactggggattacaattccacatgagattttggtggcgaaaca

SEQ ID NO: 623003 - DNA, 573 bp, Homo sapiens
ttaaaaagcaataaataaaaatctatatatcaagaaataaatactctgcagagtattaaagcatggaatattagtcttttctcactttgctataaaaaaacacctcagactgggtaaattataaagaaacgaggtttaattggctcatggttctgcaggctgtacaggaagcatagtggcttctgcttctggggagatttctggaagcttccaatcatggcagaaggtaaaaggagagcaggcatcttccatggcaggagcaggagcaaaagaaagagtgaggggaaggtgctacacacttttaaacaaccagatctcacaagaactcattcacggggagcaggcatcttccatggcaggagcaggagcaaaagaaagagtgaggggaaggtgctacacacttttaaacaacsagatctcacaagaactcattcactgtcatgataatggcaccaaggagatggtgctaaactgtccatgggaaacccactcccctgacccaaccacctcccaccaggccccacctccaacactggggattacaattccacatgagattttggtggcgaaaca

SEQ ID NO: 623004 - DNA, 521 bp, Homo sapiens
ttgaattgaaatataagtcttaaaaccagtctgttccctcacagcagattgatttccttgagattagagagtaggtttcatttatctttatgtatctagtaggtcatatagcatcctgcaccaagtaggccatcaaaaaatattcatggaggcagtggctgacacctgtaatcccagcactttgggaggccgaggcaggtggatcacgaggtcgggagttcaagaccagyctggccaagatggtgaaaccccgtctctactaaaaatacaaaaatttttatttttgtattacgggcgtggtggcacacacctgtaattccagctactctggatgctgaggcagagaattgcttaaacctggaggggcagaggttgtcgtgagccaagatcgcaccactgcactccagcctgggctacagagcaagactccgtctcaaaaaaaaaaaaaaaaatcatggaaaaagtgaataaatggtcttcctcagggatagaaagggtaaaaaatgttttttaattagaaa

SEQ ID NO: 623005 - DNA, 495 bp, Homo sapiens
tacgggcgtggtggcacacacctgtaattccagctactctggatgctgaggcagagaattgcttaaacctggaggggcagaggttgycgtgagccaagatcgcaccactgcactccagcctgggctacagagcaagactccgtctcaaaaaaaaaaaaaaaaatcatggaaaaagtgaataaatggtcttcctcagggatagaaagggtaaaaaatgttttttaattagaaagatcaacaactagagtagtttgagcccattaaacatagagcaaacctccttggacaccctccattttcatgtctgtgtataaattgaacaagataatgaaaccttctgcttataagaaaaaatgttagtttctattctgcattgtagtagattttaaaaagatttccattgaaaacatctactttttaacatttggtgctaaatttgtaagttcctgtttccgaaaaaaattcacttaagttgactaatttatttcctgataa

SEQ ID NO: 623006 - DNA, 587 bp, Homo sapiens
gatgatatctccttgtgggtttgatttccatttctctaatggtcagtgatattgagagatattgagcttttcttcatatgattgttggctgcatgtatgtcttcttttgaaaagtgtccattcatggccaggcacagtggctcacacctgtaatcccagcactttgggaggccaaggcgggcggatcacgaggtcaggagatcgagaccatcctggctaacacggtgaaacaccgtctgttctaaaaatacaaaaaaattagcggggtgtggtggtgggcgcctgtagtcccagctacttgggaggctgaggcaggagaatggcatgaacccaggagggggagcttgcagtgagccgcgattgcrccactgcactccagtctgggtgacagagtgagactctgtctcaaaaaaaaaaaaaaaagtgtccgttcatatccttggcccactttttaatggggttgcttgttttatagttgtaaacttaacttccttatagatgctggatattagacttttgttggatgcataatttgcaaaaattttctcccattctgtaggttgtctgtttactttgttaatagcttc

SEQ ID NO: 623007 - DNA, 432 bp, Homo sapiens
tgtagagcgtcacgttctaccttcaggttagttgtcctactttgggtatggtgagacagtgcagagagctggagtaggtaacattgtagaactactcctgtgcactcaagagaaggtgccagaatcgggactgtagtgatcgccacaagggtggccatttgctgggattctgaatcaatgtgtttcaaggttgagaaggccttctggaatatccaaatggattccattaatggttgaatgaagggttgttttaatggaactaattttattacttgtctgcaaatctataatttatatggctctaccttgtatygttctatggaaatttttgttttacctctttagcataccctgaaggcactagtacttcttattcaatgcatgtatggatgtttgtattttccaagaaaaatactataaattttgtaaaat

SEQ ID NO: 623008 - DNA, 547 bp, Homo sapiens
ttttgtttgtgagaagcctaaagattatgctgaatcttagatcttgttaaacttacattcaataggtgtagcattttcragggggcatgcagaagccttctgagaatgggggtactctgtttcttgatctacatgctggctataggagggtgttcatttgtgaaaagtcagtaagctgcacacttgtaagatatgcattttttctatatgtaaattatactgtagtaaaaattcaaaacataaaagagaaatcactagggtgaccatttaagtaatagacttaagtaacaggacttactgttatatacagggtatataaataggatatacaacttcaaaaccaggagaggaaataagtgaattagagaaacacacaccagatccaaaagaaaattaaaaagttaaaaggtcaagtaaaataaaaaaagaaaaaatgaaaagggccaaattttaaaaatacataaaagtgtatccaaatatatctgcagtcataatcaatatagatttgttaaatgacacaaatttacagtctggatcttttcaaatg

SEQ ID NO: 623009 - DNA, 575 bp, Homo sapiens
tggctcaagatgaacttggctcttttctgaagcacacattttaaaaagtaaataaaagtctactttatccttttttaaagcaatttttcaatcctttggtgcctcaaaggattgtattatcttacaggaaaaccttaagagggagatatgtcctccttgccttrtacaaatttgaaaggtctcctctatctttaggatgacctcttctacttcttcccactccccttcttctatctacagaagacaagctctcatccagacccacagaagatgatctactaatattttattttgtttatttattttgagacagagtctctctctgttacccaggctggagtgcagtggcacaatcacagctcactataatctctgcctcccgggttcaagcaattctcctgcctcagcctcctgagtagctgggactacaggcatgcaacaccatgcccaactaatttttgtatttttagtagagatggggtttcaccatgttggccaggttggtctcgaacttctgacctcaaatcattcacctgcctcggcctcccaaagtgctgggattacaggcatgagcc

SEQ ID NO: 623010 - DNA, 575 bp, Homo sapiens
tggctcaagatgaacttggctcttttctgaagcacacattttaaaaagtaaataaaagtctactttatccttttttaaagcaatttttcaatcctttggtgcctcaaaggattgtattatcttacaggaaaaccttaagagggagatatgtcctccttgccttatacaaatttgaaaggtctcctctatctttaggatgacctcttctacttcttcccactccccttcttctatctacagaagacaagctctcatccagacccacagaagatgatctactaatattttattttgtttatttattttgagacagagtctctctctgtyacccaggctggagtgcagtggcacaatcacagctcactataatctctgcctcccgggttcaagcaattctcctgcctcagcctcctgagtagctgggactacaggcatgcaacaccatgcccaactaatttttgtatttttagtagagatggggtttcaccatgttggccaggttggtctcgaacttctgacctcaaatcattcacctgcctcggcctcccaaagtgctgggattacaggcatgagcc

SEQ ID NO: 623011 - DNA, 441 bp, Homo sapiens
  misc_feature 1, 2, 3, 4, 5, 6, 7, 8, 9, 10, 11, 12, 13, 14, 15, 16, 17,18, 19, 20, 21, 22, 23: n = A,T,C or G
nnnnnnnnnnnnnnnnnnnnnnnggggcgagctaaaacctccaatgataacaaactgtctctcagaccacagtgcaatcaaactagaactcaggattaagaatctcactcaaaaccgctcaactacatgggaaactgaacaacctgctcctgaatgactactgggtacataatgaaatgaagacagagataaagatgttccttgaaaccaatgagaactaagacacaacataccagaatctgtgggatgcattcaaagcagtgtgtagagggaaatttatagcactaaatgcccacaagagaaagcgggaaagatccaaaattgacaccctaacatcacaattaaaagaactagaaaagyaagagcaaacacattcaaaagctagcagaaggcaagaaataactaaaatcagagcagaactgaaggaaatagagacacaaa

SEQ ID NO: 623012 - DNA, 518 bp, Homo sapiens
acacctgctaatttttgtatttttggtagagatggggtttcaccatactggcctggctggtcttaaactccttacctcaagtgatctacccgcckcatcctcccaaattgctaggattacaggtgtgagccaccacacctggcctaagacctgctgttatgtaagaaatcttaaaagatattcaggcagtagaaatatggtactcaacaaaaacttacaactacacaaagaaataaggagtgctggaaattaaataaatgaaagtaaaaataaaactatttaggttatctttcttatttttaattgctctaagacttaattgactctctaaaatagaggttagcgagcctttccataaaggatcagatagcaaatactttgttttgtaagccaaatgaactttgctgaaattactaaatttcaacattgtagtgctaaagcagccatagataatgcataacaaataagtgtggctatgttttaataaagatcatcatggtgtgtaatttcatcatact

SEQ ID NO: 623013 - DNA, 590 bp, Homo sapiens
aaatgtgttgtgatgattctatgattcatgctacgaagtgctctaaaataaatacaaaatgcaactatctttaatactctgaaattattcattattaaattaaagtagcattcattttatgctggttttaatagctaatttaactatttaaagaagctactttaaaaaataagacacttctttccatattacgtggtgggtattctcaatcttcatccccaaccacattctcccagaatttgggttggttaaaatttagtattaatctccttcccgctttcaatactttcaaggcaacagttttcccattatgtcaaaactgacttattttttcacaaaccaaatttttctagctctgttgatcatttaagactattgaaaaatcagggcagattttggaaagtacagcagaatacaatttattactggtaaattgtcagttatgatcagccttcatgttttttaagatgaaacaatttgttttagaggtgggcaattcttaaaaagaccagtagttggagttggttacacacacacaayagttatgtttccaatgtggaaaatgcacccagtttctaaaattcagcaaa

SEQ ID NO: 623014 - DNA, 530 bp, Homo sapiens
gaaaatttttcagtgtacaggacttcacatcttttgttagatttatacctaagtatttcttattttttgatactattgttaatggtaatttttaaatacctgaacttacagtagagtttgtatagaattgacatcaattcttcctyaaatatttggaggaattttccattgaagctatttgtgcctggagtttcctttgaagatttttaactaaaaattcaattccttttagggctgttcagattgtttatttattttggagtgaactttgcatttcatctttcaaagaatttgtgtatttcatccaaattgtcagatttattgacataaagtttttcatactattaccttattcttcactcctctgttagcctttatactttctctggaatccacagtgatgacatctctcttctgatagtagtattttttttttttttaagatggagtctcgttctgtcgcccaggctgcagtgcagttgtgtaatcttggcttgctgtaacctctgcctcccaggttcaagcgattc

SEQ ID NO: 623015 - DNA, 631 bp, Homo sapiens
  misc_feature 616, 617, 618, 619, 620, 621, 622, 623, 624, 625, 626, 627,628, 629, 630, 631: n = A,T,C or G
gtgaggatcagatctgttgagtgccagatgcccggcacaaggctgagcggcgtgcacacgtgcttgcagatgcagcgcagtccgcctgtgtatcacaggaaaagcccaagcaggctggtgtggcaccaacctcacaggtgccctattcatgtctggatttttagatcaaatgattaggtaggaacagttcatacaattcaacctaaacatgtaattatatgtggatccaagcctgggcagatgcaggcaaaagacctgggcagatgtctcaaggagaggccagcaagagctcattggtcaggtgatggggaagggcttgtgtagagggttaccccaaaaagggggcatgaagtacaagggyactcgggacatgaggcacccagggaattgcaggcctctccaggtggggtggcaagatggatggctgatcaagttcgggagttgggaaaggtggcagtccacagaggagctcacgagtcaggccaaggagttcaattctgccctcaaattgccaggcaatagtaaggactgtaagcagagggatgataagtcaggttcaggaccaactggtctacaggtacaatgcatacaaattgcatgagcaagttcccaaaannnnnnnnnnnnnnnn

SEQ ID NO: 623016 - DNA, 631 bp, Homo sapiens
  misc_feature 616, 617, 618, 619, 620, 621, 622, 623, 624, 625, 626, 627,628, 629, 630, 631: n = A,T,C or G
gtgaggatcagatctgttgagtgccagatgcccggcacaaggctgagcggcgtgcacacgtgcttgcagatgcagcgcagtccgcctgtgtatcacaggaaaagcccaagcaggctggtgtggcaccaacctcacaggtgccctattcatgtctggatttttagatcaaatgattaggtaggaacagttcatacaattcaacctaaacatgtaattatatgtggatccaagcctgggcagatgcaggcaaaagacctgggcagatgtctcaaggagaggccagcaagagctcattggtcaggtgatggggaagggcttgtgtagagggttaccccaaaaagggggcatgaagtacaagggcactcgggacatgaggcacccagggaattgcaggcctctccaggtggggtggcaagatggatggctgatcaagttcgggagttgggaaaggtggcagtccacagaggagctcacgagtcaggccaaggagttcaattctgccctcaaattgccaggcaatagtaaggactgtaagcagagggatgayaagtcaggttcaggaccaactggtctacaggtacaatgcatacaaattgcatgagcaagttcccaaaannnnnnnnnnnnnnnn

SEQ ID NO: 623017 - DNA, 577 bp, Homo sapiens
cctaagatcagcattttaaaattaattcaagatttcagatctttctgggtgaatagctagaagtggcaattgcaatattaaaactgtatgtgtcrttctaaatatcaaacagctggttttaagccttatttcttttgaattctctcatctagatatagtcctaatcctcatatgactttgcaaaattatcctagctattatttcaagtcagttggtaactgttaaagaaattaattttatttcaaaggaaggaactcataaatattgatcttatttttagagaaatccatggttatatttttaaccaaaagtgatttctattggttgacaaattagtagtttggcacagtggtgacaatcatggcttcatgtctggactctgctacttgtggaaaagctatgtaccttctctaagccctaatttattcatcttcaaattggaaataatactaggaataaattatttaatgcatgtgtattatatagggccttaacttagtcaatattcaaaaggtacctgatattataattgtttgctgtacatattaataaacaataattggaaaaatttagttgt

SEQ ID NO: 623018 - DNA, 586 bp, Homo sapiens
ttaaatgtttttatgtcatgtgagggataaattccattgaaaacattttaaaaaactgttccatatttgtratgccccactgatataaatttaacaatttacaatgatcattgtaccattttttataatttggatttaatacatttttaaaatgtgtttctcctaacccttagttgtccatctcgtctactttatgtctatttcttttttccttttttctatacttctgtactcccagtcatgttgctcttgttcccttttgtaatgtctttcacttttctcccctttcatagtttccatttttcaggaagaaagaatttcaccattgcccccagctaacttctcagttaccaaaccataagagtgttcattctttattgaatttatggggcacagctatacatgactcccttacatatcccatggaaatacttcaatgcgtcaatagtggatgaacagacgttactgttaactgtaattaccaaatctgacttgtcatccctagcatgcacttcccattatattcctttttaggccagcactatgtatgatattcttaagggtaaaaagaaagtagttatatcaa

SEQ ID NO: 623019 - DNA, 586 bp, Homo sapiens
ttaaatgtttttatgtcatgtgagggataaattccattgaaaacattttaaaaaactgttccatatttgtaatgccccactgatataaatttaacaatttacaatgatcattgtaccatttttkataatttggatttaatacatttttaaaatgtgtttctcctaacccttagttgtccatctcgtctactttatgtctatttcttttttccttttttctatacttctgtactcccagtcatgttgctcttgttcccttttgtaatgtctttcacttttctcccctttcatagtttccatttttcaggaagaaagaatttcaccattgcccccagctaacttctcagttaccaaaccataagagtgttcattctttattgaatttatggggcacagctatacatgactcccttacatatcccatggaaatacttcaatgcgtcaatagtggatgaacagacgttactgttaactgtaattaccaaatctgacttgtcatccctagcatgcacttcccattatattcctttttaggccagcactatgtatgatattcttaagggtaaaaagaaagtagttatatcaa

SEQ ID NO: 623020 - DNA, 586 bp, Homo sapiens
ttaaatgtttttatgtcatgtgagggataaattccattgaaaacattttaaaaaactgttccatatttgtaatgccccactgatataaatttaacaatttacaatgatcattgtaccattttttataatttggatttaatacatttttaaaatgtgtttctcctaacccttagttgtcmatctcgtctactttatgtctatttcttttttccttttttctatacttctgtactcccagtcatgttgctcttgttcccttttgtaatgtctttcacttttctcccctttcatagtttccatttttcaggaagaaagaatttcaccattgcccccagctaacttctcagttaccaaaccataagagtgttcattctttattgaatttatggggcacagctatacatgactcccttacatatcccatggaaatacttcaatgcgtcaatagtggatgaacagacgttactgttaactgtaattaccaaatctgacttgtcatccctagcatgcacttcccattatattcctttttaggccagcactatgtatgatattcttaagggtaaaaagaaagtagttatatcaa

SEQ ID NO: 623021 - DNA, 589 bp, Homo sapiens
atagagttggctattagattaaatgagataatacataggacagtacattgaacagtataaacctagaatcatgccatgctcaatgtaaacaggcactaggaaagagactataaccaattttgggttttytttttttaatgtcacaattgtagttgtagaaaacccgattggttctagaattagacaaacttatggccaaatccttagaatggcacttacttactgactttgaggagttactaatctgagtgccaaactcctcatatgtaaaagggaggtcattcacttatgccttcttagatttcttcaaaagataaatatgaaaacatatgtaaaatgtttaaatcagtgcctggcatgtggagtatgcttgtttgtgaacattttatcccccttcctattctttttttctgctcttctatcaacatatcctcagaagggtggacagggaacaatgagaatattcaggaaagggagcaaaaactgctatgaagatggaagaaacaacaaccatgtgttactactggctcttctccttccccaaaaagaatttagtcttactgcctgtactttctcgccttgttaggta

SEQ ID NO: 623022 - DNA, 589 bp, Homo sapiens
atagagttggctattagattaaatgagataatacataggacagtacattgaacagtataaacctagaatcatgccatgctcaatgtaaacaggcactaggaaagagactataaccaattttgggttttctttttttaatgtcacaattgtagttgtagaaaacccgattggttctagaattagacaaacttatggccaaatccttagaatggcacttacttactgactttgaggagttactaatctgagtgccaaactcctcatatgtaaaagggaggtcattcacttatgccttcttagatttcttcaaaagataaatatgaaaacatatgtaaaatgtttaaatcagtgcctggcatgtggagtatgcttgtttgtgaacattttatcccccttcctattctttttttctgctcttctatcaacatatcctcagaagggtggacagggaacaatgagaatattcaggaaagggagcaaaaactgctatgaagatggaagaaacaacaaccatgtgttactactggctcttctccttccccaaaawgaatttagtcttactgcctgtactttctcgccttgttaggta

SEQ ID NO: 623023 - DNA, 502 bp, Homo sapiens
taactaatttcatgcctcctaacatatctcctctgtgagaatgactcccacctcccatttctagtcctgatccctttcctaatctccaaatttagtttgcactgcctatgcagcttgacagagcactcaactcaacacttccaaaacgtattttatattcccatactctcaattctcagaaaatacaaaggaaagaaatcttgtttctcctgaaagaataaaataggccagacaaaatggctcgtgcctataatcccaactttttaggaggcyaaggcgggcagatcacttgagcccagttcaagtccagcctgggcaacatggcaaaatgcagtctctacaaatttttttttaaaaaattagcgggttgtggtaacatgcacctgtcgtcccagctacttaggaggctgaggcaggaggactacctgagtccaggaggttgaggctgcagtgagccatgattgtgccactgcactccagcccgggtgacagagtaagaccc

SEQ ID NO: 623024 - DNA, 572 bp, Homo sapiens
ctctagcttttatactacttgcctataagtttctgagtctctgaagcattaatgctacatctggaccagcactgttagaaagttcattataattcacaacagtgattggcyttgtctgcacttacataaactgtaacagcatctgcctttattttctgaagctgcagtcttctcataaaatgtctttttagggaaaatcaagattcaaagatcatagtcatttcattttccagcagaaaagaaatacaaagactgttagggaacaatggatctgcctcattcagtctcatctcactgcagtgctgagggcttcagagtttatggtgaaaagacccatcatacaaagcatatcctcatataatgatgatagttagtccagctatttttaagacatgcagcttggccactctctcatcatgttatcagatgtacttcttaagtgctttaatatatacagctttttttacttccagaaggttgatttattttatatttttataaagccatggtactaagttaaacaattttgtttttgataaataaattatatatatttatttggtggagaatgt

SEQ ID NO: 623025 - DNA, 572 bp, Homo sapiens
ctctagcttttatactacttgcctataagtttctgagtctctgaagcattaatgctacatctggaccagcactgttagaaagttcattataattcacaacagtgattggccttgtctgcacttacataaactgtaacagcatctgcctttattttctgaagctgcagtcttctcataaaatgtctttttagggaaaatcaagattcaaagatcatagtcatttcattttccagcagaaaagaaatacaaagactgttagggaacaatggatctgcctcattcagtctcatctcactgcagtgctgagggcttcagagtttatggtgaaaagacccatcatacaaagcatatcctcatataatgatgatagttagtccagctatttttaagacatgcagcttggccactctctcatcatgttatcagatgtacttcttaagtgctttaatatatacagctttttttwcttccagaaggttgatttattttatatttttataaagccatggtactaagttaaacaattttgtttttgataaataaattatatatatttatttggtggagaatgt

SEQ ID NO: 623026 - DNA, 540 bp, Homo sapiens
atactattggaaatttgaacaccaaatgactacttaatcatattaaaaagttaggtttaaaaattttaagtgttataatgaaataatgattatgtaaaaacaaaagccttatcatttacagatacagactgactgttaatagctgaaacatatgctgactgggattgcctcaaaataatacaagayggagtctaagtgaaacaagattggctgtgaattgaagacagctgaagtatatacaggtgttcaatattttattctgcacacttttgtgtttatttgaaattgtccatactaacaattttttattatgcctaggaccagagtctttataagtgggtacttcacatgctcacaaataaagagatacatcatttgtacacattcattattaagctttttgatatgcaatgagaattttcttaacaagataaagctctagaaatgaaggcaaaaattactcattcacaattgaagtctagcatttatataagatcttatagacatgaaacattagtctaagagctttaactcatttac

SEQ ID NO: 623027 - DNA, 540 bp, Homo sapiens
atactattggaaatttgaacaccaaatgactacttaatcatattaaaaagttaggtttaaaaattttaagtgttataatgaaataatgattatgtaaaaacaaaagccttatcatttacagatacagactgactgttaatagctgaaacatatgctgactgggattgcctcaaaataatacaagatggagtctaagtgaaacaagattggctgtgaattgaagacagctgaagtatatacaggtgttcaatattttattctgcacacttttgtgtttatttgaaattgtccatactaacaattttttattatgcctaggaccagagtctttataagtgggtacttcacatgctcacaaataaagagatacatcatttgtacacattcattattaagctttttgatatgcaatgagaattttcttaacaagataaagctctagaaatgaaggcaaaaattactcattcayaattgaagtctagcatttatataagatcttatagacatgaaacattagtctaagagctttaactcatttac

SEQ ID NO: 623028 - DNA, 619 bp, Homo sapiens
tgtgacacatttaggtggtacacacctgtagtaccagctgttgtgaaggctgaggcaggaggatcgtttgagcccaggaggtcgaggctgcagtaacccatgatcacacccactgcactccagcctgggtgacagagcaaggctctgtctaaaaataaaaataaaaataaaaaaattcaaaacccaactcctcttcacctttactaccaccatgtggtcccagtcatcatgagctctatctagatgattgcaatagcctccttaagtaacttaagttacacacttacatagcttcaaataggcatataataaaaaataacagtcccctaccctgcccacaccacattgaatcacctcctcagagggaaccactttcaactctttttagctatttattctatttaccttcatacatctagctaacatacactgccatttctgaccttatctactgattttacagtgtagcagctgaggatttagcaytcttaaatatttcccttccaatattgttataagataatttggggtaaaattgacattcaggggaaaaaaatcaagactcaggattacatcgttaaaattattattattttttagagacagggtcttgctctgt

SEQ ID NO: 623029 - DNA, 378 bp, Homo sapiens
gcagtgagccgagatcgcgctactgcactcaagcctgggcaacagagactccatctcaaaaaaaaaaaaaaattattaaggctagctaggcttttcttcctcttctgaggcttcacatcacatcagctgcaargcttactgcctcactgccttccccagcacccatattcaaccacccctggactccctggggccacctgcacagaagcgtatgcctctcgataatggaaattttattctaaatgcttattttagactcagaaagatccactctcttatgcccgtgtggttgatatgtctgctctgacctgtggtttttgcacagttgaagggtcatactgtccctctctctgccttcaaggaggaccaaactacctt

SEQ ID NO: 623030 - DNA, 564 bp, Homo sapiens
agtgtgagggacctgtctgcactgaggagagcagctgccacacggaggatgacttgactgatgcaagggaagctggcttccaggtcaaggcctacactttcagtgaacccttccacctgattgtgtcctatggtgaggtcctgggaaggcytgagcagtgccccaaaccccttctttcagcctcagagcccacccaggaaagtgtccctaggaaattggctatgggatgaggtacttccttcccagtcttcagcccacagcaaccagggtgctctaagtcctaggccctagggaagttgtcccatactcccaaccaggggtgagagtttacctggaccctcagagaaagtttaggggagtaggcatgcttgggggtggcccccaagggaggccctgggtgacactcagctctttctctggaccatagactggctgatcctccaaggtccagccaagccagtttttgaaggggacctgctggttctgcgctgccaggcctggcaagactggccactgactcaggtgaccttctaccgagatggctcagctctgggtccccccggg

SEQ ID NO: 623031 - DNA, 564 bp, Homo sapiens
agtgtgagggacctgtctgcactgaggagagcagctgccacacggaggatgacttgactgatgcaagggaagctggcttccaggtcaaggcctacactttcagtgaacccttccacctgattgtgtcctatggtgaggtcctgggaaggcctgagcagtgccccaaaccccttctttcagcctcagagcccacccaggaaagtgtccctaggaaattggctatgggatgaggtacttccttcccagtcttcagcccacagcaaccagggtgctctaagtcctaggccctagggaagtygtcccatactcccaaccaggggtgagagtttacctggaccctcagagaaagtttaggggagtaggcatgcttgggggtggcccccaagggaggccctgggtgacactcagctctttctctggaccatagactggctgatcctccaaggtccagccaagccagtttttgaaggggacctgctggttctgcgctgccaggcctggcaagactggccactgactcaggtgaccttctaccgagatggctcagctctgggtccccccggg

SEQ ID NO: 623032 - DNA, 582 bp, Homo sapiens
tccccagtctaaagcctttttattagttcccattaccttttagaataaaatatgtactgttcatcctgacacacaaaactcttcrtgataaatactaattgagtgcctagtatgtgcctgcccttgtgctaaatgttgagggtacaggggtaaacaaggtgaacagcttccctgctctccaagacctttcagtccacaaatgcaatgagtttacagaggagaagcacaagctccgaaaggagctggggtggggttgggggtcagaacctaatttagaaaattgaggaaggtctcaacctcccatcttgcacttacaatagtaatcagcaggtgtggtaccaaatatggaaccaacaattttatctgcattatctcatttaagccatgagtgccattattgttagcctcactttacagataaggaaactgagggctagaaggttaaataagtggcagagttgggatttcctccagattcctgtgagacccagacatcttaatccttttggaacctgtgcttctcctttgtagtactcactacacttgtggaactacatccaactacacttgtggaactacagc

SEQ ID NO: 623033 - DNA, 614 bp, Homo sapiens
ccttccacccacacagcaggataggtattattatgcctagtttatccaggaacaagccagtgctcaaggacagaagacaaaacaaaagtgtgctgcgtggccacactgacattctggtctcctcacccagtccccctccattcccggctgagctgtcctcatccagaggtacagagacagttactaaacatttcacggctctttgtttggaaactatacctcaactaacaatatactaaaatttaaaactaaatatgtaaataaatgcattaaattttttcacagctcatgaaggtgcttttagtactgactatcccaggctgattaagagttgattatttctaaatggcacttcatgtagacatagaagagttaattctgccaactgaattcatcaatcagtcaattcagtgagaaaatgtggtccaatcagtcccagagtatatatatgtgataacctattgatgggttgaacttttcctgagcccagcacataaagctcccggaaaracagccacagtcagagacaatcaaaggttactttggtcccagtaaagatcagacaaaagtctctggaaaatctgttgcaagaggcaccttcaagctaacatgta

SEQ ID NO: 623034 - DNA, 554 bp, Homo sapiens
ttgtgagggtcaaatatgataaatcatgtaaacatgcttcatgttctttaaaatgctatatttgcataaagcagtattagagaaggatgaaggcaacacttattgaacatctgtgatgtggagtgctggatactttacataaaatcacatgcaattattttccagtagagaagattctctccaaagtttcctagtccacaagctgcaatcacagctccctcctcctcacatctcctttctgtcatggccctgtcaccatattccaatgaatacctctgaaatatgtaaatgatagatattactgccagcctaaacaytgaaggaactcaatgaggggtgagctttactagaactagtaattttcagcttccagaggccttgtggtagggttgagttagaattagtgcttctaaagaagctctggatatatttgccaacaaattctgagtggaaactttcttttgaagatgtaaaggaatttatcatcagaccaagatcacatgtacctttttagacctttttatgtggatagaagagactttttaaaaaaaatt

SEQ ID NO: 623035 - DNA, 587 bp, Homo sapiens
  misc_feature 489, 521, 574, 586, 587: n = A,T,C or G
gcctgagccatctagcttcctgggatggggaatgttgaagggccaataatgagaaattgttaggataattacaatgggaagggcaaagggaaaaaggtaatatagcttctaatatccaaaattggatttttgttttttaaacatccacagcaagacaattggccttgaaattttgttagaagagaaaataactttctaagttactttatcttatttatttaccaatcaagaggactattatctagactagactttaagttttaaatctgtgcagaggagcaagcagaagggtgatattaaaaaggtgaaaaacctagtggatagtgttgagggagtatagaaagaaggtacgcagaggaaaagcgaggagrtaaaatgccctggttcctgtcccacatttgtctaaacttgaggtgggaggaaggtcaaaactatgaagtgttttgaaacattgaaccaaccctgttgatttatttctcattctctctntctgcttcctgacatccctccttggttttcanatttcctcctgcataggagttaacattcattaacatcactttccattttgcanagaaaatgtgann

SEQ ID NO: 623036 - DNA, 458 bp, Homo sapiens
cacagtaaaagcatttcattgtggtggtgtcacagtgaggtctgctcataaatgtgcactggtggtaagttgtcagggtccacatgcacgtgcccatgctgctggttgcagggtggcaggatccattcacacatgcacgstggcatggacaggccagtggtggggtgatggggtctgcatgtgtgctcatgcagtgctggcagtagggtggcagtgtggaaaggtccactacacccacatatacaagcacattggtatggcagtcaagggaggctgcaggtgagtgcatgcaggccgagttgtgttgcggggttgtgggcaggcacatgctggtgggggcccatctgtagaagctctctgatggttagacagggtcttttggtgaatgagctatggaagtggtcactaggaagcaccccagttgagcatctgaggctgtgctgcaagcaggtgaggcc

SEQ ID NO: 623037 - DNA, 181 bp, Homo sapiens
tgctgcagggcgaggcccctctgggtagaattttgccaacacgcttcagcctcccaagtagctgggactacaggctgcctccgccamacccagctaattattgtatttttagcagagacagggtttcaccatgttggtcagcctggtctcaaactcctaacctcaggtgatccactcactt

SEQ ID NO: 623038 - DNA, 571 bp, Homo sapiens
catgccagcgcctctgtggacagtctctggccagccctggtgagtccacctcccaacccctgctctggcctccctggcgctgggctcacgaagcttggctggcttgggctctgcagcgtagcctctctctccacgttgtgctgggtcaccttgggggctaggactagctctcattcatttctgtatcccctgtacccagcaagggtagggcacagtggatgggacatagaatgggaagcctgagaagaagagactcagagccaatgcatcaacttgtcatggtcattttccaaggggtactttctgcattgctgtgagtgttttttttttttccagatgacagattctttacagtccctctctgaagttatgaaattaaatgtccttctaaacatgcgcctgtcctgcagcagccagaagaaggggcgtccacctttggaggctgcacatccctgttccccaggctctgaaatccccacctgcctggccttccrgccagtagccccaacgttccaggctgcctgctgctgagacccctctgtttgcagccgtcctctttgatgacaggccc

SEQ ID NO: 623039 - DNA, 571 bp, Homo sapiens
catgccagcgcctctgtggacagtctctggccagccctggtgagtccacctcccaacccctgctctggcctccctggcsctgggctcacgaagcttggctggcttgggctctgcagcgtagcctctctctccacgttgtgctgggtcaccttgggggctaggactagctctcattcatttctgtatcccctgtacccagcaagggtagggcacagtggatgggacatagaatgggaagcctgagaagaagagactcagagccaatgcatcaacttgtcatggtcattttccaaggggtactttctgcattgctgtgagtgttttttttttttccagatgacagattctttacagtccctctctgaagttatgaaattaaatgtccttctaaacatgcgcctgtcctgcagcagccagaagaaggggcgtccacctttggaggctgcacatccctgttccccaggctctgaaatccccacctgcctggccttccggccagtagccccaacgttccaggctgcctgctgctgagacccctctgtttgcagccgtcctctttgatgacaggccc

SEQ ID NO: 623040 - DNA, 476 bp, Homo sapiens
tttgtgcttcaaaattaattcaatttattattcaattgaattatatacctagaagcacaattgttgaattttatgataagactgtgttatctttgtaagaaacgtacaagcagtcttccaaagtggctgcaccatattgcattctcatcagcagtgaatgagggttcctgatgcttttggtcctcactagcatttgacaatgtcagcgtttttttgaattcagaaactgttatagttttaatttgaatttctctgataacaaatgatgttaggtatcctttgccatctgcacgtytttggtgacgtgtgtgtttatattttggccattttaaatttcggttgtttgttttcttgttgagttttaaagtttcttcgtatattccaaatgcaagttctttatcaggtatgtgttttgcaaatactctctccccatatctagcttatgattttattctcttaacactgtgtgtagcaga

SEQ ID NO: 623041 - DNA, 461 bp, Homo sapiens
cacgctggacttggtggctcacgcctgtaatcccaccactttgggaggctgaggcgggtggatcacctgaggtcaggagttcgagatgagcctcaccaacatggagaaaccctgtctctactagaaatacaaaattagctgggtgtggyggcagatgcctgtattcccagctacttgggaggctgaggcaggagaatcgcttgaacccgggaggcagaggttgtggtaagccgagattgcaccattgcactccagcctgggcaacaaaagcaaaactctgcctcaaaaaaaaaaaaaatgtttatcagggctgggtgtggtggctcacccttgtaatcccagcactttgggaggccgaggctggcggattatctgaggtcaggggttcgagaacaggctgaccaacatagcaaaatctcatctctactaaaaatacaaaaattagccaggcatggtggtgg

SEQ ID NO: 623042 - DNA, 609 bp, Homo sapiens
tggtagctcacacctgcaatctcagcactttgagaggctaaggcaggcggatcatctgaggtcaggagttcgagaccaggctggccaacatggtgaaaccccatctctactaaaaatacaaaaattagctgggtgtggtggctggcacctgtattcctagctactcgggaggctgagccaggagaattgcttgaacccrggaggtgaaagttgcagtgagtggagattgtgccattgcactcttgcctgggcaacaagagggaaactctgtctcaaaaaaacaaaaaaacaaaaaaaaaaagaggctgggcacagtggctcacacctacaatcccagcactttgggaggccaaggtgggaggatcacctgagatcaggagttcaagaccagcctgaccaatatgatgaaaccccgtctctactaaaaatacaaaaattagctggtcctggtggcatgcacctgtaatctcagctactcgggaggccgagacaggagaatcatttgaacccgggaggtggaggttgcagagagccgagattgcaccattgcattccagcctggccaacgagagcgaaactctgtctcaaaataaaataaaataaaataaa

SEQ ID NO: 623043 - DNA, 608 bp, Homo sapiens
atggtagctcacacctgcaatctcagcactttgagaggctaaggcaggcggatcatctgaggtcaggagttcgagaccaggctggccaacatggtgaaaccccatctctactaaaaatacaaaaattagctgggtgtggtggctggcacctgtattcctagctactcgggaggctgagccaggagaattgcttgaacccaggaggtgaaagttgcagtgagtggagattgtgccattgcactcttgcctgggcaacaagagggaaactctgtctcaaaaaaacaaaaaaacaaaaaaaaaaagaggctgggcacagtggctcacacctacaatcccagcactttgggaggccaaggtgggaggatcacctgagatcaggagttcaagaccagcctgaccaatatgatgaaaccccgtctctactaaaaatacaaaaattagctggtcctggtggcatgcacctgtaatctcagctactcgggaggccgagacaggagaatcatttgaacccgggaggtggaggttgcagwgagccgagattgcaccattgcattccagcctggccaacgagagcgaaactctgtctcaaaataaaataaaataaaata

SEQ ID NO: 623044 - DNA, 528 bp, Homo sapiens
acattcatacagtattaccagctaatccactgaccccattcccatttcaccaatggtaccaataatgatgtgaatgggtctagggtccaatataggacctcctgttgcagtttcttctcatgtctcttggtctttttttttttttttttgagatggagtttcactcttactacccaggctggagtgcagtggtgagatctcggctcactgcaacctccacctcctgggttcaagcaattctcctgccttcgtctcccgagcagctgggattacaggcaagcgccrccatgcctggctaatttttgtatttttagtagagacagggtttcaccacgttggtcaggctggtctcgaactcctgacctcatgatccgcccacctcagcctcccaaagtgttgggattacaggtgtaagccactgtgcccaggctcttggtctcttttaagctggaacagtttctcagtgttttcatgacttgacatttttggagaggacaacccagctgctttgcagaatgtctgtcggtt

SEQ ID NO: 623045 - DNA, 528 bp, Homo sapiens
acattcatacagtattaccagctaatccactgaccccattcccatttcaccaatggtaccaataatgatgtgaatgggtctagggtccaatataggacctcctgttgcagtttcttctcatgtctcttggtctttttttttttttttttgagatggagtttcactcttactacccaggctggagtgcagtggtgagatctcggctcactgcaacctccacctcctgggttcaagcaattctcctgccttcgtctcccgagcagctgggattacaggcaagcgccaccatgcctggctaatttttgtatttttagtagagacagggtttcrccacgttggtcaggctggtctcgaactcctgacctcatgatccgcccacctcagcctcccaaagtgttgggattacaggtgtaagccactgtgcccaggctcttggtctcttttaagctggaacagtttctcagtgttttcatgacttgacatttttggagaggacaacccagctgctttgcagaatgtctgtcggtt

SEQ ID NO: 623046 - DNA, 584 bp, Homo sapiens
aggcctggaaatctcaaaatcacaggcagagcttccatttgctgagaacctgttatatgccaagcactgtgttaaaccctttcaatgcattatttcactggattcttacaagagcctcatgaggagagattatataatcaccattttatgctgaggaaactgtggccccatgcagagagctgcacagcgaaccagtaacagagcccatttccacagcccttccccattttctcactccaccatatatgtaagactagtgatggatttggttatttctcaaaatttagtgtagcaattggcacatgattcagttattcatytgccagagagagagaggaaggaagtgaatgcttgaagtccttggaagatccactggaaagtcccagagagatgaaccaagtccagtccaacagttaagcctgtgtatttggagggtgaatccacaactcccggcccctaacataacactattttattctatttttatttttcattttaatttttgtgggtacatagtaggtgtatatatttatggggcacttcagatgttttgacacaggcatgcaatgtataataatcacata

SEQ ID NO: 623047 - DNA, 525 bp, Homo sapiens
cacagaaaggcatctccacaagcagaagaattccatatagaggtgttcatactctctctctctctctctcacacacacacrcacacacacgcaggcactcacacacacgtacacatgcacacacacgtacacatgcacacacacatacacatgcacgcacagagcacacctgaatgctcccactgactcacacagctgaacacatgttcacaccctctcatacacccatgccttctgcacctgctcccccatactgctaaactatgggcatacattggcatacacaccacagacatattgcaaaaccgggcacctacatccatgcactgcggggacaggtgtacacacacatggctcttggagctgtttgaaaatactctcataagccagtggttattcacctctccctacaggcaaggccctgtgctaggtgatttacatccaggagtcagtaactcataccaactctaagattagacctgcggctatctccaacagatggggacctcaggctctgggaactta

SEQ ID NO: 623048 - DNA, 633 bp, Homo sapiens
catttaaagacattaaggccatttttgtcttataagccatacaaaaacggagggctgtagtttgctgacccctggtctaaaatatcacccctgaaacacccagttatgcctcctgctagtwtttgttggatacttaatttgttatttgctctatgctacacccccacagatctcccacctctctgggttttggactgtctccccagggcctttgcacatgctattcttgctccctaagaaattcttccctcccatattcacccggtcagcttctagtcagctcattcatcacttcctctgggaaccctccctggcttagtagatcagagcaacgccctgtgttattctcatgatgctgtggactgctctttcggagcccctgttaccatttgtaattatgcatttattcacgtgactctgacgaatgtctctcccctattacatgtaagccccctgaagtcagcagcaatctgttttatttactcgtgtgtcccttacattcccattgtgcctgacactttgaaggcacttaagatttgttagatgaggctgggtgcggtggctcacgcctgtaatcccagcactttggaaagccaaggcaagtggatcactttaggtcaagagttcaagagt

SEQ ID NO: 623049 - DNA, 538 bp, Homo sapiens
tgatgattggaaagccttgggctacagcataaagtatgtttagaagaagtagggaaggtaagctgggagctgactgacgggccacagcaccagaccagtgagttgctaaggcaatagggagccacccgaggttgttgagcagtggagggtcacagttggatctctgtgttaggaagcccactatgatgrctaagaggagcctggcgtggtagcagggagcccggggaaagagacaggacagctggtggttatgtgcccagggtcataccccagtgctaccatttagtagcagtagagccttgagctcagtttcttaacttgtaaaatgggaataaaaatacccagcccatagaattattgagataaaatagttaatgaaaaatgcttagcaggggcctaacacacaagacagtaggaagcagctctggttacaattgtgatcatgatgtggtttgggtgggagatggtgagcccaaggcagaggaaaaggggagagggagagaaaggaacaaatacaaaactaaggctcagtgagggg

SEQ ID NO: 623050 - DNA, 633 bp, Homo sapiens
catttaaagacattaaggccatttttgtcttataagccatacaaaaacggagggctgtagtttgctgacccctggtctaaaatatcacccctgaaacacccagttatgcctcctgctagtttttgttggatacttaatttgttatttgctctatgctacacccccacagatctcccacctctctgggttttggactgtctccccagggcctttgcacatgctattcttgctccctaagaaattcttccctcccatattcacccggtcagcttctagtcagctcattcatcacttcctctgggaaccctccctggcttagtagatcagagcaacgccctgtgttattctcatgatgctgtggactgctctttcggagcccctgttaccatttgtaattatgcatttattcacgtgactctgacgaatgtctctcccctattacatgtaagccccctgaagtcagcagcaatctgttttatttactcgtgtgtcccytacattcccattgtgcctgacactttgaaggcacttaagatttgttagatgaggctgggtgcggtggctcacgcctgtaatcccagcactttggaaagccaaggcaagtggatcactttaggtcaagagttcaagagt

SEQ ID NO: 623051 - DNA, 564 bp, Homo sapiens
tttttcgtgggctacatgagtgacatgcctggtcaaaccaatcccttgagccctatgcaaatcagacaccatctcctccaacctcctagtagaagcagccacttttctgcagcacacggggttttctctttgttagaatcctcctccctctgtctccatacaggggaactgttttcttcttccctctttctttcttgcctattaaactttctgctccttaaaaccacacacacacacacacacacacacacacacacagacacacacacacacacacaccataataataataataataataatatgaccacagaaattgtagtgatggctcttacttaatgagcacctactaaattctagtcctgtgcagagaattygcatgtattacctcaatacacccaatcttgatcaactccttaaggtgggtgtaattacagtctccattttacagatgaggaaactgaggcacaacgagttaaatctgacttgccaggtacacacaaccagtaagtgacagaaccagagtttgaacccgggcagtctggctgcacttgcataaccact

SEQ ID NO: 623052 - DNA, 457 bp, Homo sapiens
tccagcttctaggagacgcccgcattccttggctcccgctctatgttccaagccagcaacatcacatctctctgatcctgcttccgttgtcatatttccgctatttatttattattttattttatttattattgctctgtcgcctaggctggagtgcagtggcgccatcttggctcactgaaacctccatctcccaggttcaagcaattctcatgccttggcctcccgagtagctgggattacaggcatgcatcaccacacckggctacttttttgtatttttagtaaagatggggttttgctatgttggccaggctggccttgaactcctgacctcaagggatccacccacctcagcctcccaaagtgctgggatacaggcatgagccaccacacccagcctatttacgatttttaatgtaataagagatgggatctcactatgttgcccaggctg

SEQ ID NO: 623053 - DNA, 643 bp, Homo sapiens
tcgtggtgcatgcctttagccccagctactcgggaggctgaggtgggaggatctttcaagcccaggagttcaaagctgcagtgagctatgttcatgccactgcattccagcctgggcaacagagtgagactctgtcactaaagaaaaaaaagtgaggtgtggggaggggtaacactagaagtaaggggcttagcgcaatgcctggcacatgggagagatcaatagttgtaagctattattagtcagaaagagaaagaggagacrttttccccttagaaagcccatcttctgcttaacgtccttttctttgttgttgctttttcccagctggaacaactcagaccaaaacatctggcccagccactgcccccagcccactgactgaggaaaaggctgccttgccagaagcttctgcaggctccccagaaagaggccccaccctggaggaggagcccccagggcctgagcccaggattggggctctaggtgtcaaggttttccgctccaggatagcatgcctgccaggttccaggggattcaagcaggaggtggtagggagggagctgggggccccagagcatcttcagctgctgttgggtggaggggaggcagggaatgccctggaggcctaggttctagacca

SEQ ID NO: 623054 - DNA, 632 bp, Homo sapiens
ggggggccttcaaaagactttcatgtagatctgtaaggtaggcaaggccatgttccttctccattctgcwgtcaagaaagccacagctggctgggcatggtggctcacgcctgtaatctcaacaatttgggaggctgaggcaggcggatcacctgaggtcgggagttcgagatcaggctgaccaacatggaaaaactccgtctctactaaaaaatacaaaattagctgggcgtagtggcacatgcctgtaatcccagctactcgggaagctgaggctggagaatctcttgaacccgggaggcggaagttgcgatgagtcaagatcgtgccattgtactctgacctgggcaataagagcgaaactctctctcaaaagaaaaaaaaaaaaagaaaaaaaagaaagccacagcccagaaggccccctatttacagcttgagactggcatgaaggtattcccttagggctctttccagttttcatgaagatgtctcttttctttatgtaaagaagttttgaaattctccccatgggaagatttatattttaatagtgaaatagtggtttttcttttccacatgcataaggtgatggaaacttatgctttccaaatgtcaaacaacagaagagtgat

SEQ ID NO: 623055 - DNA, 567 bp, Homo sapiens
actttatttaaataatttgccctgagacttccttttattcagtcaatgtgtaaatgtgaaacattcttcacatcctgatccagggccttgcacatctggatatttcctctcttgagaacgtatcycctcttacaatttagctattccatcacaccaaaacatctaataaacatctttttttcctaatgtgtcacattagttcgtttattctccatacatccatagccatgagaccatgtcagtgagtgtgctgtttttatgagtttgaagcctaaccaacagttgccctgtctttctgaaactcaatgtcacactgtcctcacacttgaatataatcggcctctgcctacactgtcctcaaattcaaaggtatttagcccattaacagcaatctcaagtttttataagcacatttcccatggcaagttattctcattcatccagcttctccaaaggatagctttcatgaatgacataaatggtgagtgctattcaatattttcctctaacatgttgctaggtttgctgtttgggtacagggaagtcaggatgaaaaatattgaagtt

SEQ ID NO: 623056 - DNA, 583 bp, Homo sapiens
ggggtcggagagacctagaataaattccagccactgttactacttttttaatattgtgggtgataactgtcgtctctgatacaaaaataacacccttcttacagggatattctcaaatagagttcatgtatgtcaacttaggcctgggtcagaagatacttatgactcttcaaaattattttatttcatatgtatataaaggtgtttataggattctctgtatttctgaatgcatttacatctccaaaatagtttcagaaatattatatcaacaccattaccaataatcacaaaaaactaatattcargctctctttgcagtcctttattgtgcttagatataccactgaggttatatgttgttaaagtgcatgttcaaaagtagtttgaatgcttttctttgtgtagttatattatttattcgatatacagttaagaagttgtctttgaaacttctgttttcattcacttataacatttgctgtttttaccttttttatttaattgtattttccaaatttgcaaaatatagcttgttttaacaaagtcaaacctatataaaaagacatgcaaaagaaatcac

SEQ ID NO: 623057 - DNA, 583 bp, Homo sapiens
ggggtcggagagacctagaataaattccagccactgttactacttttttaatattgtgggtgataactgtcgtctctgatacaaaaataacacccttcttacagggatattctcaaatagagttcatgtatgtcaacttaggcctgggtcagaagatacttatgactcttcaaaattattttatttcatatgtatataaaggtgtttataggattctctgtatttctgaatgcatttacatctccaaaatagtttcagaaatattatatcaacaccattaccaataatcacaaaaaactaatattcaagctctctttgcagtcctttattgtgcttagatataccactgaggttatatgttgttaaagtgcatgttcaaaagtagtttgaatgcttttctttgtgtagttatattatttattcgatatacagttaagaagttgtctttgaaacttctgttttcattcacttataacatttgctgtttttaccttttttatttaattgtattttccaaatttgyaaaatatagcttgttttaacaaagtcaaacctatataaaaagacatgcaaaagaaatcac

SEQ ID NO: 623058 - DNA, 588 bp, Homo sapiens
tataccaaaaaattattcatgtgggctcatatatatttttaacacgtaaaagataaattaaaaacagatttaacacttaacaatgggtgcttattctgtacaaatgtgatttaggacagagaattaaagaagggaaaaacawtttacaaaaaaagggagacttgtgcaaactaatgatgatagcatgtcatgagctagggaggatgaacctttcattctgtgagcagagcagaaaaaaaaatcactctattgactgcgttcaacagtcgtcttatatttgccctgttggctgttttgaaaaaccattagtttttttcaagacaatgcaaagataaacttcagcgtgacacaactgagtatgctttgatagggaaagagtgtcctgaaacctccccatctaaaatacccccagtctgactccccagcaacctccatcttctaatactattttattttgttcataaaatgtatccctaactgatgctatactacatattttgtagtataatgatctacctccccaactagaaggtaagctccacataagcagatatctgtttgctctattgttatgtcccaggcaggtga

SEQ ID NO: 623059 - DNA, 588 bp, Homo sapiens
tataccaaaaaattattcatgtgggctcatatatatttttaacacgtaaaagataaattaaaaacagatttaacacttaacaatgggtgcttattctgtacaaatgtgatttaggacagagaattaaagaagggaaaaacaatttacaaaaaaagggagacttgtgcaaactaatgatgatagcatgtcatgagctagggaggatgaacctttcattctgtgagcagagcagaaaaaaaaatcactctattgactgcgttcaacaktcgtcttatatttgccctgttggctgttttgaaaaaccattagtttttttcaagacaatgcaaagataaacttcagcgtgacacaactgagtatgctttgatagggaaagagtgtcctgaaacctccccatctaaaatacccccagtctgactccccagcaacctccatcttctaatactattttattttgttcataaaatgtatccctaactgatgctatactacatattttgtagtataatgatctacctccccaactagaaggtaagctccacataagcagatatctgtttgctctattgttatgtcccaggcaggtga

SEQ ID NO: 623060 - DNA, 588 bp, Homo sapiens
tataccaaaaaattattcatgtgggctcatatatatttttaacacgtaaaagataaattaaaaacagatttaacacttaacaatgggtgcttattctgtacaaatgtgatttaggacagagaattaaagaagggaaaaacaatttacaaaaaaagggagacttgtgcaaactaatgatgatagcatgtcatgagctagggaggatgaacctttcattctgtgagcagagcagaaaaaaaaatcactctattgactgcgttcaacagtcgtcttatatttgccctgttggctgttttgaaaaaccattagtttttttcaagacaatgcaaagataaacttcagcgtgacacaactgagtatgctttgatagggaaagagtgtcctgaaacctccccatctaaaatacccccagtctgactccccagcaacctccatcttctaatactrttttattttgttcataaaatgtatccctaactgatgctatactacatattttgtagtataatgatctacctccccaactagaaggtaagctccacataagcagatatctgtttgctctattgttatgtcccaggcaggtga

SEQ ID NO: 623061 - DNA, 657 bp, Homo sapiens
tccttcaaggcctaacttccctatagctttctctgagcatccttccttatccttgggttcaagtgggattaataattttctccattgtacttttaacatcagattattgttgcaattattgcacttatctaagttattggggtgctgtgcaagaataacttctagagagaagttcttggtgaatgctatgagaagacacaagagactggtaacgactctctggtgggaaaaggaaaacaaaaagaatagaggtatttatagcaagaaatagacaaaagatagaacctctaaggatagagaatgagaggccctcctccttaaagttactgtgacggttagctacataatagtccacgatattgaaagcagagtggggaattgatgaagaaagcataacctgggtgaatcatatatcatcagaagtcctatactaaaaaaaactactaaagaaagaaagaaaatgatcacaggtgaaagtacaaaatgcaagcagtgcagtgcaatggaaagaaaaataatgtgaataatctaaaagaatattgcttactaaaagcaatagtaaggatgtcttgtgaggtttaaaatgtgtgttgtattaaaatgcatcaaaactctaactcaaaaggcakgagtggagcaaatggagttaaagtgttc

SEQ ID NO: 623062 - DNA, 195 bp, Homo sapiens
caggggcagaatgtaccgaaacattttggtagcttcaaatgagggtaatctgtgtctgatatgatacattctcaaataagttgatcttgtataagtctatgaaatgccattccaagaaaacagaaaagctttgctgtagtatatgtygtacagtgagcatgcccccaaattcctttgttttatcaactagaggca

SEQ ID NO: 623063 - DNA, 195 bp, Homo sapiens
caggggcagaatgtaccgaaacattttggtagcttcaaatgagggtaatctgtgtctgatatgatacattctcaaataagttgatcttgtataagtctatgaaatgccattccaagaaaacagaaaagctttgctgtagtatatgttgtacagtgagcatrcccccaaattcctttgttttatcaactagaggca

SEQ ID NO: 623064 - DNA, 525 bp, Homo sapiens
agttttttagattccacacatgagttagatcatgcagtgtttgtctttctatgtccggcttatttcacctaacataacgttctccaggttaattcatgttgyggcaaataacaggactttattctgtattggggctgacgactttaaggagtgattgtcattctcccttttgcatattttattttctcttgaaagtcttacatggctactatataatgatgatttagtgtgtaaagcatttctcccattatatttaaaattcagttttccaaacttgaaactaactgaaaataagattaaattccatgttttaatcattgtgctggtaaaaaggttgtgctcttgatgttctttaacatattctgttacctttcatttgttgtcaaagtttattgaaaggaaaacaatttatattttttattttcacaaaaacaatagtttacttgagtcttggacaataatataactaagcatttgcatatacatataatagaaattttatctttaaaaagctactggcatatt

SEQ ID NO: 623065 - DNA, 525 bp, Homo sapiens
agttttttagattccacacatgagttagatcatgcagtgtttgtctttctatgtccggcttatttcacctaacataacgttctccaggttaattcatgttgtggcaaataacaggactttattctgtattggggctgacgactttaaggagtgattgtcattctcccttttgcatattttattttctcttgaaagtcttacatggctactatataatgatgatttagtgtgtaaagcatttctcccattrtatttaaaattcagttttccaaacttgaaactaactgaaaataagattaaattccatgttttaatcattgtgctggtaaaaaggttgtgctcttgatgttctttaacatattctgttacctttcatttgttgtcaaagtttattgaaaggaaaacaatttatattttttattttcacaaaaacaatagtttacttgagtcttggacaataatataactaagcatttgcatatacatataatagaaattttatctttaaaaagctactggcatatt

SEQ ID NO: 623066 - DNA, 525 bp, Homo sapiens
agttttttagattccacacatgagttagatcatgcagtgtttgtctttctatgtccggcttatttcacctaacataacgttctccaggttaattcatgttgtggcaaataacaggactttattctgtattggggctgacgactttaaggagtgattgtcattctcccttttgcatattttattttctcttgaaagtcttacatggctactatataatgatgatttagtgtgtaaagcatttctcccattatatttaaaattcagttttccaaacttgaaactaactgaaaataagattaaattccatgttttaatcattgtgctggtaaaaaggttgtgctcttgatgttctttaacatattctgttacctttcatttgttgtcaaagtttattgaaaggaaaacaatttatattttttattttcacaaaaacaatagtttayttgagtcttggacaataatataactaagcatttgcatatacatataatagaaattttatctttaaaaagctactggcatatt

SEQ ID NO: 623067 - DNA, 584 bp, Homo sapiens
attattaataacaaaatttttaaaattcatgtatgtgaataaagtttgtactacataattctcagtttctaaatgtgtgttttaaatgttattaaaaaatcagaagttatgagaatgtactttccatttagacttttctattattatattattcaatatatgatgatacaataatattactctattaaaatgatatttataatacaatataataataataatgtcaattttaaaacatttttattattgacattttaaaagcttttctactatgggaatcagattcactggttgttttaataaattctttcttttattacatgtattaacactctgagcaaatgtttttagtccaacattgaccagtcatcgaaacaaatataattcagataackgtgctacatttacatatttttaattatttatttctgctttgagtaactatctatgactttggagcatatagacatttgccatagaacagacagaatttcacgctgtatgtacaggccaaacttgtttatgccttaaatgtcttacaatatttcaataatgtcagttttttagcaaaagtgctttcatgt

SEQ ID NO: 623068 - DNA, 647 bp, Homo sapiens
ctttcccctgccactctgccttccaccaccacgtcagtcctcgagttgagttctttctggaaggctgtagaaaactggtttccaactttccaatcctagattttctttctttcttatgcctacacacaagcacttttccctaatgtaaaattctcygaggggtcaagagatccggcagctcatcaaaacaatccattttgaaagaaaattttggatgaatataaacattaagaggttggggaattttgtctgtttttgttcactgctgaatccctagtgtccaggacagtgcgagacacagtaacccagagtgggcacctaatgaatgtatattgaatcaacactcttccagattgcagattcttgcaaaattttcatgatctcctgctcaaatatcttcctaaaaacacagcatgacttcaagagccctcaactgtactaaagtagttacatacatatagcataaatcagactatgcaggccttggtcctcaggaggacctgtcaacagacagaaagacatccatctgatcctgtgcccagccagaaaatgccacctgcgacaggtacttcctgactgtccagacacctccccatactctctcagttacagataaactcccttaaggattgtgagcagctgtggac

SEQ ID NO: 623069 - DNA, 647 bp, Homo sapiens
ctttcccctgccactctgccttccaccaccacgtcagtcctcgagttgagttctttctggaaggctgtagaaaactggtttccaactttccaatcctagattttctttctttcttatgcctacacacaagcacttttccctaatgtaaaattctctgaggggtcaagagatccggcagctcatcaaaacaatccattttgaaagaaaattttggatgaatataaacattaagaggttggggaattttgtctgtttttgttcactgctgaatccctagtgtccaggacagtgcgagacacastaacccagagtgggcacctaatgaatgtatattgaatcaacactcttccagattgcagattcttgcaaaattttcatgatctcctgctcaaatatcttcctaaaaacacagcatgacttcaagagccctcaactgtactaaagtagttacatacatatagcataaatcagactatgcaggccttggtcctcaggaggacctgtcaacagacagaaagacatccatctgatcctgtgcccagccagaaaatgccacctgcgacaggtacttcctgactgtccagacacctccccatactctctcagttacagataaactcccttaaggattgtgagcagctgtggac

SEQ ID NO: 623070 - DNA, 643 bp, Homo sapiens
acaactgtctgttatgttgcacgaagaaagatggatggactaaggctaatgggttccaaaacttgacaagaacgtttggttttggcagagattcctcagcagaaaaatggagtgcttggatggggctctgggttaaaacaattttaaggtctctggaggcactcaagtacctaaagtacttgtattacattattgtagagggggtctacttgtagttctctattgcaaagaatatcaacaastggaaaaccttggtgttcaattaaatgcccagtgattctcaaatgaagtctgtggagactttcttctggagtaggccaggcttcactcccttgccccagaacagaggggatcccaccgaaaaatacagggcacattaaaggaatattgcagggaggaaatcacgttgttgtcatcaggggaaagcaactgcactaaatctccttcctccagccttcattcctcaaactgcctcacaggcacttgtagaaatatttctaggacatcaattaacttagttttgggaaaatcttgcagttgtaggcctgatctgagcatctgattccattttatcaagaggcttacagctgtccttctcaaggtacctctaattaaagatgagccaagggggcagactagattg

SEQ ID NO: 623071 - DNA, 605 bp, Homo sapiens
tccttccccaaatagaaatttttaaaagaaagatatcactgttttacaatgtgtaatttatacctttttattttttctcccattaaaatatgactaggatttatttactttgaattgttatagatattggaagtaatttagacaaaactgtcaattcttatagaacagtattttgaaaaaactatttttaagctactttttatatttgacttcgtgactgggcaatgaagacaagcagccagatttccaggcacaccacccctatttcattcaaaacaagtctgcttttaactgctgtatttattagcatcctatgtagatttctttggaagaaaaataatcattcagcaacgaaaataaagtttgaaaacacctgctttatgatatctcataaggtcttctaaattttrcgtggctatttctaggtaagaaattctccaataaatgtctattctgtacaattctaattgccaagaagatgtttcttagagcaaaatgatgtgtactttcttattaccatttaatttactatagcagatcgtttttgactacatgcaaagcattgctctaggagcaaatgaaaataagaaaatgtatgtaagact

SEQ ID NO: 623072 - DNA, 571 bp, Homo sapiens
cttacagttcaaaataaaattattttctgggcttggtktaatttgagatggagcaggctgctgtggattactccaaccatttatgatctgatataaacccttggttctaaatagcagctgactccctgagggccaaataagcaaagaaaatagagcataggtctacttcaatcccaattctaatttctgctctctgtggagctgtttccaatgcagtgaacacactcagtagctagagtatttttcagcttctccggttttcttatgaatatattataaagggaacactttcttttaaaagttcctgagttactttcattaccttttttctagttttcaaaagtactgtactttaaaaaagcaatgcagcacattgaattttgtttagaaaaaatgtctcctaaaatgttttgaacaataagaatattaaaaaattgccttttatacttaattataatttatctgaaataaaaagtggacatttaaagcccctatgcagaataatatcacatctggaattccatgttagtggtagtgcaataatactttaggcagtgtttgtttgtttaat

SEQ ID NO: 623073 - DNA, 573 bp, Homo sapiens
catttttgagtgactaccgtatctaggtactttatttttttttcaaatatttacagttctgcatgttagacatcattatccttatttcacagatgaggaaactggaggctcaggtcgattttatatcttgcccagagacwcccagctctgtctgagttcaaaactcctattctttccagcgaggccaggtatacagaggcgcagaccatttggtaatggtccccagatttggctgcctatcagaatcacctggagagctcttaaaagacacaactcttaagacctgtcttccagaaattcagatttattaattctatgtattgaaaacacttttcttatgattctatcatggccagattcacttacagattggaaagcagacagaatttaaagtcaaaagacatgagttggggccaggcacggtgtctcatgcctgtaatctgggcattttggtaggctgaggagggcggatcactcgaggtccggagtttgagacctgcctggccaacacggcgaaaccctgtctgtactaaaaatacaaaaattagccaggcgtgatggcaggtgctcgta

SEQ ID NO: 623074 - DNA, 429 bp, Homo sapiens
gtttgctgagttcagtcttgttttcctttctggtctaacaggacaacactgagtttaatgcctcagagttgctgtgttctccctctcccagtgcccagagaggctccctgcaccacacagctgttgctgcggcgaaggtggggtggcgtcagtgattcaggactgtgttttctgtctcttcagtgcatctttcagcgataaggagttaaaaccaggtactgtgagtgctcaactaatttttggttctcataaaggtgtttttttctgtgtagatagttgttaacttggtgttcttttgggacagtaggcaccatcagtggagctttctattctgccatcttgcttcacctccctcttgcatcatgtatttatatgyaaaacctaagagtatacaacttcctaaagaaaccataggagagaatttttgag

SEQ ID NO: 623075 - DNA, 588 bp, Homo sapiens
ccacagatattagagtaggcagatagccagtcgtgagcargagaagagagcccctttggggaggaaagcctagaaaatctcacaccccagagatcacccaaaacatgcatgctagttataagcacagcggaagggaaatacctatgcaggaaggaatgcccattaagatgcccagtaatcattcagtcttcagttaacctgtcagaatgtagctagatgcatgatgataaaagaaagagggcaaaggaggaaatttctaagaaatacataggtgcaattcatagccaacaccaggcccacgcatgtgcaacaactaatagtaaaagagggtcccacaaccctggggtgggaactaggccaggaaaaggcagagacttaaggcaggagatggaaaactagacaaagaaaaaaggcagagacttaagacagaggcgggaactccaagacaaacccaacatcttaaaaactcaaggcagaactctcagggtgctgctggctcactccctttcaggggtccactctgctttatcttttgagagtgtactgtctctctaaataagctctctgctctctgttttccttcaataa

SEQ ID NO: 623076 - DNA, 588 bp, Homo sapiens
ccacagatattagagtaggcagatagccagtcgtgagcaagagaagagagcccctttggggaggaaagcctagaaaatctcayaccccagagatcacccaaaacatgcatgctagttataagcacagcggaagggaaatacctatgcaggaaggaatgcccattaagatgcccagtaatcattcagtcttcagttaacctgtcagaatgtagctagatgcatgatgataaaagaaagagggcaaaggaggaaatttctaagaaatacataggtgcaattcatagccaacaccaggcccacgcatgtgcaacaactaatagtaaaagagggtcccacaaccctggggtgggaactaggccaggaaaaggcagagacttaaggcaggagatggaaaactagacaaagaaaaaaggcagagacttaagacagaggcgggaactccaagacaaacccaacatcttaaaaactcaaggcagaactctcagggtgctgctggctcactccctttcaggggtccactctgctttatcttttgagagtgtactgtctctctaaataagctctctgctctctgttttccttcaataa

SEQ ID NO: 623077 - DNA, 552 bp, Homo sapiens
gacagctctaaacttacataagttgctccagacagagagagagagagagacaaagagagagagagagagaaagagagagaggattccacattccctgtacccaaaagatttggggatcccagtggttatgccttaaatayttctggccccaaaaagtcttgcctttctcaatgctacacactactcagcttaccaggtttacccagcttgccctcaccacagtaaccacatataccttttaatccacaatgatacactacctcacataagtgcaaaggtttatgctttttataaaccttttctatattttatcttgtgggggttatcccgtataaactgagcttatcagatgagcaagacaggtcactgacatgagatatattacataaaatcaaagaatagttaccactatccccaaaagagtctacattatcctgatttaaagtagtccttcgaaaatgtcccagtttactctcagagactcaaaagagaaataaacttttattgtttttgtttgtttaaagtacatttttaaaaacacagctccaagtc

SEQ ID NO: 623078 - DNA, 516 bp, Homo sapiens
ccagcagccacttggcaacatttcaaggctgggtccagaagagctggaagcaattcaattccttgattttagaatcaaggaatcccaacagtttgaacaaaattgggaatggtttttccagatccctcagggagaagacagcgtccctgtttgttaacatcaggatttatgttgctcaaagccaacacaacttraggatatacaaaaatgcacctagatatgtaagcccagtaaacaccctcagttctgtactgcaaagtggatattggcaaagaaaatctttaaattaccctcacagcatgtgtctcctcagcaaagcaccaaatgtgcctttcttcagtagccaaactaatgaggaaaagatacatccacagatggcaacaagacctgtattgagctaatcattataatcctttctcccaccaatgcttttaccatacatcaagcagctatcaacatgccagaaaaatacccagaaggtgagtagcagaaggaaatgtggtctgactggtcaaa

SEQ ID NO: 623079 - DNA, 516 bp, Homo sapiens
ccagcagccacttggcaacatttcaaggctgggtccagaagagctggaagcaattcaattccttgattttagaatcaaggaatcccaacagtttgaacaaaattgggaatggtttttccagatccctcagggagaagacagcgtccctgtttgttaacatcaggatttatgttgctcaaagccaacacaacttgaggatatacaaaaatgcacctagatatgtaagcccagtaaacaccctcagttctgtactgcraagtggatattggcaaagaaaatctttaaattaccctcacagcatgtgtctcctcagcaaagcaccaaatgtgcctttcttcagtagccaaactaatgaggaaaagatacatccacagatggcaacaagacctgtattgagctaatcattataatcctttctcccaccaatgcttttaccatacatcaagcagctatcaacatgccagaaaaatacccagaaggtgagtagcagaaggaaatgtggtctgactggtcaaa

SEQ ID NO: 623080 - DNA, 516 bp, Homo sapiens
ccagcagccacttggcaacatttcaaggctgggtccagaagagctggaagcaattcaattccttgattttagaatcaaggaatcccaacagtttgaacaaaattgggaatggtttttccagatccctcagggagaagacagcgtccctgtttgttaacatcaggatttatgttgctcaaagccaacacaacttgaggatatacaaaaatgcacctagatatgtaagcccagtaaacaccctcagttctgtactgcaaagtggatattggcaaagaaaatctttaaattaccctcacagcatgtgtctcctcrgcaaagcaccaaatgtgcctttcttcagtagccaaactaatgaggaaaagatacatccacagatggcaacaagacctgtattgagctaatcattataatcctttctcccaccaatgcttttaccatacatcaagcagctatcaacatgccagaaaaatacccagaaggtgagtagcagaaggaaatgtggtctgactggtcaaa

SEQ ID NO: 623081 - DNA, 521 bp, Homo sapiens
ctctggctgcccttaacatttttctttcattttgaccttggagaatctgatggctatgccttttgggaataatattcttatggggtatcttactggggttctcttcattttctgagttttgacgttggcctgtctaggttggggaagttctcctggatgayattttaaaatgtgttttccaatggttcgactctccttgtttttttcaggtgccccagtgagtcacagatttggtctctttacataattccatatttcttggattttttttcattccttttattctttttttctctattcttgtctgtcttattttagaaagacagctttcaagctcttgagattctttcctccgcttggtctattctgttattaatacttgtgattgcattgtgaagttcttgtaatgtgcttttcagctctatcaggccagttacattcctctctatactggcaatttgggctgtcagctcctgcattgttttatcatgattcttaggttctttgcattgggttaaaac

SEQ ID NO: 623082 - DNA, 562 bp, Homo sapiens
agtgtttgttaaatcttccagcgtgggcaggcttttgttttttttcttttctttttctttttttttgttgcctgagaagcaaaggataaagatggatcatctggttcagtaacayagtcttaaagtgaaaaatctgggggtttctgtatgggaaaagagagagagaggattcaaaggaaaaagacaatagaggatttaatccaaaacatctaaaagcaaatattgttttcggggattttcagagattctctacaaaaggagaaagagactgactactaaggaggagagagatacaaccgtggagaggttttatatgtggggactgcatgtccatcttaaaagatggctacaggacttcctcattgacacagataaacacactacattttcagaaggtcctgcccttccccaagcctccgtttattcccaggcttctgccaacatgtggcagaatattgactacaagaatacaagccaggcatgatggttcaagcctgtaatcccagcactttgggaagccaagctgggaggattgcttgaacccaggactttaaggctagcc

SEQ ID NO: 623083 - DNA, 562 bp, Homo sapiens
agtgtttgttaaatcttccagcgtgggcaggcttttgttttttttcttttctttttctttttttttgttgcctgagaagcaaaggataaagatggatcatctggttcagtaacacagtcttaaagtgaaaaatctgggggtttctgtatgggaaaagagagagagaggattcaaaggaaaaagacaatagaggatttaatccaaaacatctaaaagcaaatattgttttcggggattttcagagattctctacaaaaggagaaagagactgactactaaggaggagagagatacaaccgtggagaggttttatatgtggggactgcatgtccatcttaaaagatggctacaggacttcctcattgacacagataaacacactacattttcagaaggtcctgcccttccccaagcctccgtttattcccaggcttctgccaacatgtggcagaatattgactacaagaatrcaagccaggcatgatggttcaagcctgtaatcccagcactttgggaagccaagctgggaggattgcttgaacccaggactttaaggctagcc

SEQ ID NO: 623084 - DNA, 439 bp, Homo sapiens
atttagtctttttgtttccctaagttcctctggactgtgacagtttttcaaacttcacttctttttgatgaccttagtacttttgaaaaatactggtcagatattttgcagtgtctctcaattcatgtttgtctgatgtttttctcttgaytggattggctggtagatttgggggaggaacgctgcagaggtcaagagccattctcatcacatcatatctaagggtacattatcaacatgacttctcgcaggtgatgttaatattcatcacatgtagcccctctccatgacaccctctttggaagacagtccctactacgtatagcccacatttaagcagtggggagttaatgttccatctccttgagggggaagtacctgtacaaatttcctcaaattcttctgtgtggaaatttgtctcttctccccccatttattt

SEQ ID NO: 623085 - DNA, 439 bp, Homo sapiens
atttagtctttttgtttccctaagttcctctggactgtgacagtttttcaaacttcacttctttttgatgaccttagtacttttgaaaaatactggtcagatattttgcagtgtctctcaattcatgtttgtctgatgtttttctcttgattggattggctggtagatttgggggaggaacgctgcagaggtcaagagccattctcatcacatcatatctaagggtacattatcaacatgacttctcgcaggtgatgttaatattcatcacatgtagcccctctccatgrcaccctctttggaagacagtccctactacgtatagcccacatttaagcagtggggagttaatgttccatctccttgagggggaagtacctgtacaaatttcctcaaattcttctgtgtggaaatttgtctcttctccccccatttattt

SEQ ID NO: 623086 - DNA, 640 bp, Homo sapiens
actctgaaaatgttcgtgaaataaaaaacaatgtttagaattttggcagaaaattggaaactgtaaaaataaaacagcctgtggaaattctatttaggatatgcaaactaaaatttagaacttgatggactgattgagcagcacattagtcagaattataaagataaatcagaagaaaatattgagataaaacacataaatgaaaaatataaaagtcaaaatatgagctatactatgaggttgtctactatctcagttggattctcaaaagatcagagwtataatgagacagaaacaatatttgaagaaataatagttgagaattttttaaaaactatgaaagatagtattatcccacagatacaagaagttctatacctcaagaagaataaataagaaaatcacaactaagcacattgtattaaaatcatgaaaagtcaagggcaaagggaaatattaaaagcaggcagtttttaaagaattaccttcaaggtcaccgttagactgacagttgacatcttaacaacaacaacaacaacaacaaaatagaaaccagaaggcaataaaatgataacttcaaagtaaaatcaatcaataaaaattgtcaatcccaaattttatacacagcaaaactgttctc

SEQ ID NO: 623087 - DNA, 533 bp, Homo sapiens
gaattcacttccaactttcaagttgttcgaagacttctagctctaaaaacaggctaaggcattcttacacggagataattaaaatggtcaaggccatcrtcttggataacttaggaagatgccatcatggagactgttacatgataagtaagaggcctttttactaagttacatagagaacaaaatgcagatgccatggatggcatgtggcattttatgggggcagtaaatgtcttaacttgtgtattagtctcttttcatgctgctgatgaagacatacctgagactcggtaatttataaacaaaaagaggtttaatggactcacagtgccacgtggctagggagcctcacaatcatggcagaaggtgaaaggcacttcttacatggcggcaggaaagagagaatgaggacaaagtgaatggggaaaccccttataaaaccatcagatctcatgagacttattcactaccatgagaacagtatgagggaaactgcccccatgattcaattatctcccactgggtccctccca

SEQ ID NO: 623088 - DNA, 604 bp, Homo sapiens
gaattcacttccaactttcaagttgttcgaagacttctagctctaaaaacaggctaaggcattcttacacggagataattaaaatggtcaaggccatcgtcttggataacttaggaagatgccatcatkgagactgttacatgataagtaagaggcctttttactaagttacatagagaacaaaatgcagatgccatggatggcatgtggcattttatgggggcagtaaatgtcttaacttgtgtattagtctcttttcatgctgctgatgaagacatacctgagactcggtaatttataaacaaaaagaggtttaatggactcacagtgccacgtggctagggagcctcacaatcatggcagaaggtgaaaggcacttcttacatggcggcaggaaagagagaatgaggacaaagtgaatggggaaaccccttataaaaccatcagatctcatgagacttattcactaccatgagaacagtatgagggaaactgcccccatgattcaattatctcccactgggtccctcccacaacatatgggaattatgggagctacaattcaagatgagatttgggtggggacacagtgaaaccatatcaa

SEQ ID NO: 623089 - DNA, 604 bp, Homo sapiens
gaattcacttccaactttcaagttgttcgaagacttctagctctaaaaacaggctaaggcattcttacacggagataattaaaatggtcaaggccatcgtcttggataacttaggaagatgccatcatggagactgttacatgataagtaagaggcctttttactaagttacatagagaacaaaatgcagatgccatggatggcatgtggcattttatgggggcagtaaatgtcttaacttgtgtattagtctcttttcatgctgctgatgaagacatacctgagactcggtaatttataaasaaaaagaggtttaatggactcacagtgccacgtggctagggagcctcacaatcatggcagaaggtgaaaggcacttcttacatggcggcaggaaagagagaatgaggacaaagtgaatggggaaaccccttataaaaccatcagatctcatgagacttattcactaccatgagaacagtatgagggaaactgcccccatgattcaattatctcccactgggtccctcccacaacatatgggaattatgggagctacaattcaagatgagatttgggtggggacacagtgaaaccatatcaa

SEQ ID NO: 623090 - DNA, 457 bp, Homo sapiens
gtcagcttgaacaatggtccttgataaataatcgtttaaaataccttgtgtaccacacaactattttatgacatacttgatttctttgatttttaattgtttgattagtgcgtatatggaatttatgcggaatattttcacagaatttcgatgaaattggctggatgatgtttacttgttactataatttgtatcttttatgttaaaggagaaaacaatttcagtttcataaatatgaaaatatttcaaagcaaaacagactatacaagcattaccttgaattatkaccaaattaggaaagtattttataaaagcattggaaaattatatttttatcatgcctgtctatatatggtcacaatagcttatcattttattaaatattctgttattttataccagtttttataagcttttacttttaaatttgagtattagcaaccaggaagattaaacc

SEQ ID NO: 623091 - DNA, 634 bp, Homo sapiens
tttacagatcgctactatgtaccagacayggtacacacattgtttctactacataaaacaaatcaaaacaactatgtaaaactcattctgtaaataaggaaactgacatcaaaggtatacccaagaccgtacagtggtaggtggtagaggcaggactggaatagaggtctgcccagttcgcagcctgcttgttcccctcaccttccttccagaaatggggagaggattgaccctgatagactgcaagttcaggattatgactaagcccccaaggagctttggaaggctatatttgccttccctccctctcctccattcccctactccagcagtggctttacaattccattttaaattattctccagagaggggttggaaaggataaacagttttggtggaagcattgtagaagcagggtttgtcttggtgggaatgatgggtcgcatatgcccctggtttgctcagactcccacagaatgccccttcatggtctctgataagctgcctcctgagttactctctgctcagtgccagtaacgtactgttctcccccgaaaaaaaggaagaaaagttctctgcttaactaagtagtggccccaaattgacatccgcataatggagtgtgatgtgtca

SEQ ID NO: 623092 - DNA, 580 bp, Homo sapiens
agcaagcaagcaaggagactaggtagaagaccgttccctttccggtgaaagggaagtatggctgggattgagtggtagcagttagagctgagaaatgggtggtttggggctttatttggaaatgcaattagtaggttatcattatggatcagatgaagagtgcaaaaaaagaggaaattttggcctaaggaactgaaggaataagacttagagaacagtgggtaaggagcatgtcttaratgaaatacccagggttgagtccagatatgtgaaatttaagatgcttattagacctcccaacagatgtcgaatgggcacttggataaataaactgagagctcaggcaagatgtctgaatacaaagataatatttaaggccatgacttagggagtgagtgtggatgaagagaagaggagagaggcaaagtgaggccaagacacaagagcagaaaagaggtgagaatgagtttgagattgactcctggggcaccatgacatttacagaaataccggggatttgaggaggatgtgtacaaaacacaaggaaggagccaccagttaggtaaaagaaagccatgaa

SEQ ID NO: 623093 - DNA, 585 bp, Homo sapiens
gaaactttgtaccttttgacaagcatctctccaatcccttctgccctccccagcctctggtaactaccattctactgtttgcttctatgagcctgacttttttagattccacatatragggagatcatgcaatatcggtggttttgtgtctggcttgtttcaggcacaaaattatttgtgccttagcatgatatcctcaggttcatccatgttgtagcaaatgagaggatttcctcttttaaggcaaaattgtgttccatcatatacacaccacattttctttattcatccgttgaaggacacctaagatgatcccatatcttggctcttatgaacagtgctgccatgaacatgggggtgcagatatattttcaatatgctgatttcctttcctttggatatatgcccagtagtgggattgctggatcatatggtagctctatgtttaattttttgaggaacttcctttaatgtttttcataacatctgtactaatttatattcccaccaggagtatgctaggggtccctttcttcatatcctccacaacacttgttatcttttgtctttttgataatagccctg

SEQ ID NO: 623094 - DNA, 577 bp, Homo sapiens
cctcttgggtttaaaccctgacctcacttcttactatctctgtgaccttggacaagttaccaagcatcttagtgcctccaaattttttcattcctaaaataaggatgatgagctaatagtattgtctacctcctaagattcttctgagaattcagtgagttaactctgtgtatccataaaacagtgcaaggcctgatatctaaaaagtgctgttggctgttacaagaaccactgaattaggaaccaaagatagtattgagtaactagcrccttgaaaaaaggtcaaatctaaaaatcactaaaaattttacaaaggaaactgtaaaacatgccaaattattattttttttaatgtggcattaggagtattgttggactgggtgtggtgactcacacacctgtaattccagcactttggaaggccaaggtgggagaattgcttgagctcaggagttctataccagcctgggcaacacagtgagacctcctctcaaaaatacaaaaattagctgggcatggtggcatgcacctgtagtcccagcttaagaggctgggaggctgaggcaggaggatcact

SEQ ID NO: 623095 - DNA, 561 bp, Homo sapiens
gagctaaaacccaagaaagtaatctgttcctaaccaattccaggaatgtaatttgatgtgttggaaagaatgttgactttgctgtcaatttttgacttgtactactcaccaactatgagttcaatggtgatagaacctttytaagctgcaaatgaaggaaatatttttgcttctcactagtcaggatgctactcaagtcatgtgttcctaggtcaaggatctaaatttttcctgattatattgattattaaaaaccttctggccatgtacagtggctcaggcctgtaatcccagcactctaggaggccgaagcaggtggatggcttgaacccaggagtttgagaccagcctgggcaacatagtgagaccctgtctctacaaaatatacaaaaactagccaggcacagtggcatgtacctgtggtcccagctgttcaggaagctgaggtagaaggatggcttgagcccaggaggttgaggctgcagtgagccatgatgatcatgccactacactccaggctgggcaacagaataagaccctgtttaaaaaaaaaaaaaaaaa

SEQ ID NO: 623096 - DNA, 561 bp, Homo sapiens
gagctaaaacccaagaaagtaatctgttcctaaccaattccaggaatgtaatttgatgtgttggaaagaatgttgactttgctgtcaatttttgacttgtactactcaccaactatgagttcaatggtgatagaacctttctaagctgcaaatgaaggaaatatttttgcttctcactagtcaggatgctactcaagtcatgtgttcctaggtcaaggatctaaatttttcctgattatattgattattaaaaaccttctggccatgtacagtggctcaggcctgtaatcccagcactctaggaggcygaagcaggtggatggcttgaacccaggagtttgagaccagcctgggcaacatagtgagaccctgtctctacaaaatatacaaaaactagccaggcacagtggcatgtacctgtggtcccagctgttcaggaagctgaggtagaaggatggcttgagcccaggaggttgaggctgcagtgagccatgatgatcatgccactacactccaggctgggcaacagaataagaccctgtttaaaaaaaaaaaaaaaaa

SEQ ID NO: 623097 - DNA, 591 bp, Homo sapiens
ttctccacattcatgccaacacattattttctgtcattttaatttaaacatatttccaagaaaaattgttacaatgattaaaacaaagcatctcaattgcataaattttgaaagtaggtagaaatagataaaaagcaaagttattaacaacttcaccaaaagtacaccagctgttaatattttagggcatactttggtaattttttcctaaatagcatgtttttaatctagtgttggtaatactggatagctaacttttattaaatataaatttagcaaggggattgagataatcaaggaaaaaatatacaatggcaaattttacttaccattttatgccaggaattggtatagttacattattttgtttaaccctcaaagcagtgctatgaaaaaggtaatattattattctagtcatcttgtagcatggagaactgaggttttgataagttaagtaattctttcaggttaatatagaagcatataatggggtcagatctaaaactcaagtctggtgaactctagggtctctgctatgagccactaaactcttgttsttttttggatataactggcctaaaggttaggtg

SEQ ID NO: 623098 - DNA, 467 bp, Homo sapiens
acctgaaattataaaacaactagaaccaaacataagagaaagcctccatgatattggtctgggtaatgatttttttgatatgaccccaaaagcactggcgacaaaagtaaaaatagacaaatggggttgcatcaaatgaaaaagcttctgcacaccaatgaaaacaattgacagtgaagagacaayctatggaatggaagaaaatatttggaaatcatatatccagtaaggggttaatatctaaaatatataaggaactcagcttaataacaaaagaacccactaataaccagatttaaaaatgtgcaaaggacctaaattgacacttcttaaaaaaaagacatacaaatgaccaaatgtgtgtatgaaaaaactgttcaatattgctaaccatcagggaaatgcaaactaaagtcaaaatgagatatcacctcacacctgttagaatggctattataaaaaagaca

SEQ ID NO: 623099 - DNA, 553 bp, Homo sapiens
tgacaaagggctaatatccagaatctacaatgaactcaaacaaatttacaagaaaaaaacaaaccaccccatcaaaaagtgggcgaaggaaatatcatatttttatggctaagtgccaatataggactctacttattttacctgtttttatactaacatgggttacatgggggaaatgttgatcaaaggttacaaagttttaattagacaggagttctcggaatgtattgtatagcatggtgactatgagttggtcatttcacaatgtatacatacatcaaatcatcacactgtacactgtaaataagtacaacttttgacaattacaccttaataaaacagagaggaaatgaaatatcttctaaaattcagatctgccattcagtagaaatacaggcaacctcttcttgggggacactaatagacaccccccttatttatggtgtactgggggtattcttgtttcaccattttatacccctattatgaaagctacactttmataactatgtatattcttcattttggcttatattatatcacataatattat

SEQ ID NO: 623100 - DNA, 553 bp, Homo sapiens
tgacaaagggctaatatccagaatctacaatgaactcaaacaaatttacaagaaaaaaacaaaccaccccatcaaaaagtgggcgaaggaaatatcatatttttatggctaagtgccaatataggactctacttattttacctgtttttatactaacatgggttacatgggggaaatgttgatcaaaggttacaaagttttaattagacaggagttctcggaatgtattgtatagcatggtgactatgagttggtcatttcacaatgtatacatacatcaaatcatcacactgtacactgtaaataagtacaacttttgacaattacaccttaataaaacagagaggaaatgaaatatcttctaaaattcagatctgccattcagtagaaatacaggcaacctcttcttgggggacactaatagacaccccccttatttatggtgtactgggggtattcttgtttcaccattttatacccctattatgaaagctacactttcataaytatgtatattcttcattttggcttatattatatcacataatattat

SEQ ID NO: 623101 - DNA, 454 bp, Homo sapiens
gcaacctcttcttgggggacactaatagacaccccccttatttatggtgtactgggggtattcttgtttcaccattttatacccctattatgaaagctacactttcataactatgtatattcttcattttggcttatattatatcacakaatattatatatgtagtccagtcttatctccaactggactctggacactttaagaacatgaaactatcttattacattttcattttttggtctctccaaattagcccaatgcttagttcatagcatgtgctcaataaaccacacacagaagtgattacattgctctaagcctggcactatatttctgtactgtactttctggtttaaatgaagcttgaagggaggacataacctagaagcttattgacccagtagagctatgtaactacgcaactatggtaaagtgttttataaattttcaaaaa

SEQ ID NO: 623102 - DNA, 607 bp, Homo sapiens
ctggttgtttgcaccttttggctattattaataatgctgttatgaacattgtgtacaaggttttttttgtggacacatatttttacttctgggtggatacctaggaatgaaattgcttggtcatatgataacactaggtttaacattttaagaaatgccaaatgttttcaaagtggctatactattttatattcacatcagtaaagtatgagtgtctctttttttacatccttatcaacatttactattgtctttcttttttattatagcctttctaatgcatgtaagatgatatatcattgtggttatggtttgcatttccctaatgatgttgagcatccttttttttttttttttttggcagagtctcgctctgktgccaggctggagtgcagtgacacgatcttggctcattgcatcctccgcctcctgggttccagcaattcttctgcctcagcctcccaggtagctgagactataggcacgtgccaccatgcccagctaatttttgtatttttagtagagatggggtttcaccatgttggccaggatggtctcaacctcttgaccttgttatctgcctgccttggcctcctaaagtgctggg

SEQ ID NO: 623103 - DNA, 675 bp, Homo sapiens
catgagaaaatctgatttttgacaaagttgacaaaaacaagcaatagggaaaaaattccctgttcaataaatggttagccatatgcagaagatccaaactggacccccttccttacacatacacaaaaaatcaactcaagatagatcaaagacttaactataagaacmtaaaactataaaaccctggaaagtaacacaggaaatgccattatggacatagtctctgtcaaagatttcatgatgaatacgtcaaaagcaatcgcaacaaaaacaaaaattaacaaatgggatctaactaaactaaagagcttctgcacagcaaaagaaactatcaacagtgtaaacaacctaaagaatgagagaaaatttgtgcaaaccatgcatctgacaaaagtctaatatccagaatctataagaaacttaaattaacaagcaaaaaacacaaaccccagaaaaaaagtcagcaaagagacataaacagacgaagacatacaccagaccaacaagcatatgaaaaaatgcaatatcactaatcattagagaaatgcaaatcaaaaccacaatgagataccatctcacaacagtccattttgtcttattaaaaagacaaaaaataacagatgctggtgaggttgcagagaaaagagaatgcttatatactgctgatgggaatgt

SEQ ID NO: 623104 - DNA, 535 bp, Homo sapiens
tctgagtgagcttacttaaccctaaaagaatcaagaataaaactagaagtggctagagttgttctgattttgttttctgaaaagcatgattatatatcttatctgttttcagtaaagaatagtcaggggatatgcaacagtagatgttaataagcaggctcagactcagtaaccctgcaacagaagctctagtgaaaaggcagagatggccagggtagrgagggaaggacatgtaagttgtaaaagtactttaaaaataatctgcatccgggcacagtggctcatgcctgtaataccagcactttgggaggccaaggtgggtggatcacgaggccaggagattgagaccgtcctggctaacacggtgaaaccctgtctctactaaaaatacaaaaaattagctgggcgtggtggtgggcacttgtagtcccagctactcgggaggctgaggcaggagaatggcatgaacccgggaggcagagcttgcggtgagccaagatcatgccactgcactccagcctgggcgacagagcga

SEQ ID NO: 623105 - DNA, 568 bp, Homo sapiens
tccttctcattcccaagcccaaacttggaggggatgctgaggatgctgaccgagcgcaaatgtggctgaattaaggcagtttgtgggacaacagaagtttgtagtttatgataattaaacagtgttctctcttcacatcataagactctatctttggcgatagaattgattgactttcaaatttggttgtttttctcctctctgccttaataagatgttctaaaggaaaaatggctgtttgttttgtggtaggatccttaagagaaggattcgaggccctgcaatcccaaaagatgctgtttcaagaaaggagtaarcggtcctttcacaggtctcctgggtctccgtgaaggattacaaagagttatagatctgggttttgctatgatattttactagttttggtcaactggccatcttttggcaacacgggaattgacaggagagttgcttcaacttcttaaaaggcttggactgatgggtgttgtccatttctcaggtctggtaacgtgtcaaacttgagaccttaggtgtccagaaaaaatatggccatagaggtgttcagtca

SEQ ID NO: 623106 - DNA, 502 bp, Homo sapiens
cagtgtgattaatatgtttggggatagccttaactattcatggcaggccaggagtggtggctcacgcctgtaatcccagcacttttggaggccgaggcaggggtttgagactagcctgggcaacatggtgaaaccccatccctactaaaaatacagaaattarccgggcgaggtgacacacacctgtaatctcagctactcaagaggctgaggcaggagaaccacttgaaccctgggggcagaggttgcagtgagccgagatcgcaccaccccactccagcctgggggtgatagagtgagacaatctcaaaaaaataaaagtaaaaaagagttcatggccagtgaaaacagagtcatcttttaataaggcattaataacttcacacctttagcattaagttaatgatttataagttatcaggccatggcattcaggctgatgtctttctgtaaagggctcctcctggatttccatgtttaactctttgctgatagtttaaaa

SEQ ID NO: 623107 - DNA, 577 bp, Homo sapiens
ggccactttctagataagaatggcaactttaagaaaagtgactacttcatgcctttctcagcaggtaatagaaactcgtttccatttgtatttaaaggaaagagagaactttttggaattagttggaatttacatggcacctcctctggggctggtagaattgctatttrtccatgatcaagagcaccactcttaacacccatgtgctccaccctcacaatacaccatcattattgggccagatagcggggcttgcaggagttaactctgttgttcccaattgagaaaatgaacatcttggtttgactgaactctgccactagatacatcactaaggcacccaagagctcctcctagaaggtaaaattcatctgatctttccttacctgccttgacaaatgtatctaagtccacaactgcattgagtgtcttctacatggtgtctgtcacctcccaggctgagctccaagggcacaactttcaatgagaacagaggctcactcttgagttagggaagaagagtaaacaggtcattgtaatttagtcagaccaggactgtgagagaggaaagcacagg

SEQ ID NO: 623108 - DNA, 559 bp, Homo sapiens
cttgcttttcacacctgtgttttgtgtgctaagtctctggccatggaatctccttcctttattctttgatcttttatgtctgctttatatttggcactgtagataccaacatgacaaggacagagaccttccttcaagaattcacattttaccacaatagataaataaatacagaattacgattcctggtaatctgtgctttaatgaaagcatgagtatgctgttgaggaaaaccagagagcataggatttgattacttgaggggattgtaaagagtgtgaagatgaaatgaaattgaacctatgtcctgaatgtagcctaataaagatgtatcttagccaaaatgaacaacaggatatgaaacttgaaacttcatggtgtgttcaagattgatgaagagagtgtatgaccagagctgaraacagattatgtgaaaagtggaaggaaaagtcatggaatatcaggcttggaacaggaaacaagaatgtgcatgtatttccataatgacagatggaaactcaaaatggcaaaagagctgttttaatgtgggaataaataa

SEQ ID NO: 623109 - DNA, 559 bp, Homo sapiens
cttgcttttcacacctgtgttttgtgtgctaagtctctggccatggaatctccttcctttattctttgatcttttatgtctgctttatatttggcactgtagataccaacatgacaaggacagagaccttccttcaagaattcacattttaccacaatagataaataaatacagaattacgattcctggtaatctgtgctttaatgaaagcatgagtatgctgttgaggaaaaccagagagcataggatttgattacttgaggggattgtaaagagtgtgaagatgaaatgaaattgaacctatgtcctgaatgtagcctaataaagatgtatcttagccaaaatgaacaacaggatatgaaacttgaaacttcatggtgtgttcaagattgatgaagagagtgtatgaccagagctgagaacagattatgtgaaaagtggaaggaaaartcatggaatatcaggcttggaacaggaaacaagaatgtgcatgtatttccataatgacagatggaaactcaaaatggcaaaagagctgttttaatgtgggaataaataa

SEQ ID NO: 623110 - DNA, 570 bp, Homo sapiens
aaagctgatacttgttcctgacactaggagacctgtaggcaggcctgtctcatctagctccacctgtcttggtcctccatttgagggctaagctgggagctcacacaagtgtgcttgccagtgatcagcccattgcttgaggtaacagagagcttctacaagtaaacaaggatcaagtatatacacatatgcattaaccttagccagctcttacctataagtaccaccagctgttccagagttagaaatgcataacacaatagaaaatctgatgacacaacctcacagcactggggaacaagatatgctttctgagacctccacrctatagccccagaggaggaaatgaacctgctcacataccctgtacagcactatttcaaccagcatttgggaaagccattatacaaagcctatttataaccaaggaacttttacaaacactttgccactgaaagcacccagaaacaaagccaaaggaccctaaatagcatacataatacacaccttcttaaatcttttcccattagacaaaaaaagtgcagcttacttccagcatttatttaattt

SEQ ID NO: 623111 - DNA, 563 bp, Homo sapiens
agccaggaaataaggaaaagatttaaataagtactatcagaaataataaaggtgacattataagtgatacctcagaaatacaaaagattatcagagactactaagaacacctatgcatacaaactcgaaatcttaaagaaaatagataaattcctagacacatacaaactcccgtgactgaactaggaataaatagaaatcctgaatayaccaataatgagtaatgaaatcaaatcagtcataaaaaatcttttagcaaaaaatgcccaggaccaggcggattcatagccaaattttgtcagttgtacaaaggaaagctgataccaatgtttctgaaactactccaaaaagtgaaagggcagtaatttctccttaactcattctatgaaaccagtatcaccctaatagcaaaaacaatcaaggacatccacacaaaaaaggacaactacaggccaatattcttgatgaacacagatgcagaaatcctcaacaaatattagcaaaccaaatcaaacagcacatcaaaatgcttatacactgttggtggtaatgcaaattagtcc

SEQ ID NO: 623112 - DNA, 618 bp, Homo sapiens
cagcatctcctggaagaacaatttcttccattctccagcaaccttggccacagacagtggctttcttcagaatccaaaagaattctgttaacyacctattgggccctgactgattacttctttctttcatgcacttatgtttgccctgaacccacagatatttatttcacatcagccatcaaatgaatcttcagagaagttcaattttcatgaccattctgaataaaacacatgactactatagtagagaacttattggatgaaatttctaatcacacacacttcccttcaccttcagtcaaaaatcatagcaaaacactgtgaaacaaagaggagaaacagcactttaaacttttgccactgtattaaatgattatataatacaatgaccccaatgtttctgtattcacaaaatgcatcaactcactccgctatttctgacaatgacagacttagaaagacaaaagaggccaggtacggtggctcacacatgtaatcccagcactttgggaggccaaggcaggcagatcatgaggtcaggagactgagaccattctggctaacacggtgaaaccctgtctctactaaaacatacaaaaaattagccgggcatggtgg

SEQ ID NO: 623113 - DNA, 570 bp, Homo sapiens
aataaacaaaaaacaacaacaacaaaaaacaacaacaaagttttcatttaattttttaacaaactaatctatgttaatttgatattagtttgttaacataacaaactaataatatgttaggcatattattcatttatatttgttttccttctcataaaacacattctgctcttacatttattttcttaaatacatgaattcaccaacagtctctttggttcctctctactggttcaacacatgactctttcagctattcattatatataaaaagctttgaaatctccaactattcttgccctttccatctcagtgccttgytgtctactgactttgcagactgatgtgattccctctgaaacatgaattattaggtttttagaaaatgcctttttgttctttccaaagtaaaagacaaataggctgggaatgtaaatttagcatttgaacaaccattatttaaccagctaggttgtaatggtcaactcaggattaatgtaaaagtgaagtgttgattttatgcatgccgaactcttttttgctgttaagggaatttgtaggtaagataat

SEQ ID NO: 623114 - DNA, 585 bp, Homo sapiens
tttaagtttttcgttcactttcagttatattttgcataagagtgagataggggttcaacttcattcttttgtatgtggctacccagttgtcccagcactgtttgttgaagaaacgcttcctttatttatttatttttttttgmaactcttcctttagattaaatgatcttggtacatttgttgaaaatgaaccgggcatagatgattaggtttatgtttggatttcaattttattccactggtctttatttctttccttttgccagtaccatgctgttttgactactatagttttgttttgaagtctggaaatttggaaattgagtcctctccctgtagttgcatataaattcaggattggcttttccatttttgcacaaataaaatttttaaaaaggacattggaattgtgacagtgattacattcaatctttagattacttttggaagcattgccatcttaacaattttaagtctttcattattattattattatactttaagttttagggtacatgtgcacaatgtgcacatttgttagatatgtatacgtgtgccatttcaatcctttaaaatgacatggt

SEQ ID NO: 623115 - DNA, 598 bp, Homo sapiens
tctttcctcattgattattttttgtcaactttgttgaagatcagatggctataggtgtgtggctttatttctggcttctctacttctgttcaatttgtgttttgtaccagttacatgctctcttggttactgtagcttacagtatagtttgaagtcaatgtgaagcttcccactgttctttttgtttaggattgctttggatttgggctcttctttggttccatatgaattttagaataaaataatattggtagtttgataggaatagcattgaatctgtagatagctttgggcagtctagccattttaatgatattgattgtttcaatccataagcmtgaactgtttttccatttgtttgtgtcatctatgattttgttcatcagtattttgtagctctccttgtagagacctttttgccccctttgttagttgtattcctaggttttttcttgtggctattgtaaatgggattgagttcttgattggctttcaggatgaacatttttggtgtttaaaaatgctacagatttttgcatatttattttgtgtactgaaatctcactgaagttgtatgtcagttccaggagtttttgga

SEQ ID NO: 623116 - DNA, 551 bp, Homo sapiens
ggtgtcactggactgggcagtcctgtctacaggtcccctaatggcaggcactagcaccagcactgagagacaactgatttttgcattgatcttgtaccctgaaattatgctgaaatcatttattagctctacttattttctatctgtattgcatgagatttttctatatagagagaatcatgtttcagtcaaatacacatgatttgaatttttcctttcctatttgaatgtgttttatttyatttcttgcctaattgctctggctagaacttccaatactatgtttaatagtagtaaaaatggacatccttgttttttttcttttctttctgattttaagttacaagttttagtctttcacaatttagtatgctttagctttgcagttttcataaatatgctttattatgataaaggagttttatttcatttatagttttctgagtgtttttgttatgatgggtattaaaagttgtcaatttttttttctgcatctaatgagatgaacatgattttctcttttattctgatatggtgtagtgcactgattg

SEQ ID NO: 623117 - DNA, 555 bp, Homo sapiens
ccacttataagcaagaacatgtggtatttggttttctgttcttgtattagattgcttaggataatggcctcctgcttcatctataatgctgcaaaagacataacttttgttctttcttatggctgcataacattccattatgtatgtactagtctgttctcaygctgctaataaagacatacctgagacagggtaactcataaaggaaagaggtttaatggactgtcaattccacacggctggaaaggcctcacaataagtctctgatagagacttattcactatcacaagaatggcatgggaaagtcaggcctccatgattaaattacctcacattgagtacctcccgtgacgtgtgggaattatgggagctacaattcaagatgagattttggtggggacacagcctaaccatatcagtgtatatttggtacattttccttatacaatccactgtcgatgggcacataagttgattccatttctttgctatcgtgaatagcactacatattggggtgaacatattggggtgtgtgtcttattgatagaatgaa

SEQ ID NO: 623118 - DNA, 561 bp, Homo sapiens
tgtctctactaaaaatacaaaattagcaaggagtggtggcacattcctgtaatcccagctacttgggaggctgaggcagaagaattgcttgaaggcaggaggcagaagttgcagtgagccgagatcatactattgcacttcagcctgtgtaacaagagtgaaactccatctcaaaaacaaaacaaaacaaaacaaacaaaacagcaacaacaaaaatatatatttggtgattacagtttatggataaatgaaataaatgacagtgatgatatatgaagaagggaggaaagaagtaagaatatttttttacaggtaagtgcactacctatgaagtagtatagtgctattttaatgtagacttgggttaattgtaaacacatattgcacataatacggaaactacaaaaaagtaagaaaaaacaagtaatattaaggagaaaaagaaaatagactcatataacatgctcaattaaaaccacagaaggcagaaaaagarttgaggacaaaaatagaaacaacgaacaagggcaatgagtagaaaacagtaacgcatatatggta

SEQ ID NO: 623119 - DNA, 542 bp, Homo sapiens
atacatatttagattttggatattagacatttaggtcctttaaggtaggaagagtacaggaaatagtcaagaagactttaacaaatttctaaaaacagagagcatatagaggaatgatatatctgtacagagagggtaaacttataaccaaaaggtcagaagagaaaaatttatcaaggatgaaaagttaatcagtgtcccttaaatcctcccaatattggtatttggaagtaccgagggtcaaagatggtggagaatgaggctgaaaaaggaggctytccctgcctacgtttcctccacaactcttttcatcaggtaactgatttccttccacaagaagaaggaggctcactctctagagaaactgagcttaagaagccctgtactcagagacacacagcagtgccagaaaaggcatgaggtgtaggctagaaagacagattaggtacacatccactccttgaattcagagactcttagctcttttattcatcttccttcctaaaattcagcagctagctctatcctacagaaagggaact

SEQ ID NO: 623120 - DNA, 542 bp, Homo sapiens
atacatatttagattttggatattagacatttaggtcctttaaggtaggaagagtacaggaaatagtcaagaagactttaacaaatttctaaaaacagagagcatatagaggaatgatatatctgtacagagagggtaaacttataaccaaaaggtcagaagagaaaaatttatcaaggatgaaaagttaatcagtgtcccttaaatcctcccaatattggtatttggaagtaccgagggtcaaagatggtggagaatgaggctgaaaaaggaggctctccctgcctacgtttcctccacaactcttttcatcaggtaactgatttcctyccacaagaagaaggaggctcactctctagagaaactgagcttaagaagccctgtactcagagacacacagcagtgccagaaaaggcatgaggtgtaggctagaaagacagattaggtacacatccactccttgaattcagagactcttagctcttttattcatcttccttcctaaaattcagcagctagctctatcctacagaaagggaact

SEQ ID NO: 623121 - DNA, 607 bp, Homo sapiens
ttcttatatattctgattactaatctcttgtcagatgaatagtttgcaaatatttctctccattctgtggattgtcttttccctttgttgattgtatctttggctgtgcagaagctttttaacttgatgtgatcccatttgttcatgtttgctttgaatgcctgtgcttgtagggtattgctcgaaaaatttttgcctagaccaatgtcctggagattttccctagtgttttcctatagtagtttcacagtttgaggtcttagayttaagtctttaatccattttgagttgatttttgtatatggcaagggatatgagtccagtttcattcttctctgtaggatattaaattttcccagcacatttattgaagagactgtctttcccccagtgtacgttcttggcacctgtgttagtctgttctcatgcctctaataaagccatacacaagactgggtaatttataaaggaaagaagtttaatggactcacagttccacatggctggagaggcctcacaatcatggcagaagatgaatgaggagaaaagtcatgtcttacgtggtagcaggcagatagctttgcaggggaactcacatttataaaac

SEQ ID NO: 623122 - DNA, 518 bp, Homo sapiens
gtctttcccccagtgtacgttcttggcacctgtgttagtctgttctcatgcctctaataaagccatacacaagactgggtaatttataaaggaaagaagtttaatggactcacagttccacatggctggagaggcctcacaatcatggcagaagatgaatgaggagaaaagtcatgtcttacgtggtagcaggcagatagctttgcaggggaactcacatttataaaaccatcagatgttgtgagatttagtcactatcatgagaaaaatatggaggaaaccacccccatgattcaatgatccctacctggcctcccccttgacttgtggggattatttcaattcaagatgagatttggggtggggacacagccaaaccatatcagcccctttgtcaaaaatgagttaactctagatacgtgaacttgtttctgaattctctattctgttycattggtccatgtgtttgtttttatgtcagtaccatgctgttttagttagtatagctctgtagttta

SEQ ID NO: 623123 - DNA, 588 bp, Homo sapiens
caagttttttttatgaattttcatcaagaagggatgttaaattttatcaaatactttttcagcatcaactgaaatgatcatatggcttttatccttcattctgttgatatgatgtatcacactgcttgatytgcacatgttgaaccattcttgcatccaagggataaatcccacttggtcattgtgaatgacctttttattgtattgttgaatttggtttgctagtgttttgttgaagatttttgcattagtgttcatcaggtgtattggcctgtaggtttttttttttttttttttttttttgatgtgtcttagtctgattttggtatcagggtaatactggcctcatagaatgagtttggaagtattctcttctcctttattttttggaatagtttgagtagggtcggtattagttcttctttaaatgtttggtaaaattcagcagtgaagctagccagtcttgggattttctctactgggatgattttatttctcgtttgatctttgtgctggttattgcatgttcagattttggatttcttcctggttcaatcttgatgggtcatatttgtgtagggatttgtc

SEQ ID NO: 623124 - DNA, 467 bp, Homo sapiens
tctcctacactgcaactccatgttttcgaagtccccaaattcatagtatcatttttaaacctctaccatcaccgggtgagagaagtgcataactcatatgtatggcagtttaactggactttctcttgtttccagtttggggctataaaggtttgtaacaggtcctagtgtctggcagtgtgtgttctccagatttattatctttcttcaagattggtttggctactcttaggtgcttatatttccaaataatttttaaaggtattagtttgtcaatttcccaaaacyttgggctggaatttctggcagggtgacactaaatttataggctagtttggaaagaactgaatcttgacacgttgaggctttccattcctgaatataattatgcttccaatttgtttggggtttcttttatttaaccaggaatgttgtgaatttgttgtcatggctttcgagtctttggt

SEQ ID NO: 623125 - DNA, 476 bp, Homo sapiens
gaatcttgacacgttgaggctttccattcctgaatataattatgcttccaatttgtttggggtttcttttatttaaccaggaatgttgtgaatttgttgtcatggctttcgagtctttggttttccctagataattaatatttttgttgtagaacataaatagtttttatcattctgatgatgttaatctgtcaactttgctaaatttactagtcactattcgtaatttatttctggattcattgtaatttctgtgtatattatactgtatctgagttaatattgttttatttcttattttccatttctcatgggcttaatgtctctttatcrcattcattattgcattagctagaatttctaggagagcattgaatagaattggtgacagtggggatccttgtttctcatttctaatctgcaggaagcagtggaagttttccatttcaatattgagaatgatgcttgaagtagat

SEQ ID NO: 623126 - DNA, 533 bp, Homo sapiens
gtccattcatttttcagttgcctatacatccatccattcatccatttatccatccactcatccatccattcattcatgcatgcacccatccacccatctatctcttcatctcttctacgatwcactgaacagttattgcatattctgtttgtgccagttacagagacagtgtttgtcactgtcacagttacgcatgaggagtaactgctctctgtgtttgctattttcaggaaaacggatttgtgtgggagaagccctggccggcatggagctgtttttattcctgacctccattttacagaactttaacctgaaatctctggttgacccaaagaaccttgacaccactccagttgtcaatggatttgcctctgtgccgcccttctaccagctgtgcttcattcctgtctgaagaagagcagatggcctggctgctgctgtgcagtccctgcagctctctttcctctggggcattatccatctttcactatctgtaatgccttttctcacctgtcatctcacattttcccttc

SEQ ID NO: 623127 - DNA, 546 bp, Homo sapiens
actttaaaatggagaatcaataagagagctgaacatactgacatactgattctttgaatagaaacttggggttcactatatttaacagttcttcatcttgaatttttacagttccttctcttcaaacttccttaaaatgtcttggcttagttgttctgcatgattctctaaaagaaaaagcttctctgaataaggtggaggagaattaagggaggttttagtaagtgctgcctgtatgagtctgtgaaccagyccacggatgcatggtatgacaaaacacccaacaagaatgaatacgcctactatggctgtgagagaagtaagaactgaggctatgattttttttttccatttactgaatgatttttctaggcaccttttaaaggggtcacttaccgctgagtttttggttaactcattggacagagcagttagaccttgcaatgccttgttatacttccatcaggggcagtattgtttgggatgaaggtacaatattgagttttaatcatgatgcaaactcctcctccttctgctgctgatata

SEQ ID NO: 623128 - DNA, 362 bp, Homo sapiens
ttaaatgtgggcaaatgaaattaaagtgtatggtctttcttagttctctttttgctttttttttttaatgcacacagkgttaagttatcagcttaaaataatggattataagataatattttcaagccccatggtagcctcaaaccaaaaaaaaaaaaaaaaaaaatacaatggaaacacaaaagttaaaagcatgaaactaacttatatggccagagaaaataaccttcattaaaaggaagacaagaaaaaaaagaaagaaggaagaaaagaccaaaaaacaaaagcaaataacaaaatgacaggagtaagtccttacttatcaataataatattgaatgtaaatggactaaactcttgga

SEQ ID NO: 623129 - DNA, 362 bp, Homo sapiens
ttaaatgtgggcaaatgaaattaaagtgtatggtctttcttagttctctttttgctttttttttttaatgcacacagtgttaagttatcagcttaaaataatggattataagataatattttcaagccccatggtagcctcaaaccaaaaaaaaaaaaaaaaaaaatacaatggaaacacaaaagttaaaagcatgaaactaacttatatggccagagaaaataaccttcattaaaaggaagacaagaaaaaaaagaaagaaggaagaaaagaccaaaaaacaaaagcaaatarcaaaatgacaggagtaagtccttacttatcaataataatattgaatgtaaatggactaaactcttgga

SEQ ID NO: 623130 - DNA, 492 bp, Homo sapiens
acccagatatataaagaaaaaattagagctaaagagggaattaggccccaataaaacaataggaggagatttcaactcctcacttgcaatattggacagaattccagacagaaaatcaataaaggtacatcaaactgaatctgcactataaaacaaatggatctaatagatatttacagaacattttattcaagagctacagaatacacattcttttctttagcacatggatcattctcaaggataaactatgtgttaggtcacaaaacaattcttaaaacattcacataatttgaaataatatcaagcatcttttttggctgcaatagaataaaactagtaatcaataacaaggggaattttggaaactatacttatacatggaaattaaacagtatgctcctaaatgactagtgagtccataaagagactaaaaaggaaattgaaaaatttcttgaaacaactgataatggatacaaaaamctgcggtct

SEQ ID NO: 623131 - DNA, 659 bp, Homo sapiens
aaattaacaaggatattcaggacttgaactcagttctggaacaagtkcacctaatagaccttcagaactctccaccccaaatcaacagaatatacattcttctcagaaccacatcacacttattctaacattgaacacataattgaaagtaaaacactcctcagcaaatgcaaaagaatggaaatcattactaacagtctctcagaccatagtgcaataaaattagaactcagcttaactcactcaagagagtcacttccaaaatggctgaataggaacagctctgttctacagctcccagtgaaatttatacagaagatgggtgatttctgcatttccaactgaggtacctggttcatctcattgggactggttggactttgggttcagcccacagagagtgagctgaagcagagtggagcatcgcctcacccaggaagcacaaggggttggggggtttctcttttctagccaagggaagctgtgagtgaccgtacctggaggaatggtacactcctgcccaaatactgcacttttcccatggtcttcacaactggctgacctggagattccctcccgtgcttggtgcagcaggtccaatgcccatggagccttgcttgctgctagctcagcagtctgagattgatctgggacactgg

SEQ ID NO: 623132 - DNA, 659 bp, Homo sapiens
aaattaacaaggatattcaggacttgaactcagttctggaacaagttcacctaatagaccttcagaactctccaccccaaatcaacagaatatacattcttctcagaaccacatcacacttattctaacattgaacacataattgaaagtaaaacactcctcagcaaatgcaaaagaatggaaatcattactaacagtctctcagaccatagtgcaataaaattagaactcagcttaactcactcaagagagtcacttccaaaatggctgaataggaacagctctgttctacagctcccagtgaaatttatacagaagatgggtgatttctgcatttccaactgaggtacctggttcatctcattgggactggttggactttgggttcagcccacagagagtgagctgaagcagagtggagcatcgcctcacccaggaagcacaaggggttggggggtttctcttttctagccaagggaagctgtgagtgaccgtacctggaggaatggtacactcctgccyaaatactgcacttttcccatggtcttcacaactggctgacctggagattccctcccgtgcttggtgcagcaggtccaatgcccatggagccttgcttgctgctagctcagcagtctgagattgatctgggacactgg

SEQ ID NO: 623133 - DNA, 587 bp, Homo sapiens
aatgaacctactgttcaaagtgggcttttcataataaaccaacactcaataccaggccaatttatgctggctctccctaccacaaattatctctgctgaaatccagacacttcatcagggcttcatttattttgctactgccatactgtytttactcatctcagtcatcctcctccattgtgcaaagatgtcctttttaatcatgtcatcaaatttagacagattacagctgatgacacagaaatttaaagaatgaagcttctctaagagaaacaggatggagaacactggcaccatcttctcagcattgttctgaaattcactttgttcatcatctgtggtcctacctgtgagctctgggtgcttcagcaggagcaggagtccatatctcagagtggtacttgtcatctctgttccagcaacaaatagatcaggtacattgcccaccaagttttcaatagtgaatttcaatggttggttgtccttttcctagaaatgatttcatgcaattatctgacaaattatgtgccagcatatctaattacactatatttttaaaaacatactattttataaagttagccaaa

SEQ ID NO: 623134 - DNA, 587 bp, Homo sapiens
aatgaacctactgttcaaagtgggcttttcataataaaccaacactcaataccaggccaatttatgctggctctccctaccacaaattatctctgctgaaatccagacacttcatcagggcttcatttattttgctactgccatactgtttttactcatctcagtcatcctcctccattgtgcaaagatgtcctttttaatcatgtcatcaaatttagacagattacagctgatgacacagaaatttaaagaatgaagcttctctaagagaaacaggatggagaacactggcaccatcttctcagcattgttctgaaattcactttgttcatcatctgtggtcctacctgtgagctctgggtgcttcagcaggagcaggagtccatatctcagagtrgtacttgtcatctctgttccagcaacaaatagatcaggtacattgcccaccaagttttcaatagtgaatttcaatggttggttgtccttttcctagaaatgatttcatgcaattatctgacaaattatgtgccagcatatctaattacactatatttttaaaaacatactattttataaagttagccaaa

SEQ ID NO: 623135 - DNA, 636 bp, Homo sapiens
ccttaattttttttaaaaaaatccataatatacaagttgctacattatttctctttcttgtctaattgttttggctgggaccttaagaacgatgctgaatagcagtagtaaaagtagatatacttgggtttttttaccccctgattttagggcataagcttttagattttcacaatttgatataaaacatctttggaatttttataaatacattttattatgataaggaattttcccttctattcatattyttgagtgattttttatattatactttaggttctgggatacatgtgcagaatgtgcaggtttgttacataggtatacatgtgccatggtggtttgctgcacccatcaacctgtcatctaggttttaagccccgcatgaattaagtatttgtcccagtgctctccctccccttgctccccaccccccaacaggccctggtgtgtcatgtttccctccctgtgtccatgtgttctcattgttcaactcccacttttgagtgagaacatgcagtgtttggttttctgttcctgtgttagtttgctgagaacgatgtttccagcttcatccatgtccctgaaaaggacatgaattcattcttttttatggctgcatagtactccatggtg

SEQ ID NO: 623136 - DNA, 636 bp, Homo sapiens
ccttaattttttttaaaaaaatccataatatacaagttgctacattatttctctttcttgtctaattgttttggctgggaccttaagaacgatgctgaatagcagtagtaaaagtagatatacttgggtttttttaccccctgattttagggcataagcttttagattttcacaatttgatataaaacatctttggaatttttataaatacattttattatgataaggaattttcccttctattcatatttttgagtgattttttatattatactttaggttctgggatacatgtgcagaatgtgcaggtttgttacataggtatacatgtgccatggtggtttgctgcacccatcaacctgtcatctaggttttaagccccgcatgaattaagtatttgtcccagtgctctccctccccttgctccccaccccccaacaggccctggtgtgtcatgtttccctccctgtgtccatgtgttctcattgttcaactcccacttttgagtgagaacatgcagtgtttggttttctgttcctgtgttagtttgctgagaaygatgtttccagcttcatccatgtccctgaaaaggacatgaattcattcttttttatggctgcatagtactccatggtg

SEQ ID NO: 623137 - DNA, 636 bp, Homo sapiens
ccttaattttttttaaaaaaatccataatatacaagttgctacattatttctctttcttgtctaattgttttggctgggaccttaagaacgatgctgaatagcagtagtaaaagtagatatacttgggtttttttaccccctgattttagggcataagcttttagattttcacaatttgatataaaacatctttggaatttttataaatacattttattatgataaggaattttcccttctattcatatttttgagtgattttttatattatactttaggttctgggatacatgtgcagaatgtgcaggtttgttacataggtatacatgtgccatggtggtttgctgcacccatcaacctgtcatctaggttttaagccccgcatgaattaagtatttgtcccagtgctctccctccccttgctccccaccccccaacaggccctggtgtgtcatgtttccctccctgtgtccatgtgttctcattgttcaactcccacttttgagtgagaacatgcagtgtttggttttctgttcctgtgttagtttgctgagaacgaygtttccagcttcatccatgtccctgaaaaggacatgaattcattcttttttatggctgcatagtactccatggtg

SEQ ID NO: 623138 - DNA, 561 bp, Homo sapiens
ttgctgtgctctccctccctcagtactcagaaatactctctgaaccatgccactgctgccaggggaagagaggatgtcagtaattcaatagtattttttctatctcttcatttcctctttcagtgatatatatttaaatcaaggtgcatgctcatctgattttggttcttatgaaggtacattttgtgtagatagctgttaaactgatgtctttgcttggggaataatcaatgaagcattcaattcygtcatcttgctccactctcccatttgtatatcttcttttgagaaatttctgttcatgttgtttgcccactttctaatgggattattcggatttttttcttgctgttttgagtttcttgtagactctggaaaatagtcctttgttgaaggtatattttgcaaatattttctcccattctgtaggttgtatgtttactctgcttgtcatttcttttactgtgcagaagctctttagtttaattaggtcccattgtcaactgtttttgttgaaattgcttttaaacattgagtcataaatccttagcctacaccaat

SEQ ID NO: 623139 - DNA, 482 bp, Homo sapiens
atatttcattcttctacatgttcccctgggtaatatcagccaagcacaaatcccacagctaccagcgtaggtggctctttcctgcaagaaccacctcctagctggaagccaataggcacagcctattacaacatctgctggcaaaataacatagcatttgggaaggagaaaacttttatcgtatctcagctaacaccatacccacatcaccccagctaatcggaaggtcttgagtgtgttcacaaacccaatacattgmtagtacagctggcatttgagaaaattaccacactaaacctatttataaccaagtaaatcttacaaagtctatgtcactctcttgccacctcgatcagaggtggtgcttgcacctgctgctaggagaccagaggacagttaggcccagttaagccccattcaacattgccctcctttgtagcaaagagtggaacccaagcactgtacatctctcaaacctttcc

SEQ ID NO: 623140 - DNA, 666 bp, Homo sapiens
aatatggttatgctcccaacttattgagctttattctattttctcagtaatgtcttattttcagtgcagtggtttacaactcttttattaggtttttcctagataattaatattttgttgtgttataattttttaatttttttttatttctttgtaattggtataagtaattgtattcaatkatactattctgatgaccttatatctaacaactttcctaaatttactgatcattgctgataatttatctgtagatatacttggaatttctatgtatattattttgctatctgggttaatatgtattttatatcttattttccaatgattttgtcttcaatttatctttattgcattattgtgctggctaggattttcaggttagcattgaacagaattggtgatagagggcatccttatttcatttctgatctgctggggggtagagtataagaatattaatatttcactactgagaatgatgttttaagtatttttttaaaataattgacttttatttaacttcatttataaaagaattttcacgaatatggtttgaaatgatactctacatttgttatgaaacagatagttggtattttcataaaatcccagcccccagaaggctcatgtcattccaagtgatcagactcctgtaccttccct

SEQ ID NO: 623141 - DNA, 666 bp, Homo sapiens
aatatggttatgctcccaacttattgagctttattctattttctcagtaatgtcttattttcagtgcagtggtttacaactcttttattaggtttttcctagataattaatattttgttgtgttataattttttaatttttttttatttctttgtaattggtataagtaattgtattcaattatactattctgatgaccttatatctaacaactttcctaaatttactgatcattgctgataatttatctgtagatatacttggaatttctatgtatattattttgctatctgggttaatatgtattttatatcttattttccaatgattttgtcttcaatttatctttattgcattattgtgctggctaggatttycaggttagcattgaacagaattggtgatagagggcatccttatttcatttctgatctgctggggggtagagtataagaatattaatatttcactactgagaatgatgttttaagtatttttttaaaataattgacttttatttaacttcatttataaaagaattttcacgaatatggtttgaaatgatactctacatttgttatgaaacagatagttggtattttcataaaatcccagcccccagaaggctcatgtcattccaagtgatcagactcctgtaccttccct

SEQ ID NO: 623142 - DNA, 666 bp, Homo sapiens
aatatggttatgctcccaacttattgagctttattctattttctcagtaatgtcttattttcagtgcagtggtttacaactcttttattaggtttttcctagataattaatattttgttgtgttataattttttaatttttttttatttctttgtaattggtataagtaattgtattcaattatactattctgatgaccttatatctaacaactttcctaaatttactgatcattgctgataatttatctgtagatatacttggaatttctatgtatattattttgctatctgggttaatatgtattttatatcttattttccaatgattttgtcttcaatttatctttattgcattattgtgctggctaggattttcaggttagcattgaacagaattggtgatagagggcatccttatttcatttctgatctgctggggggtagagtataagaatattaatatttcactactgagaatgatgttttaagtatttttttwaaataattgacttttatttaacttcatttataaaagaattttcacgaatatggtttgaaatgatactctacatttgttatgaaacagatagttggtattttcataaaatcccagcccccagaaggctcatgtcattccaagtgatcagactcctgtaccttccct

SEQ ID NO: 623143 - DNA, 666 bp, Homo sapiens
aatatggttatgctcccaacttattgagctttattctattttctcagtaatgtcttattttcagtgcagtggtttacaactcttttattaggtttttcctagataattaatattttgttgtgttataattttttaatttttttttatttctttgtaattggtataagtaattgtattcaattatactattctgatgaccttatatctaacaactttcctaaatttactgatcattgctgataatttatctgtagatatacttggaatttctatgtatattattttgctatctgggttaatatgtattttatatcttattttccaatgattttgtcttcaatttatctttattgcattattgtgctggctaggattttcaggttagcattgaacagaattggtgatagagggcatccttatttcatttctgatctgctggggggtagagtataagaatattaatatttcactactgagaatgatgttttaagtatttttttaaaataattgacttttatttaacttcatttataaaagaattttcacgaatatrgtttgaaatgatactctacatttgttatgaaacagatagttggtattttcataaaatcccagcccccagaaggctcatgtcattccaagtgatcagactcctgtaccttccct

SEQ ID NO: 623144 - DNA, 605 bp, Homo sapiens
ccactgcactccagcctgggtgacagagtgaaaccctatctccaaaaatttttttgtaaaattacaaataaaaatttgagttgatgaataccctatacatcaacttgatcatgacacattatatgcatataacaaaatattatacatatgccataaatatgtacacatattatgtatcaacataaaaaatataaaaaataaactggcatcasagctatgaaaataaattgaattgttaaatggcagttgatacagacttcaggtaaaatgataactaagctacatggctgaataaaatgtttagaatgcaactgagaaagcagagagatctaaaatatatgaaagagattaggagatacaaataataaaatgagcaggtctaatttaaatcatgttgaaaattcagaagtagaaaagagggaaaacaaagatacaatatttgaaataaagactttgaattttatagaaatgataaagtgagatcaggagggatggctcatacctataatccaacactttgagaggccaaggcaggaggattgcaggaggattccttgagcccaaggagtttgagaccagcctcggcaacacagcgagaccctgtc

SEQ ID NO: 623145 - DNA, 605 bp, Homo sapiens
ccactgcactccagcctgggtgacagagtgaaaccctatctccaaaaatttttttgtaaaattacaaataaaaatttgagttgatgaataccctatacatcaacttgatcatgacacattatatgcatataacaaaatattatacatatgccataaatatgtacacatattatgtatcaacataaaaaatataaaaaataaactggcatcacagctatgaaaataaattgaattgttaaatggcagttgatacagacttcaggtaaaatgataactaagctacatggctgaataaaatgtttagaatgcaactgagaaagcagagagatctaaaatatatgaaagagattaggagatacaaataataaaatgagcaggtctaatttaaatcatgttgaaaattcagaagtagaraagagggaaaacaaagatacaatatttgaaataaagactttgaattttatagaaatgataaagtgagatcaggagggatggctcatacctataatccaacactttgagaggccaaggcaggaggattgcaggaggattccttgagcccaaggagtttgagaccagcctcggcaacacagcgagaccctgtc

SEQ ID NO: 623146 - DNA, 556 bp, Homo sapiens
aaaagatttgatgcagtgaaaaaggagaaatatattgcaggcagaaaatttatattttcttgtgctgttcctgaaatttttacatcaaattttcaggtattatcaatagagaaaaggtatatattttactttattattttttcrttaaataactataataaactcaatttctataatttgcatttaggttaaatacattttgatttcactattttttctacaaagaattgacagatgtattaataaaatattacagctggtttacagacaatgaagcatcatcaatttttgtgtacagttaaaaaatgatatacaacatctgtagaccaacaatgagttttactatttttccattctctgcacagtattgttcaaaataataattcaatgtacattttgttaatgaaagcttctaactcattaaaataaaatttctgattttcaaaatgttgcattcacttttattaatctgttttatttatctcagttttcagaatataattaatctatgttgatctgcttgatacacaaaatgctctcttttgggagctgtcat

SEQ ID NO: 623147 - DNA, 556 bp, Homo sapiens
aaaagatttgatgcagtgaaaaaggagaaatatattgcaggcagaaaatttatattttcttgtgctgttcctgaaatttttacatcaaattttcaggtattatcaatagagaaaaggtatatattttactttattattttttcgttaaataactataataaactcaatttctataatttgcatttaggttaaatacattttgatttcactattttttctacaaagaattgacagatgtattaataaaatattacagctggtttacagacaatgaagcatcatcaatttttgtgtacagttaaaaaatgatatacaacatctgtagaccarcaatgagttttactatttttccattctctgcacagtattgttcaaaataataattcaatgtacattttgttaatgaaagcttctaactcattaaaataaaatttctgattttcaaaatgttgcattcacttttattaatctgttttatttatctcagttttcagaatataattaatctatgttgatctgcttgatacacaaaatgctctcttttgggagctgtcat

SEQ ID NO: 623148 - DNA, 556 bp, Homo sapiens
aaaagatttgatgcagtgaaaaaggagaaatatattgcaggcagaaaatttatattttcttgtgctgttcctgaaatttttacatcaaattttcaggtattatcaatagagaaaaggtatatattttactttattattttttcgttaaataactataataaactcaatttctataatttgcatttaggttaaatacattttgatttcactattttttctacaaagaattgacagatgtattaataaaatattacagctggtttacagacaatgaagcatcatcaatttttgtgtacagttaaaaaatgatatacaacatctgtagaccaacaatgagttttactatttttccattctctgcacagtattgttcaaaataataattcaatgtacattttgttaatgaaagcttctaactcattaaaataaamtttctgattttcaaaatgttgcattcacttttattaatctgttttatttatctcagttttcagaatataattaatctatgttgatctgcttgatacacaaaatgctctcttttgggagctgtcat

SEQ ID NO: 623149 - DNA, 501 bp, Homo sapiens
taaacttttactctactaatttactaggatactgaagtctatttgtttctgcagcatgacatagtctgcccttactaatacaatgggtacatagccttataacctgtccatgggaaagaaccttgtaactatgaacctgaagacagaagctattaaaagagagatttgattacataaaatctgttaccattgtatgtcaaaagtactaagaacaaaattgaaagataaaattgagaaaaatatttcattcctcttgctctctctctatatatatacatatatatgtatatatatayatgcacacatatatgtaacaaatctatacatgtagcaaaaaagtatcactctctttaatatgtgaagcattcttaatgatcaataaaaattacaaacaggaatataggcaatgaagattaatagatgtaccacagattgcatcttattgctaacaacagagaccagaattaagcaaattagaatttcatcctttatgtaaaagaa

SEQ ID NO: 623150 - DNA, 525 bp, Homo sapiens
  misc_feature 200, 230, 242: n = A,T,C or G
agacatgttgtttatttaatttgaaacttagagacttaatggtgagcattttaattttttaggggaaaacatacyttattatgtagtcattaactattttattagacttttttattattttgaaggaaggatttattatattttactcaaagatagaacttttggtttttaaattagtaagaaaaaggacctgatttttncaagtataccagaaagttaaaatttaaatnaaactaataaanaaacaaacaaaaatttttttagaataatttgtaaatcttctaatgaaactcattagaaaaaaaggtggcatagtcaacagacttttttccatgttactactttaagtgagaatgtctgtgtaagcatatatttaatatgtatgcaatttaatacattaaatattagtatacagttttaatatattatgcatactttaaatacatataaaaattataattctaatttgaaaaattattatatgccttttcatgtgtcagagattcacaactggattatgaaata

SEQ ID NO: 623151 - DNA, 525 bp, Homo sapiens
  misc_feature 200, 230, 242: n = A,T,C or G
agacatgttgtttatttaatttgaaacttagagacttaatggtgagcattttaattttttaggggaaaacatactttattatgtagtcattaactattttattagacttttttattattttgaaggaaggatttattatattttactcaaagatagaacttttggtttttaaattagtaagaaaaaggacctgatttttncaagtataccagaaagttaaaatttaaatnaaactaataaanaaacaaacaaaaatttttttagaataatttgtaaatcttctaatgaaactcattagaaaaaaaggtggcatagtcaacagacttttttccatgttactactttaagtgagaatgtctgtgtawgcatatatttaatatgtatgcaatttaatacattaaatattagtatacagttttaatatattatgcatactttaaatacatataaaaattataattctaatttgaaaaattattatatgccttttcatgtgtcagagattcacaactggattatgaaata

SEQ ID NO: 623152 - DNA, 525 bp, Homo sapiens
  misc_feature 200, 230, 242: n = A,T,C or G
agacatgttgtttatttaatttgaaacttagagacttaatggtgagcattttaattttttaggggaaaacatactttattatgtagtcattaactattttattagacttttttattattttgaaggaaggatttattatattttactcaaagatagaacttttggtttttaaattagtaagaaaaaggacctgatttttncaagtataccagaaagttaaaatttaaatnaaactaataaanaaacaaacaaaaatttttttagaataatttgtaaatcttctaatgaaactcattagaaaaaaaggtggcatagtcaacagacttttttccatgttactactttaagtgagaatgtctgtgtaagcatatatttaatatgtatgcaatttaatayattaaatattagtatacagttttaatatattatgcatactttaaatacatataaaaattataattctaatttgaaaaattattatatgccttttcatgtgtcagagattcacaactggattatgaaata

SEQ ID NO: 623153 - DNA, 628 bp, Homo sapiens
tttctaatattttaaaactctggtgtggcatggaaaataaatgatttcatagcaatcctgagaatttttcattttacctgggtcacatttgtaatagttrccaaagaagaaaaaaagtctttataatatgtgtgtacatgcggttatggctttaatttccaacctttggatgactattacaattctggttaggctacagcaaagtagcagaatcatcatggagaggatatcccactctacactttggggggtgtcataaggcaggtgagggacctggaaaatgccatggttcttgttatgggggagcctgtgtcataaaatgacagtgagagccacaacaggaatcccatgtgagtacagctaatatagaatttgtctacttgtggcaatggcttcctttagtaaggtcaaattcacagaaaagaaaagcaaatgtgaatcttgcatctttgttataagtgttatagctagttagctgtgctcctttaggcaagtcactttaagtattcatgactgctctaccaagggcgggggcataatatagttagaaggacgttgaaaaacataaagtgccacataaacctaagttattgccatttataatttaattcatttttagaaactttta

SEQ ID NO: 623154 - DNA, 628 bp, Homo sapiens
tttctaatattttaaaactctggtgtggcatggaaaataaatgatttcatagcaatcctgagaatttttcattttacctgggtcacatttgtaatagttgccaaagaagaaaaaaagtctttataatatgtgtgtacatgcggttatggctttaatttccaacctttggatgactattacaattctggttaggctacagcaaagtagcagaatcatcatggagaggatatcccactctacactttggggggtgtcataaggyaggtgagggacctggaaaatgccatggttcttgttatgggggagcctgtgtcataaaatgacagtgagagccacaacaggaatcccatgtgagtacagctaatatagaatttgtctacttgtggcaatggcttcctttagtaaggtcaaattcacagaaaagaaaagcaaatgtgaatcttgcatctttgttataagtgttatagctagttagctgtgctcctttaggcaagtcactttaagtattcatgactgctctaccaagggcgggggcataatatagttagaaggacgttgaaaaacataaagtgccacataaacctaagttattgccatttataatttaattcatttttagaaactttta

SEQ ID NO: 623155 - DNA, 628 bp, Homo sapiens
tttctaatattttaaaactctggtgtggcatggaaaataaatgatttcatagcaatcctgagaatttttcattttacctgggtcacatttgtaatagttgccaaagaagaaaaaaagtctttataatatgtgtgtacatgcggttatggctttaatttccaacctttggatgactattacaattctggttaggctacagcaaagtagcagaatcatcatggagaggatatcccactctacactttggggggtgtcataaggcaggtgagggacctggaaaatgccatggttcttgttatgggggagcctgtgtsataaaatgacagtgagagccacaacaggaatcccatgtgagtacagctaatatagaatttgtctacttgtggcaatggcttcctttagtaaggtcaaattcacagaaaagaaaagcaaatgtgaatcttgcatctttgttataagtgttatagctagttagctgtgctcctttaggcaagtcactttaagtattcatgactgctctaccaagggcgggggcataatatagttagaaggacgttgaaaaacataaagtgccacataaacctaagttattgccatttataatttaattcatttttagaaactttta

SEQ ID NO: 623156 - DNA, 581 bp, Homo sapiens
tttgggtggggactcagcaaaaccatatcaccagacatattatttctgaggaattatttgacaagcaattatttgcattcaaargagacaggcagttgatgatgctgatatattttgctgaagcttggataactgagagaatgaatggtgaaggcgtttgcagaatggcatttctcctaggtgaagcctagaagacagaggttgaaaataatgagtgtttcagagacctcgggtattatactgaaaatagatgatttaaataaagatgtatatattaaacattgacactttgttattttctcctactttgctctaagtatgatgaacccagcaccacaactttcaatccagggaacaattgagaattaatttttttttattattattgagacaaagtctcactctattgccagactggaacacagtggcacatcacggctcactgtaaccttaaactcctgggctcgtgtgttactcctgcctcagtccctcaagtagctgggagtacaggaatgtaccatcacaactggctgtgttttattttttgtagagacagagtttcactgtgttgcccaggctga

SEQ ID NO: 623157 - DNA, 581 bp, Homo sapiens
tttgggtggggactcagcaaaaccatatcaccagacatattatttctgaggaattatttgacaagcaattatttgcattcaaaggagacaggcagttgatgatgctgatatattttgctgaagcttggataactgagagaatgaatggtgaaggsgtttgcagaatggcatttctcctaggtgaagcctagaagacagaggttgaaaataatgagtgtttcagagacctcgggtattatactgaaaatagatgatttaaataaagatgtatatattaaacattgacactttgttattttctcctactttgctctaagtatgatgaacccagcaccacaactttcaatccagggaacaattgagaattaatttttttttattattattgagacaaagtctcactctattgccagactggaacacagtggcacatcacggctcactgtaaccttaaactcctgggctcgtgtgttactcctgcctcagtccctcaagtagctgggagtacaggaatgtaccatcacaactggctgtgttttattttttgtagagacagagtttcactgtgttgcccaggctga

SEQ ID NO: 623158 - DNA, 569 bp, Homo sapiens
caacagtgtcatcctccctcagctctcagctagcctaatattttaaacagcaaggagtaccatttggtaaggctgattgtaaggagttctagttcctgtagaaatagcaagtgcctcaattttaatgaacattagctattcaagaatcatggtgtgccttgtaaatcttttgagatttataaatacaaattcaacacagtgggtattataaatacccacttcaattgtattctaaagaaaaaagttttttaagtgtttacaaaaatactcaagataatagtttaaatgtagatatttactttagagaattaggagttctctctttgaatgtaaaaattcagccttaggccaacaaaaaagaaaatgttaatttttaaagtagtgataaatgggatttatatttataaaattaaaaataggtacaagaaatattttgataaatacatgaaaacagaattaaccttttatttttcatacagctatagtacttttggtgatgactttaagtctctaataataaaatttatatatarttttagtagtgcattcatgattcttcagtttggaaa

SEQ ID NO: 623159 - DNA, 501 bp, Homo sapiens
aattcctcccaaggtgtccccgaggaaagctgaaagccttgatggctttgcattagacgtctaatggcataagatgtaattctgggcaatcttgatattgggctgtggaaatggaatgcagcctgtgttttgatgaatgttttgatacaagcctctcctaccccaagtgagcatgctggatcctgacccttaagcacacacgcaggtttatgcaaacacacaccccagggtggaaaatgccttgataaggcaaattatttatgtttatctttttaaaatcaccccctgttccctgctctcccaaactttatttcttttgaagattcctcgactttttacactaaatataggtacatgtatattcaatgcgaagctacaaaattaccactatatatagggtatcctaccttctattttcaacatttgatgtgttcacatgttkttgggaatgtatttgaccatgatcctcagacatacatttgtaatttttgtaagtgttaa

SEQ ID NO: 623160 - DNA, 598 bp, Homo sapiens
ccagactcttgtttccccatccccaaagctgcatcccatcgcaataattgctacygccattctcctagctgcacaatcaggaagtcatccctaattcttcttttccccatatctccctatccaatctaccagcaatttctcttaactctactgccaacctacatcctccatttgtctatctttctccaaccccactgctactatcctaatcgaagccgccattgtctttcacctggactactgcagtagcccccatctgatagctccacttagaggcttgcacaactcaaatctttccacacagagcagctagagtgatcttttgaaaatgtaaacggggacatgtcatttccttacttaaagcccttcagtggcttcccatcaaacctcagaataaaatccaaacacctcaccttgacatagccctgcccctgattatgtcttctgcataacataaccccctttactcacacactttatccatctttctcttctccagagaatgtttctctccctagaacctctgctgagaatgctcttcccatggaattgtatgtccttggcttcttttgatactcaggtgtgagattagatctca

SEQ ID NO: 623161 - DNA, 598 bp, Homo sapiens
ccagactcttgtttccccatccccaaagctgcatcccatcgcaataattgctaccgccattctcctagctgcacaatcaggaagtcatccctaattcttcttttccccatatctccctatccaatctaccagcaatttctcttaactctactgccaacctacatcctccatttgtctatctttctccaaccccactgctactatcctaatygaagccgccattgtctttcacctggactactgcagtagcccccatctgatagctccacttagaggcttgcacaactcaaatctttccacacagagcagctagagtgatcttttgaaaatgtaaacggggacatgtcatttccttacttaaagcccttcagtggcttcccatcaaacctcagaataaaatccaaacacctcaccttgacatagccctgcccctgattatgtcttctgcataacataaccccctttactcacacactttatccatctttctcttctccagagaatgtttctctccctagaacctctgctgagaatgctcttcccatggaattgtatgtccttggcttcttttgatactcaggtgtgagattagatctca

SEQ ID NO: 623162 - DNA, 598 bp, Homo sapiens
ccagactcttgtttccccatccccaaagctgcatcccatcgcaataattgctaccgccattctcctagctgcacaatcaggaagtcatccctaattcttcttttccccatatctccctatccaatctaccagcaatttctcttaactctactgccaacctacatcctccatttgtctatctttctccaaccccactgctactatcctaatcgaagccgccattgtctttcacctggactactgcagtagcccccatctgatagctccacttagaggcttgcacaactcaaatctttcyacacagagcagctagagtgatcttttgaaaatgtaaacggggacatgtcatttccttacttaaagcccttcagtggcttcccatcaaacctcagaataaaatccaaacacctcaccttgacatagccctgcccctgattatgtcttctgcataacataaccccctttactcacacactttatccatctttctcttctccagagaatgtttctctccctagaacctctgctgagaatgctcttcccatggaattgtatgtccttggcttcttttgatactcaggtgtgagattagatctca

SEQ ID NO: 623163 - DNA, 601 bp, Homo sapiens
taaaaataatacaaataagaaaaataagaaaaacaatattctgtaacaactacttatagcatttacattgtattagtattataagtaatctacagatgatttaaagtatatgggttatatgaaaatactatgccaktttatatcagggacttgagcattgcaaactttggtatcacacaggtcctgaaaccaatcccctgaggataccaaagaatgactgtatacagtatgactctatgtttttaaaaaattgtatctatacatgtatagatctatagtatggatataccaaattttattcaaacactgccctgtagatggtcaggatatttgcaatttattgcctctacaagaaatgctgccagagacttccttaatcatgagcctttatgcctgggtgcctttatttctgtagaagagattccctaaggtagaattgctgggtcaaaatgtacatatcattacccctaggaagaggaaaaatgcacagaattaataaagcgttactgaaatttaattaatagaaaaatttaaagcccaatctgtgtttccctgtgcccatgaccagagaatacaagtcatataatttagtgtctccaac

SEQ ID NO: 623164 - DNA, 574 bp, Homo sapiens
  misc_feature 486, 487, 488, 489, 511, 512, 518: n = A,T,C or G
ataacagcagggtatgtttttaatgggttggtagaaaacatacttatccaaatataggcctcgtggtatatttgtcatgcaacttggccttgcagttggagttgaaagctgctgctgtcaaaggaaatatttgggtgactcagccaagaaagcagtttattggttttggcagcagacaayaggtgaatatttcatggaggagagaggttttaatagttgtttatacaatctgcccagccatggccaaggttgtttagattggtgaattgaacaatatttcattcctcatgagcctgctgacttctgttgatgggttgatgatgccactatttgctttacatgattggggtaaatttctcacttcaccaatatagtctccagctcctggaggagcaacatctagggattggggcatctgtgctagacaagctcctttagtcctctgccaatttggcaggagcctacagaaaattcctgctgcacccnnnnaaagatttgtggtttttttttnncccagngactttttttttagtaagtgccatcacaagagcttgcctgtgtgtgtgagtagatt

SEQ ID NO: 623165 - DNA, 574 bp, Homo sapiens
  misc_feature 486, 487, 488, 489, 511, 512, 518: n = A,T,C or G
ataacagcagggtatgtttttaatgggttggtagaaaacatacttatccaaatataggcctcgtggtatatttgtcatgcaacttggccttgcagttggagttgaaagctgctgctgtcaaaggaaatatttgggtgactcagccaagaaagcagtttattggttttggcagcagacaacaggtgaatatttcatggaggagagaggttttaatagttgtttatacaatctgcccagccatggccaaggttgtttagattggtgaattgaacaatatttcattcctcatgagcctgctgacttctgttgatgggttgatgatgccactatttgctttacatgattggggtaaatttctcacttcaccaatatagtctccagctcctggaggagcaacatctagggwttggggcatctgtgctagacaagctcctttagtcctctgccaatttggcaggagcctacagaaaattcctgctgcacccnnnnaaagatttgtggtttttttttnncccagngactttttttttagtaagtgccatcacaagagcttgcctgtgtgtgtgagtagatt

SEQ ID NO: 623166 - DNA, 496 bp, Homo sapiens
agtcacccaagccagagatcagatcccagcactgctttgccctgggtcgtcatgcagggaattggttcagcccatcaaacactggctaggtggtttttaaaactaaaaattttgattaggaggcattttgaggatctattaaagggttgggagctgggaaatgactggagatcagggagaatgtaggtggggaagtgagcatcagggccagcatcagcctttccggtggggagcgtggtgttttgggttgcactgtgtctccagaagagatacggtggaatcctcacccccarcacctcagaatgtgaccttattcagaaataatgtgtttacattgttaagttaagatgcacgttctgcacatgtatcccagaacttaaagtatatttaaaaaaaaaaaaaagaaaaaaaaaaaagatgaggtcgttgggtgggtcctaatccaatataactggtgtcctcatgaaaaggagaaatatggacacagagacagaca

SEQ ID NO: 623167 - DNA, 651 bp, Homo sapiens
ttctgcttttcatttggtatatttagaccatttacatgcacaatagttattgatctattattcgatcaatataatataatgttgaggttatctaccatttcatttttcattttctgattattctgattgtttatcttcatgttttctttttattcacttcctgtgggtgacttgaatatttttagaattccattttgacttatctttagtgttttctgatatatctccttgcatttattttagtgattgcttaggtaaattatatgtacatawcttatcacagtccatttgtgttggcattgtagcagcctgagtgagttagaacacttacctattcttatgcccctttaccctgccccattcttaatacaatgatggttaaatattggctgtacatgtgttgggagctatacagacattattacaagttttgctccagcggtcaaacatacatttggaaattcaagaggagtgaagtctgtggtaaaaaaatatttacccgtatttttgctttttctgacattctttcttcctgttttttttttgcccttcttttatttttttttttctgtttaatgaacttccttcagacattcttttacagtaggtctgctggtgacagactatcttggttttacttcatcagagaat

SEQ ID NO: 623168 - DNA, 602 bp, Homo sapiens
gaccaggcaacgtagtaacagggcaatgaggtagacatgacctgggagaggctacttcagaaagtagcatctgaaggttaagaaggaagccatcacataaggacccaggacaaggctttcacgcctagggcrcctaggggacaatgcagagctcccaggtcggaggggcctgtgctcaccagagggggactggctggggatccagcaggggaaaggtgctcagcctgagactgggaagcaggagtgacaggtgtgtggggaatggcaggcgtgggaagctactgtaggtgccatgagtggtgttctagggccttgaacagggagatggatggaattacttcttggaggatcatgctgctgttatgcagtgaataaagtgagaaagggaaagcaagcagagagagcactgcagaggccatggaggaggggaggtggggaggaagtatcactgtgacacagccatggcagtaagagcagccatgcatggtggagtatgaggtgtgtttggatctgactgtgaactctttgtggacagggagtgatagagatttgagccaattgcttaggttattggattgagcaagtaaaggatggtggtgacc

SEQ ID NO: 623169 - DNA, 602 bp, Homo sapiens
gaccaggcaacgtagtaacagggcaatgaggtagacatgacctgggagaggctacttcagaaagtagcatctgaaggttaagaaggaagccatcacataaggacccaggacaaggctttcacgcctagggcgcctaggggacaatgcagagctcccaggtcggaggggcctgtgctcaccagagggggactggctggggatccagcaggggaaaggtgctcagcctgagactgggaagcaggagtgacaggtgtgtggggaatggcaggcgtgggaagctactgtaggtgccatgagtggtgttctagggccttgaacagggagatggatggaattacttcttggaggatcatgctgctgttatgcagtgaataaagtgagaaagggaaagcaagcagagagagcactgcagaggccatggaggaggggaggtggggaggaagtatcrctgtgacacagccatggcagtaagagcagccatgcatggtggagtatgaggtgtgtttggatctgactgtgaactctttgtggacagggagtgatagagatttgagccaattgcttaggttattggattgagcaagtaaaggatggtggtgacc

SEQ ID NO: 623170 - DNA, 233 bp, Homo sapiens
agagagaaagagagaagatccaaataaataaaatcagagrtgaaaaaacacacattaaaactgacaccacagaaattccaaaaatcatcagtggttactatgataaactgcatgccaactaattgcaaaatctcaaagaaatggacagatatctagacatacaaccgaccaagattgaaccatgaggaaattcaaaacctgaacagactcatagcaagaaacaggataatatt

SEQ ID NO: 623171 - DNA, 591 bp, Homo sapiens
aagtatataattccattttttaaatatattctgaatttttataaccattaccacaatcaattgtaatattttaataagctgaaaaaaaacccatactcattagcagtcactcctcatttccccatccccaatttccatgtaagccctcaacaaccgctaatctactttctgtttctgtagatttacctatactatatattttaaatgaatggtattatacagtatgttgtccttgtaacctgatgcttccacttagcatgttttcaagaatcatttatgttgtagcacatatcagtacttcattttttattgtcaaatacaattacattttgtagatacatattttgtttatccattaatcagttgagttgtttttaccttttttcttttattaataatactgctattaacatacaaatatacttttttgtatggctggatgtttttatttatcttgtaataaaattgctggtttatatatgttcaattttttctaaccatttaaaaggataagtgctctgtagmactatagggtgactatagctaacaagaatttattgtatatttcaaattaactataagaatggaatt

SEQ ID NO: 623172 - DNA, 577 bp, Homo sapiens
ttttagaggttatctaagtaattctgaacagaatgctggtacagattatttaggtgattgtgaagagaatgctagtaaaaacatgaacagaaaagtgtcatactaaggagatattacctgaaaatcaggaatgtcttattggaaactggaggaaaagtcatccctgttagaaagtggcagcgaacatagctgaattgtgtttatgtactaatgctttgttgaaagcrgaattaaagagtgattaagtaggatatccggcaggagaaatatatgtgtaagcaaagcatttagagtgctacatggtttctcttaactgcttatagtaaagtatgaggagagataaagaaattaaagatgaagcttataattaaatggtaacagaacggaaatatttgaacaattttctgcttggttaagttatgaagaataaaatgtgatgtttgggagagaaaatcaaggctgtggccttttattaaagagattaatgaccaggtgcggtggctcacgcctgtaatctctgcactttgggaggctgagatgggtggattacgaggtcaggagttcaagaccaacctga

SEQ ID NO: 623173 - DNA, 577 bp, Homo sapiens
ttttagaggttatctaagtaattctgaacagaatgctggtacagattatttaggtgattgtgaagagaatgctagtaaaaacatgaacagaaaagtgtcatactaaggagatattacctgaaaatcaggaatgtcttattggaaactggaggaaaagtcatccctgttagaaagtggcagcgaacatagctgaattgtgtttatgtactaatgctttgttgaaagcagaattaaagagtgattaagtaggatatccggcaggagaaatatatgtgtaagcaaagcatttagagtgctacatgktttctcttaactgcttatagtaaagtatgaggagagataaagaaattaaagatgaagcttataattaaatggtaacagaacggaaatatttgaacaattttctgcttggttaagttatgaagaataaaatgtgatgtttgggagagaaaatcaaggctgtggccttttattaaagagattaatgaccaggtgcggtggctcacgcctgtaatctctgcactttgggaggctgagatgggtggattacgaggtcaggagttcaagaccaacctga

SEQ ID NO: 623174 - DNA, 577 bp, Homo sapiens
ttttagaggttatctaagtaattctgaacagaatgctggtacagattatttaggtgattgtgaagagaatgctagtaaaaacatgaacagaaaagtgtcatactaaggagatattacctgaaaatcaggaatgtcttattggaaactggaggaaaagtcatccctgttagaaagtggcagcgaacatagctgaattgtgtttatgtactaatgctttgttgaaagcagaattaaagagtgattaagtaggatatccggcaggagaaatatatgtgtaagcaaagcatttagagtgctacatggtttctcttaactgcttatagtaaagtatgaggagagataaagaaattaaagatgaagcttataattaaatggtaacagaackgaaatatttgaacaattttctgcttggttaagttatgaagaataaaatgtgatgtttgggagagaaaatcaaggctgtggccttttattaaagagattaatgaccaggtgcggtggctcacgcctgtaatctctgcactttgggaggctgagatgggtggattacgaggtcaggagttcaagaccaacctga

SEQ ID NO: 623175 - DNA, 588 bp, Homo sapiens
ttgtggccgggcgtggtggctcacacctgtaatcccagcactttgggaggccgaggtgggcagatcacgaggtcaggagatcaagaccatcctggctagcacggtgaaaccccgtctctactaaaaatacgaaaaaattagctgggcgtggtggcgtgcccctgtagtcccagctgctggaaaggctgaggcaggagaatggcgtgaacacgggaggtggagcttgcagtgagctaagaccgcgccactgcactccagcctgggtggcagagcaagactccgtctcaaaacaaacaaacaacaacaacaacaacaaaaaacaaaaccccacataatttcgtatactttcttctctttcaaatgtacacaatcccttttggtcactaaatagaagttttatcagatttattatccaggaatgtgtttctcaggaacctgggagacatttctttgaaatataaacatcaaagatartattatccttatctcctaatttttgtgggacggtagaaacctaacttaggcagaaaccttgttccaagttgtataactaccttttgttataaagatatgagaagtttgtttctc

SEQ ID NO: 623176 - DNA, 584 bp, Homo sapiens
ttagccttgaaaatgagttgaaacatacttactcctcctctacttcttttcttatattgttttcctagtttcaatggagagatgtaaaacattgattttaaacattttttataatataaaatattaaaactgtaagttattctctatgaacttttaagcagtattctatcattttcataattatcttattgttcagttgcttctttttaaataggttttcattgtgatctcttttggamcactggttctttaaaaggagctgtttaattttcaaatatttatatattgtctagataattttattattgatttcaaattcaattgctgggtgattaaataatatgtcctagcaattatagaagaaattaacagatcattctattttgaaaatctattttgaaaatatcaagtttaatagtgtttcatgaacttaaaatctttcctcttcgagagcatttggaataatgcagttcataatcattgttgggtatcaacatttcttctgtagtatataaatgtactttgactggatctgaatttagagattcagatatgatggggcaagtaattttggtgcatgtact

SEQ ID NO: 623177 - DNA, 456 bp, Homo sapiens
ctctagaatacaccaaaagcagtgctaagaggaaagtttatagtactaaatgccatggcataaaatttcataaatatttatatttgctgtacattttaattatatatctagcatttttttctgtttaaatgtagacaatgctaaaacttgcctattgatttagatattctcaagaaggtgacatttgttaccatcagctgttaaaayattaattattttatgatattgcattgtttttgttaattctgaataaaccagtatgtcctaaaaaaaaaaaaaaagtcttaaagagggtcagacgtggtggctcacacctgcaatcccagcacaatggagggtcaaagcgagtggattgcttgaggcaaggaatttgagaccagcctgggcaacatgacaaaatcttgtctctacaggaaaaaaaaaaaaacaaaagaaaccctagccaggcaaggtggc

SEQ ID NO: 623178 - DNA, 565 bp, Homo sapiens
ttgtcatttggccttataaatgaaaagggacttgaaaaaaacaaaacaaaacaaaacaaaacactgaacccactggctaattgaactggaattgaaaccccttgcatttcatttacaattccttgtgcttaaaagaagtgaaaatgattgagaccatcctggccaacatggtgaaaccctgtctctaataaaaatacaaaaattasctgggcgtggtggtgtgcacttgtaatcccagctacttgggaagctgaggcaggataatcgcttgaacctggtaggcggaggttgcagtgggccgagatcgtgccactgtactccagactggcaacagagcgaggagactctgtctcaaaaaaaaaaaaaaaaaaaaagaaaagaaaaaagtgaaaatggttgtagcaaggaattaaaatagaggctctatgggcaaagcattcactgtgttgactgtaataacagtgccaacttgtggagcactgactatgtcccatgacttgttctaattgctttatgcgtaacccaattaatccacattgcgtcctaatgaagtaggtaggattac

SEQ ID NO: 623179 - DNA, 565 bp, Homo sapiens
ttgtcatttggccttataaatgaaaagggacttgaaaaaaacaaaacaaaacaaaacaaaacactgaacccactggctaattgaactggaattgaaaccccttgcatttcatttacaattccttgtgcttaaaagaagtgaaaatgattgagaccatcctggccaacatggtgaaaccctgtctctaataaaaatacaaaaattagctgggygtggtggtgtgcacttgtaatcccagctacttgggaagctgaggcaggataatcgcttgaacctggtaggcggaggttgcagtgggccgagatcgtgccactgtactccagactggcaacagagcgaggagactctgtctcaaaaaaaaaaaaaaaaaaaaagaaaagaaaaaagtgaaaatggttgtagcaaggaattaaaatagaggctctatgggcaaagcattcactgtgttgactgtaataacagtgccaacttgtggagcactgactatgtcccatgacttgttctaattgctttatgcgtaacccaattaatccacattgcgtcctaatgaagtaggtaggattac

SEQ ID NO: 623180 - DNA, 565 bp, Homo sapiens
ttgtcatttggccttataaatgaaaagggacttgaaaaaaacaaaacaaaacaaaacaaaacactgaacccactggctaattgaactggaattgaaaccccttgcatttcatttacaattccttgtgcttaaaagaagtgaaaatgattgagaccatcctggccaacatggtgaaaccctgtctctaataaaaatacaaaaattagctgggcgtggtrgtgtgcacttgtaatcccagctacttgggaagctgaggcaggataatcgcttgaacctggtaggcggaggttgcagtgggccgagatcgtgccactgtactccagactggcaacagagcgaggagactctgtctcaaaaaaaaaaaaaaaaaaaaagaaaagaaaaaagtgaaaatggttgtagcaaggaattaaaatagaggctctatgggcaaagcattcactgtgttgactgtaataacagtgccaacttgtggagcactgactatgtcccatgacttgttctaattgctttatgcgtaacccaattaatccacattgcgtcctaatgaagtaggtaggattac

SEQ ID NO: 623181 - DNA, 631 bp, Homo sapiens
aaggtatggtttttaccagtaacaaaaatgtgagatattagtggaagaacagatttggtggagttggaaatactgggtgattagtgatggggcatggtaggaagagcaaactgagcttagttttgtatttgttggggttgacagtccggtaaaacactcagagaaggtatttaatgtggaagtatttaggcaatatcctgtgtgtgctttttaaaaatcgttgtgtagagcccagtagattttctttagttctcagtgtatatttcttaaatgaatgaacaactatgaatgagggaataaataagtgaaggattgcactgagataggcaaagagcagagaggggttttttaatttaattttatttatttatttatttatttttacatctatttcattctctagatggctcaggagcacctcagggacagcaaggccctatgacagctccttagcagtrtaccctgtattataactgttatcaagtagccataagcctcatttcatttatttgagacatgcaaagggctagcaaaaatgagattttcactgatgaacttcagttgtcaatatatgtacaagatcatgctaagagaggcaaaaaaaggattctttgtaagctgcccctgatgt

SEQ ID NO: 623182 - DNA, 620 bp, Homo sapiens
tccggtaaaacactcagagaaggtatttaatgtggaagtatttaggcaatatcctgtgtgtgctttttaaaaatcgttgtgtagagcccagtagattttctttagttctcagtgtatatttcttaaatgaatgaacaactatgaatgagggaataaataagtgaaggattgcactgagataggcaaagagcagagaggggttttttaatttaattttatttatttatttatttatttttacatctatttcattctctagatggctcaggagcacctcagggacagcaaggccctatgacagctccttagcagtataccctgtattataactgttatcaagtagccataagcctcatttcatttatttgagacatgcaaagggctagcaaaaatgagattttcactgatgaacttcagttgtcaatatatgtacaagatcatgctaagagaggcaaaaaaaggattctttgtaagctgcccctgatgttccatgagcttagaaatctgcccttactttgcatcttcttcacttcttcccagtcttttaaaatttcatttactttctttggcyattattttgtccttctctctttgctttcctgtttattaactttacttag

SEQ ID NO: 623183 - DNA, 568 bp, Homo sapiens
gatctcctgaccttgtgatccaccagcctcggcctcccaaagtgttgggattacaggcatgagccattgcacacagccaagaatggagaatctttcccagtcccaattttaggggaaaaagatttaatatttcactactgagtatgagtctgttgactttttatatgkaacccaaatcagattgaagaagtttctttctcttctgagattgcaaaaagtttttgtcaaaggtaagtgttaaactttgccatatacgtttcctgcatctatgaaaataatcagagtgggagtggccaagatggccacctagaagcagcttaggtgtatggctctcaaagagagaaacagaaggggtgaaatctagagaaccccagtaagatactccatgagaacatcatccacaagacatataatcatcacgttctccaaggtcaaaatcaaggaaaaaaatgttaaaggcagctagagagaaaggccaggtcacctacgaaagaaagcccatcagactaacagtgaacctctcagctgaaactctgcaagccagaagggattggggaccaatgttcaa

SEQ ID NO: 623184 - DNA, 577 bp, Homo sapiens
ggtgactcagcacacaaggaccattttccacacccctatgattgtatccccaaccaatcagcagcacttacccctaatccactgctcaccgaactatccatgaaaaaccctgacctctgagccttcagggagactaatttgtaataactgtaattcttccatgtggccagcctcctgttaaactctttcttaactgcaataccatggtctcagtgaactggttttgtctgtgcasagggcaggaagaacccactgggcaattacattcctgcttctgttttctcaaattccttcagcctaaaaaatgatggggtagcatatcctgaatgtcataacacctaagttttaggggatgatatagatctaaggtatcaaggatgtggggccatgcaggagtttggtcttcagtgcaccaatgtagccacactagcatctttctacactggcatgcatccacactagctgagactggggtgccttcttttacattcggtcctctgtgcattcttttctactatacagccttttaagttatgactcattctcaagtattttcaggccacttttgatcatgggg

SEQ ID NO: 623185 - DNA, 580 bp, Homo sapiens
atatattacctgtactctagtgctttgaaaaactgataatccacatatatagtaatcctggcctttcaactttattgccatctcctaatttcatggcctgatgagtaactcttctttgatgtcccaatatttcttcaggtgtaattatactatagtttgcatgtatatatataaatatgtagatataataaacatattatgaataattacacataatacagatatatcacctatttatattgcagctacatcctgggtgttagtgtattctacgaatgtcacatatatagtatattgactcatttaactgtagcaattaactgatatttaaatggcatgattgtaaaaatgaggcagaaggctttgtgacttgccaaagatcacatgtctartaaagtcatagaggcaagactgaaactggattccaccagcattcaaagctctattctttccaagatataacatatctcactatacctaccacccttctaatttctacaccagatactttcagaataagcatcaatttttccttctttatttacatattcagtttgtaaccaagttatcatcttttttt

SEQ ID NO: 623186 - DNA, 522 bp, Homo sapiens
ctattttttaaatggggttgcttttygcttgttaatttaaacttcttatagattctggatattagacctttgtcagatgcataatttgcatatattttctcccattctgtaggttatctgttcactctgttgatagttttttttttgtttttattttttgctgtgcagaagctatttagtttaattgggtcccacttgtgaattttttgtttttgttacaattgcttttgatgacttataagttctttcccaaggcccatgttcacaatttgtgtaggattcttacagtttgaggtctgacatttaaatctttaaaccatcttgagttaatttttgcatatggtatatgtatgtgtaaattttgtgtgtggtaaaaagtaggggtccagtttcattcttttgcatatgggcagccagctatctcagcaccatttattgaatactcctttccccattgcttttttaaaatcaactttgtcaaagattagatggctgtaggtgtgtgcctttatttctgggttc

SEQ ID NO: 623187 - DNA, 537 bp, Homo sapiens
ttatctaaacaatcattgctttgcagaagtgtgggattgtaacaatgacctttcaaactgaaattgcacaaagcaatgttaattatccatgggaaaaattagtattctttcatgacctttaaaatttttgtcaaaacattaaaaaaaattatttcagtcttaaatgtgtaaggtaattaaaaatctgtaaaggtacttatttagcatattattttttaaaacagaaatattgagaattaaagtgttttatttatttgtaaaagcttatcaagggtagttggaaccatggttgccttctttctrtataacttaatgatatagagctaacatcttttctatgccttggtgaattgtcataatcctctttaagtttagatcagcttccaacgttttatcctttgtgcatgcaatgtcacaaattttccccaagagtttttttaatgtgaatttttttctgacatctcttcctctgggacatctttcttttcatcacagtcactttcctcatttatgttggtaagttctctttcactaagt

SEQ ID NO: 623188 - DNA, 312 bp, Homo sapiens
ggtagttggaaccatggttgccttctttctatataacttaatgatatrgagctaacatcttttctatgccttggtgaattgtcataatcctctttaagtttagatcagcttccaacgttttatcctttgtgcatgcaatgtcacaaattttccccaagagtttttttaatgtgaatttttttctgacatctcttcctctgggacatctttcttttcatcacagtcactttcctcatttatgttggtaagttctctttcactaagtgtttatggatacatgtctagagtctctggaatggtgaaaagatccac

SEQ ID NO: 623189 - DNA, 588 bp, Homo sapiens
ttgttggccaattctctcttttggttatctattttgtaaaatgtcatgtgggattatcaatggaagacaatggggagacataattacatgcttttctgtctgtgcatgcagtgaataacataaggacaacaaccaatcaccaaaagactttgaaagatgcccataaattcttaacgtagtgatttgttgactgaagagctagctgtgacgtttgaccttcaagtattactcccagttaatacattgtagtcattgaaatttgaatcatactgttggagactgatgttgtttaaataaatcatggtaagttcaatttgtatatgttagaatcatgcaaacaaagactgcctctgtgtgtgtgtgtgtcttctcttgttgaaatctttctcrggcccttaggttatttcccattttctgctatcattgctactgctacataccgtataaaatgaagcccccaaatccttttatttactctcctgcaatgtgtctgtgacatatacaggggcaggtttgaggaaagtaagcaccagcattgagtgacgttcgtaaaacacttacctttggaaatagaatattgcattaaat

SEQ ID NO: 623190 - DNA, 553 bp, Homo sapiens
tccaaccagatatagccactattaacatctggcatttttggaattttataaacagatatacatataactaaagatatttaattaactaacaagctatatacatagctatgaagatagaagtcacattatatataaattttgtatctttttaaaattaacatattataattctttccctgtcactaaaattctttgcaatatcattcttargagaggcatgctattcaaccataatgccataccattatttaatcctccccctattgttgagcatttttatgatttttaagtatttattataaataatgtgaggacaattatatgcatgtcaatctttgttagtatttctgatttttttcataggatatgttgctagaaatgcaacactattaaaatttaccagtaatagatgatcgtataagctaataaaagcttaagtaaagttcttctttcaaatgactgtgtgccaagtgcacttgaaaagcaagaacggaatgcatataaaatgtctttttccatgcataagcagctaacaggaatagcagccatttaa

SEQ ID NO: 623191 - DNA, 623 bp, Homo sapiens
ttgtagaaaccaaataatcagagacgtaatcagttggtttttaaatttttaacttgttgtttggttgccctagacaaacgcctcaatttccttcttctgtaaataaattaatacctggtgagatgtaaaagcccacttgaacggaaaacaacatgtttgatgaaaytctgagagaagatacaacccaaggtatgaaaaattcagaacaaattatactatcttcaaggcagaatttggttaccctgattaattagggtttttttttcttcagataaaaagagaggggagagtggagtaaagaactgcctaacctaatgtaagttttcagctttcaataaatatttccagcttaaaccctctgaatagattgtgagtatgtttgttcatctgaattgaattttggtggtataatgtacaaagactttttcttatcgcagtttagttcaaacctggggtgggcaaacttttttttttttttttttttgtaaagagcaagatactaaatgacttaggcttaggctttgcagatcaaaagcaaaattgaggatattgtgtagggacttcgtatgacaagaaaggtaactcttgccccttcaccatcctctttgtccgatgggcccttc

SEQ ID NO: 623192 - DNA, 605 bp, Homo sapiens
aattaacaagtgttgatgtagatgtggaaatattggaatgcttgttcattgttagtatgaatgtaaaatggtacaaccactatggaaaacatatggtagttcttcaaaaawttagaagtagaactaccgcatgatccaggtattccacttctgggtatacacacaaaagaattaaaagcagggggaagccgaggcaggcggatcacaaggtcaggagatcgagaccatcctggctaacacggtgaaaccccatctctactaaaaatacaaaaaattagccgggcgtggtggcgggtgcctgtagtcccagctactcgggaggctgaggcaggagaatggtgtgaacccaggaggcagagcttgcagtgagccgagatcgctccaggtgaagcgagactccgccccaaccccccccccaaaaaagaattaaaagcagagtctcagaaaggtgtttgtacactcatgttcatagcagcgttattcccaataggcaagaggtggaagcaacctaagtgtccatccatggataaatgaaacatggtacgtttcattgtacaatgaatgtacaatggaaaattatttagccttaaaaaggagggcaatac

SEQ ID NO: 623193 - DNA, 563 bp, Homo sapiens
gaataatagtctccaattgcatccagtttgctgcaaatgccaccattttgttccttttcatggctgagtagtagtccatggtatgtgtgtgtatatatacacacacacacatatatatataacatatagacayatatatatataacatttctttatctactcattgatgaatgggcatttaggctggttccatatttttgcaattgcaaattgtgctgctgtaaacatgtgtgtgcaaatatctttttcgtataatgacttcttttcctctgggtggatacctagtaatgggattgctggatcaaacggtagatctacttttagttctttatggaatctccatgctgttttccatagtggttgtactagtttacattcccaccaacagtgtaaaagtgttcccttttcaccacatccataccaacatctactatttttgattttttgattatggccattcttgaaggagtgaagtggtattgcactgtggttttgatttgcatttccctgattattagtttgatcatttttccatctgcttgttggtcatttgtatatcttct

SEQ ID NO: 623194 - DNA, 563 bp, Homo sapiens
gaataatagtctccaattgcatccagtttgctgcaaatgccaccattttgttccttttcatggctgagtagtagtccatggtatgtgtgtgtatatatacacacacacacatatatatataacatatagacacatatatatataacatttctttatctactcattgatgaatgggcatttaggctggttccatatttttgcaattgcaaattgtgctgctgtaaacatgtgtgtgcaaatatctttttcgtataatgacttcttttcctctgggtggatacctagtaatgggattgctggatcaaacggtagatctacttttagttctttatggaatctccatgctgttttccatagtggttgtactagtttacattyccaccaacagtgtaaaagtgttcccttttcaccacatccataccaacatctactatttttgattttttgattatggccattcttgaaggagtgaagtggtattgcactgtggttttgatttgcatttccctgattattagtttgatcatttttccatctgcttgttggtcatttgtatatcttct

SEQ ID NO: 623195 - DNA, 568 bp, Homo sapiens
ccttatgtgttaggtgaatctcctgaagacagaaggaacttggttggttgattcttatctattctgtattttttaagtgaagcatttaggccatttactttcaatgtgagtattgaaatgtgaggtactattctaytcattgtactatttgttgcctgaataccttggctttttttcattgtgttattgttatataggtcctgtgagatttacgctttaaggaggttctattttggtgtactttgagggttttcttttgggttattatgtgttcataattatcacttattgaggatatactgcatgttaggtttgctttagtttctttgcatattttctgcaatacctacagcattactacatggtagcatccttattatcatttataaaatcaaggtcctgaggcttttaaagttaagtaactggattacacaactaataaaactgagagttgaacctcaatttgttgaaatccaaaatgtgcttcactaagtcatgctctcctctattgctcaacaatcaatggacacatgagcaacttggtttctcaatctttaatttggccttg

SEQ ID NO: 623196 - DNA, 568 bp, Homo sapiens
ccttatgtgttaggtgaatctcctgaagacagaaggaacttggttggttgattcttatctattctgtattttttaagtgaagcatttaggccatttactttcaatgtgagtattgaaatgtgaggtactattctactcattgtactatttgttgcctgaataccttggctttttttcattgtgttattgttatataggtcctgtgagatttacgctttaaggaggttctattttggtgtactttgaggrttttcttttgggttattatgtgttcataattatcacttattgaggatatactgcatgttaggtttgctttagtttctttgcatattttctgcaatacctacagcattactacatggtagcatccttattatcatttataaaatcaaggtcctgaggcttttaaagttaagtaactggattacacaactaataaaactgagagttgaacctcaatttgttgaaatccaaaatgtgcttcactaagtcatgctctcctctattgctcaacaatcaatggacacatgagcaacttggtttctcaatctttaatttggccttg

SEQ ID NO: 623197 - DNA, 568 bp, Homo sapiens
ccttatgtgttaggtgaatctcctgaagacagaaggaacttggttggttgattcttatctattctgtattttttaagtgaagcatttaggccatttactttcaatgtgagtattgaaatgtgaggtactattctactcattgtactatttgttgcctgaataccttggctttttttcattgtgttattgttatataggtcctgtgagatttacgctttaaggaggttctattttggtgtactttgagggttttcttttgggttattatgtgttcataattatcacttattgaggatatactgcatgttaggtttgctttagtttctttgcatattttctgcaatacctacagcattactacatggtagcatccttattatcatttataaaatcaaggtcctgaggcttttaaagttaagtaactggattacacaactaataaaactgagagttgaacctcaatttgttgaaatccaaaatgtgcttcactaagtcatgctctcctctattgctcaacaatcaatggacacatgagcaacttrgtttctcaatctttaatttggccttg

SEQ ID NO: 623198 - DNA, 521 bp, Homo sapiens
ttattcactatgaggagaacagtatgggggaactgcctccatgattcaattttctcccaccaggtccctctcacaacacatgggaattatggtrgtaaaattcaagatgatatttgggtggggacacagagccaaaccatatcactatgcaaaatcatttattctttcaaatatgcttttaatatcatacatcaacttagagcaagaaaacctaccatatagctagaataattattgggaaaaaatattgaaagacattgttttattctaccaatctaaacttgtgtttctcaccactgggagtatattagaatcccctatgggacttaaaaaaattatagatgccttaactccagattgcttatgtcccctcccaaaagatcaagctgcctttcaagctttttccatgtagcaatattgtagcaatattgtgaggttaattctgaggcttttatagaaatgtggctaactaatgaataccttgagtatctccattgtacagtaaaaaatattactgtagc

SEQ ID NO: 623199 - DNA, 570 bp, Homo sapiens
gcaaaatcatttattctttcaaatatgcttttaatatcatacatcaacttagagcaagaaaacctaccatatagctagaataattattgggaaaaaatattgaaagacattgttttattctaccaatctaaacttgtgtttctcaccactgggagtatattagaatcccctatgggacttaaaaaaattatagatgccttaactccagattgcttatgtcccctcccaaaagatcaagctgcctttcaagctttttccatgtagcaatattgtagcaatattgtgaggttaattctgaggcttttatagaaatgtggctaactaatgaataccttgagtatytccattgtacagtaaaaaatattactgtagccatgaaatgtgttcatattccaatcagagtttgccctttccactggggccgagtctaagaattccagctggtaaatggataagtagaataaacatccatgtaaataataaggagattgcaattaggatctgcttttaacttaaacctttctgtgatcatctatctgattaaaccattcatcttttttaaaaaaataa

SEQ ID NO: 623200 - DNA, 560 bp, Homo sapiens
ggtggaccatatctatgttcagacagagaaaggaaaagatgtgtattagtcagttttcagactrctattaaaaaaatactcaagactgggtaatttataaaggaaagagatttaattgactccattccacatagctggagaggcctcaggtacttacaatcatggtggaagggggaagcaaacacatccttcttcacaaggtggcaggagagagaagtgcagagcaaagggggaagagccccttataaaaccatcagatctcatgagaactcactatcatgagaacagcatgagggaaccgcccccatgatccaatcacctcccacgaggtcccttctccaacacgtggggattacaatttggattacaattcaaggtgagatttggtggtgaggggtggtacacagagccagaccatatcaagacatttagcacagaaaacaacaccagaaaaacttaacttgatgctgattagtctctgaagaaaaaagtaaatctcacctaagttcagtcttaatgcttttagaattattaattataattgagctcttctcatctct

SEQ ID NO: 623201 - DNA, 560 bp, Homo sapiens
ggtggaccatatctatgttcagacagagaaaggaaaagatgtgtattagtcagttttcagactactattaaaaaaatactcaagactgggtaatttataaaggaaagagatttaattgactccrttccacatagctggagaggcctcaggtacttacaatcatggtggaagggggaagcaaacacatccttcttcacaaggtggcaggagagagaagtgcagagcaaagggggaagagccccttataaaaccatcagatctcatgagaactcactatcatgagaacagcatgagggaaccgcccccatgatccaatcacctcccacgaggtcccttctccaacacgtggggattacaatttggattacaattcaaggtgagatttggtggtgaggggtggtacacagagccagaccatatcaagacatttagcacagaaaacaacaccagaaaaacttaacttgatgctgattagtctctgaagaaaaaagtaaatctcacctaagttcagtcttaatgcttttagaattattaattataattgagctcttctcatctct

SEQ ID NO: 623202 - DNA, 560 bp, Homo sapiens
ggtggaccatatctatgttcagacagagaaaggaaaagatgtgtattagtcagttttcagactactattaaaaaaatactcaagactgggtaatttataaaggaaagagatttaattgactccattccacatagctggagaggcctcaggtacttacaatcatggtggaagggggaagcaaacacatccttcttcacaaggtggcaggagagagaagtgcagagcaaagggggaagagccccttataaaaccatcagatctcatgagaactcactatcaygagaacagcatgagggaaccgcccccatgatccaatcacctcccacgaggtcccttctccaacacgtggggattacaatttggattacaattcaaggtgagatttggtggtgaggggtggtacacagagccagaccatatcaagacatttagcacagaaaacaacaccagaaaaacttaacttgatgctgattagtctctgaagaaaaaagtaaatctcacctaagttcagtcttaatgcttttagaattattaattataattgagctcttctcatctct

SEQ ID NO: 623203 - DNA, 607 bp, Homo sapiens
gatcagacctcattaaggatgatacaatttcttttatccatcaatcattgcccaggctaaattcttgctcacttaagtcttaaattctacttatttacaaagatcactagctacgttatttttctaccctaaaatcagctccttaatattgtttttctaattttaggggcaaaaaagtataccaaggtttattaaaagttgatggcagcttgaaaactagtgctgacctgacagtggtagccttggcagacatattttcaaaatttttttctcagagatatttttaatgaggctttaaaaataagggtatttaaaacaaataagaatattaaatactttagatagcaaaaaaatttgtttgtcctctggtatcttttctataaaaaagtaaaatgagtaaatggttgttgatatagtttggatatttgtccctgcccaaatcttgtgttgaaatgtatcccccrtattggagatggggcctgatgggaggtgtttgggccataaggccagatccctcgtggcttggtgctgtcctcatcatggtgaatttttgtgagatctggttgtttgaatgtgtgccacacacttgaacaattcccccactctc

SEQ ID NO: 623204 - DNA, 588 bp, Homo sapiens
tgcaatgcccagtataggtgtagagtcagattttttcaacatctacacacattcataaaacctaatgaaaagtcttttatgggctttacgaatttttatttgcactactgcctaccattctaggccagaggtgggggggattattccttgccagccaaaggcagtccactagctgtttgaattcttagctcatgcgcagcccatgaggtaagaattgtaattacatttttyaatggttacatttttaaatacttatataagtacttacatactacccttgattttgtctcttgcctagcaaagcctaaaatatttactatctgttttttttttaagtaaaagtttgctaatgtctgatctagattctggaaacaaagtaattatttggtattttttcctctgcaagacttgtgttccaggttagaagaaatggttttagaaacagcaatcccagaactttgggaggccgaggcgggaggatcatgaggtcaggagatcgagaccatcctggctaacatgtgaaaccccgcctctactaaaaatacaaaaaattacccaggcgtggtggtgggcacctgcagtcccagc

SEQ ID NO: 623205 - DNA, 551 bp, Homo sapiens
aaaacctctgggataccacaaaggtggtrctgagaggaaagtctgaaagagcacaaataggcaatctaaggtcataccttaaggaacaagagaagcaagaacaaaccaaacccaaacccagcagaagaaaataaataataaagatcagagcagaactaaataaaattgaaacaaaaaaaataccaaaggcaaatgaaacaaaaatctggttcttggaaaagataaataaaattgatagaccattagcaagattaaccaagaaaagaagagagaagatccaaataaatgtaattagaaatgaaatgggagctattataactgatgccacagaaatacaaaagatgattcaagactactatgaacacctttatgcacataaactagaaaacctagaggagatggataaattcctggaaatatacaactctcctgtattaaaccaggaagaaatagaaactctgaacagacctataacaagcagcaatactgaaatggtaattttaaaaattgccaacaaaaaaaaagttcaggaccaggcagattcacagctg

SEQ ID NO: 623206 - DNA, 613 bp, Homo sapiens
ttgtatttttgatagagacagggttttgccatgttggccaggctggtcttgaacccttgacctcaggtgatccacccaccttggcctcccaaagtgctgggatggcgggcgggagccaccatgctcagcctaaaaaaaatttttttaacacacagttgtgtttgtgaataaatttggttaaagggtaggctgccagcctactgcctctagactaaaccatatttgccttagtctctacctacagcccttttctgaaaacacttctagtcccatgagccttgccatagtcagtgttcaagtcatctctttcacttttaaaaatctcatctagagacaaacagaataaagctgacatggccgacccaaaactaaacccacttggtagaagcttagmttaatactagtacagagttatttatctagaagtgctcaataaactagcaagtgtaagagattcaaactaggatttacaaggcaaatgactgaaagcatatactctattatcacaggatcaccagatagtgcaaaagattaatacagtttcttttcaacttaggtagccagatagtatacttgaataggagggaaagcaaaacagctaagcagagtgaat

SEQ ID NO: 623207 - DNA, 606 bp, Homo sapiens
aaaggatcctcctgcctcggactcctgagtagctgggactacaggcaagtgccaccattcccggccaatttttaaatttttatgtagagatgtggtctccttatattgcccaggctggtctcaaactcccgggctcaagcgatcctcctacctaggcctcccaaagtcctgggattacaagcatgagccaccatgtactcctaatatcctggtcttatgaggcaaaattatagttaaaatcacaactcatttgtaaaactaagggaaaagaaactctccaaaatggttaaattatttaaacaaaggagaattgattatgagacagcaaaatgcagcaggctatacaacttaagattctacaagctttagttgtaattaattgtgccagtgatttgtgactgaatgagatatatcacttatttttwgttatcactacaatgaaagtgtcagtattaaccttagataacaaattgtatactcaagcacagcctgagataatatgaaatatgcaaaatattaagtggacagtaagtacttttcaaaagtatatgagattccaacaatttagagatcagagactgctctcatctcagagtggtaacagtg

SEQ ID NO: 623208 - DNA, 640 bp, Homo sapiens
ctgctggcttctcaaactccgctgctctttggttcagggctcctggaacagacgagccccccgctcccccgtctcttcaaaatggatgaatcaaaccagccgaaaatgcgccaaagccgccgtgcaaccaaacccactagggtttgtgcgctcctccccaacacgcctgctcattggagacttctgccagatgcgcccagatcattagtccgtttgaatcatcacgtcttccaggccccgccctgctctctgataggctccaccttcaccgtgggggtcctgttagtcaagatgctctgagagcgcacrgccgcaaaacaaaaatggtcgctgcttagcccgccccctggtttccactccagagttgcagattcgtctggggtcgtatcttagaaagactagaaaaaaagatttatgtagggttcagcgttgctcagtgttagtttaatggtgtttcatctcgtctgccttgatcaccttgaaaatcctctaatagcaaaacccgtgggagaggcagcagattcgtcactgcggggctgctacagaattggagggaaattccttaggttcaaaaaatttgaccttaaacctacaagccccttaccctggcttcggcattaaccctcagggacctaatgag

SEQ ID NO: 623209 - DNA, 640 bp, Homo sapiens
ttttttccattttttcttcttttcctgttttcttttggattgagagttttgtttttgttgttgcttatagtttttgtttttgttctgttttaggatatatttttcttccatattggtttattagttttagttgttactttttaaattgtttctctaggttttacaatatgtacttttaagttatcctagtctacttcaaataatattacataatttaatgtataaagtaagaaccttacaacgtttcccctaagacattttgttattcttttcatacattttacttgtatacatattttccatttcacaatatattgctgtttttacttctttaaacaactatttttattcattttttaataatgagaaaacatttaatattttccagcactctttattttcctgtatagatagagttctaataggtacgawgttccttcaacctgagtacaatttcttatattgcaggactttcagtgattaattctctcagcttgtgtttgtctgaaaaaactgtctagattgataggtgttttttccttcaacattgtttttgatgcagaatcagtgtttatctttcttttcctgtatgcagtgtttcattttgcttctccaatatgtaatgtgacttttttccctc

SEQ ID NO: 623210 - DNA, 536 bp, Homo sapiens
actggggcattctcattctcattattccccaaatcctcatattccagtactagctcttggtcattaaatcattcatgagggcctctgtcagatgtatttagtggttaaggatgtaatcctgtagacactaaagatctatggagtcactgatgcttaaaatgtaattgtattgattcaacggcaagattcatcacacattttacaaatatggaagatactcaacacacacacacacacacatgcacacacacacacatagcataactttatcagatggatctgggcttgttgaaaattttgacttctatgcagttggtagtgccctagaaagtccaagctatacacttaaattataatgcccacaagtcttargaactatttttgtcatttcagtatagtgcctttctcaataatatctattttgctgaaagcaaaatatgtcagaaaaccaacaaataattataattcttttttaaaaacttttattttaagttcagggatacatgtgtaagtttgttacacaggtaaacttgtgt

SEQ ID NO: 623211 - DNA, 614 bp, Homo sapiens
tatgtgagatgatcttagttgatacattagtgaacattattttatgtatttttaagcatgtgctttaaaattatataattagtacatgccaaaattcatgattttccatttagagatgcacaagagtggttgatacaaagtaatagtacttacagtacacgggtatgggtacggcagaaaccacagaagtggtacacaaaagatcaaagcttaggaaacactgttgggcctttgattatgagaagctctgcagttgataacaagtttattttaaatggttgttgtctgaaattaaaacttttatatacatattttattctagatgattttttcccctctgtcactgtgctggtccggggaatgtctggaagacttgcttgggcacaacagctttgtcttttacccagaggagcraaagcaaatcagaaggtattcatcagaagttacagggaagtgtgtgtgtgttttgtaatttaaaggttaggtaacattccaacagaagacacagatcaaataaatatttttgatccctagccagattctcagtcagtgggttcatatcagaatcatctaggaacctagaattccagatgtactcaattactctttaaaga

SEQ ID NO: 623212 - DNA, 596 bp, Homo sapiens
caaggttaaattcctataacaaatcatacatacatatgcatgtgtttatatttatgtatatatatatatagtgtgtgtgtgtgcacattgcatttatgtgtgtacagtcatgagttgcttaatgatgacgatacattctaagaaatgtgtcattaagcaatttcatcattgtataaatatcatagagtgtacttacgcaaacctagatggtacagcctactccacagctaggttatatggtatagcctattgctcctaggcgacaaagctgtacagtatgttactgtactgaatactccagggaattggtaacacaatgatatttgtgtatctaaacatatttaaagagcatatgcttgctctacgctattaccactgctacagcatcactaggcagcataaagttttcagctccattataacattgtatatgcagtctgtcattgaccaaaactttgttatgagatgcgtaagygtatttatttgtttatcttatcttagtggttctgcctctctgattgaaacctgactgatacaaacatctttacaatactgggttttccaattcttgctatatccctctactaatttggtta

SEQ ID NO: 623213 - DNA, 592 bp, Homo sapiens
tgcatgcctcagaggattttatcattgtaatgaaccagcagttactatgtgtctcccattatttttcttttcaagttaagaattcttaattgtagccatctagccctgtccctaatgaatgtattaggtatgtgggagtaagaatgagaataggtgcaaataatttatctctttagttcatgggtggcttgaccacaagaagccacttctatgactgaaataactgtgtatcactaggaaatcctagaacttgaattggatgcactgactgatactttgagcagtcactcttaagataaggtrtatcttatgtgtgggaagaagagtaaaacagatgctatttaccagaagagtgaactatggcagaaattggccagacattcagcaaacctattttttttctcctagactctcagctagaccatatttcccagcctctgttttggtgaggtgcaattatatgactttcagcctatggaatgtggaaagagtgatgattatacaccactttcaggcttggcttgtaaaaatccaccaatcattccttcactttctctcctcatagttggctggatagtgacacctaaaacca

SEQ ID NO: 623214 - DNA, 626 bp, Homo sapiens
ctgtaaaccagtataaataaattaccagactttttttgttttatttgatttgggggcagttgagcagaactgtggaatgttggtacctaaaggaggcctcctacatggaaagaagttatatatgcgttttgcaagtggcaaagtagggactcctttgaagacactggatttcatacttttgcctggggttatctctctgtgtctcactacatagacaaatattagctgtgagcagatctttttttgttgcttcttgtagtcccccagtttagcagaaacattctgtgagatagatgtgggaaaggaattctagcaagagttttgtcactgtatcataaggttgtgatttacatatttaagttttatactttgaacatctgaaaatgtatacatactaaataygcagaactctattgtagagtgagaaacatttgaactttgagctttcagtcacttattttgtattctttctttgaggttagcagtagtagtaccacccaaggcactgcttaggtaccactgctgcttagtggagagtccctctggctttatcattaaggttagttattgatatatttctgatcacctttccattaattagttcttgaattgttgagtctgttatt

SEQ ID NO: 623215 - DNA, 510 bp, Homo sapiens
ctcgttgctgcaagctgcacgagaagctgatgttactcgaatcaaaaaacatctctctctggaaatggtgaatttcaagcatcctcaaacacatgaaacagcattggtaatgtttcagatttaagtttttaaaatacaataacsaagaacgtgctaaactaatcataatatcctacttttagaactagcatttttttgagtctatagttttaaaaaattactgcctatgcaaatattttttaaaaatttaaacagtaccaaaaaatagacaacctcaccctgcagaagccaatgctattatcagttcgagaatcctcagaaaaaaaaaattattcatattctgacatgtattatatgtaatgcttttattatcataagtgatacatatagtttgcctttttaggggttataaaaatgaatgcttaggttagaaaatttggaacccaatgaaaataatgaaaaataaaataaataccaccatccagatgaaaacacttggtgtagtccctt

SEQ ID NO: 623216 - DNA, 510 bp, Homo sapiens
ctcgttgctgcaagctgcacgagaagctgatgttactcgaatcaaaaaacatctctctctggaaatggtgaatttcaagcatcctcaaacacatgaaacagcattggtaatgtttcagatttaagtttttaaaatacaataacgaagaacrtgctaaactaatcataatatcctacttttagaactagcatttttttgagtctatagttttaaaaaattactgcctatgcaaatattttttaaaaatttaaacagtaccaaaaaatagacaacctcaccctgcagaagccaatgctattatcagttcgagaatcctcagaaaaaaaaaattattcatattctgacatgtattatatgtaatgcttttattatcataagtgatacatatagtttgcctttttaggggttataaaaatgaatgcttaggttagaaaatttggaacccaatgaaaataatgaaaaataaaataaataccaccatccagatgaaaacacttggtgtagtccctt

SEQ ID NO: 623217 - DNA, 450 bp, Homo sapiens
gtgcagtagcagtttcttacaggttcccagagatttacaggccctgctccaagatggtgcagaggagtagggtgtaatttgaggtggatgtgattttwaaaaaaagtctttaaaaaaccatgtctggtctctgcgctctcatgataggtgtcctgggatgattacccttaacctaccaaaggaactatgttctccaattagaattggttttatttagagtaaaggaatgattttggtgacagcaacatcaaagaatggatctgcagcaaagtcatgaggatctgataagctttatgattgattaacaacaggttaaaatcaaagaacagatttcatgtgtactgtgtttttagatgtatagagcaacttagctgaaaaattacccagaacttttattctataggttttcaggtttcagttttaatttaacatatatacattgatttagtc

SEQ ID NO: 623218 - DNA, 605 bp, Homo sapiens
tactttgccctcatagaatttgccttggttcatactatataccaggggtccctaaccccctgttagcaatggagcagcacagcaggaggtgagtggcaggtgagccagcattaacacctgagctccacctcctgtcagatcagcagcagcattagattctcgtaggagcaccagtcctattgtaaactgcgcatgcgagstatccaggttgtgcactccttatgagagtctaactaaggcttgattatctgaggcgggacaatttcatcctgaaatcatttcccctacccatggaaaaattgtcttccatgaaaccagtccctggtgcaaaaagtttggggaccactactatgtacctatttatgtgattatttctagtgtattttcccactagggttacgtcatacaatgcatgagggcaggtgccagggaatatttgtttggctcatcacttttagacccagcactctgccagcacctggcatatgatcttgtgtggagttgtgtgttttcaatgactgcattaatgaacaagattcagctcaagcttcacttctataactcttttctccaccacccttgctgcctctccaccctggtagatc

SEQ ID NO: 623219 - DNA, 524 bp, Homo sapiens
ctgaagaggttcttcacttgtcctgtgtctttgggggagggaggacatgggaaagcaccttcacctccatcagctctatgcttcccccagtcttttcagccatcatttatcataaggcctaccaggaccccagtgcttggggctggtcagcagctccaggtgagwggggtctcctcagcatcagagaccacccttaagatatctgtacctctcttctgtttcccatgccatcccaaaccagaggcctgaggctctggattttttttgcatcaaatcaaatcagcgaacatgagggtaaacctgttgtaaagagatttccattaagtacctgttaggtaccatatgcaggaaaggcttagaaatgacccccgggcatccagcatgcaccccaggggctgacagcagactcctcaagtgcaccttagtgaaagtgagtgcccctggccggccatctggtccatcgttgccagttatcatccccagaaactactgattgtgactgtctttgaaactgcaaagaattc

SEQ ID NO: 623220 - DNA, 603 bp, Homo sapiens
catctgtccagggtcaggtgttgtgtgttcagccatccccatgaccctaaggcagaacccttccctctccagcaagtgaagaggaggtgattaaaacaaaggggaagagggagaatcttgaattaactgattttaaatcgcaaacggatcacttttaaactccaagtgtgagtcagtgatgtggcattggaaagtttaatcttcttgccatcagtaaaagctattttgaacctcagggaactcacagggcacatgctagagttttcctccaggtaacaacataatgaaacctggaaagtggcccggaggaggacaggcaaaagctctttgcttatcagataccaaaaacragggccgtggccatgagttcagcactgctcatgtgagggcccaggctcctttgtgtctcccaggaatccccagacaacccaaagcacactttatttttaatttttatttctttttggtttagagacaggatctctgatgcccaggctggagtgcaccagcacaaccatagctcacaacagtctcaaactcctgggctcaagggatcctcccacataggcctcccaaagtgctgggatgaaaggagtgagccac

SEQ ID NO: 623221 - DNA, 516 bp, Homo sapiens
tttcctctgggtagatacccagtagtgggactgccagactgaatggtagttctatttttagttctttgagaaatctccattattttccacagcagttgtactaatttacattcccaccaacagtgtataagtatttctttttctctgcatccttgccaacatttgttgttttttgactttttaataatagccactctgactggtataagatgatatctcattgcatttttaatttgcatttctctgatgatcagtgaygttgagcagtttttcatatgctttttggccatttgtatgccttcttttgaaaaatgactatgcatgaatttttccactttttaatgaaattatttgtggggtttttttttttccttttttgagttgtttgagtccttgtaaatttggatatcagtcccctgtgggatgcatagtttgcaaatattttctcccattctgcagggtgtctgtttactttgttgattatttcttttgctgtgtagaagttttttaatttaa

SEQ ID NO: 623222 - DNA, 515 bp, Homo sapiens
tttggttggttttatttatttaatttgagacagaatttcactcctgttgcccaggctagagtgcaatggtgtgatcccagctcactgcaaacctctgcttcccaggttcaagtgattctcctgactcagcctcccaagtagctgggattacaggcacacaccaccacgcccagctaatttttgtatttttagtagagggggtttcaccatgttggccaggctggtctcaaactcctgacctcaggtgatccgcccacctcagcctcccaaagtgctgggattacaagtgtgagccaccatgcccagcagcttttggttggttttaggaaaaagataaattactttttaaaacccctgatgttggtacctctctacctcccatgccttrtctctcacatagttccattcccaaccttctatcccaacctcttcccgtgattcagccaaacagcacatgtatgtttctcaaatgtaccctgtgctctctcatctgcagacattcacacatgtcatct

SEQ ID NO: 623223 - DNA, 608 bp, Homo sapiens
gcgcctgcgtgctacttccccacgcatgctcggaaggtacctgtgggcgagcctgttaagtccacagccaatagacgtttgcttgcctacctgtacctgcacctgtacctaagtgagggggcaggcgggctgggagatgggtggagcacgtttacctgcactaagtgagctgtccaacctaggttcttgggcscttggagtgtcatggttttgtagtttgtggagaattttcatacctatgaaaattgcagtttggaaatgagcaggttacccattcccacatcatttaatttatatttaaatttaacgtggtgtagggagcaagagggaaagctcctacttttgccctctgaaagttgctggaatgaactaagtagacagattagcaggagaaaaaggcatacaaaatttgcttaacgtgcatagggaaaaatcacagaagagtgattactcaataactcaattaaggtccagatgcttgtatacccttctttgttgagtagagggagataggtatgaatgggcccgaaagccagacagtggtttgcaaatgattctccttggacattcagtgggacagaagtacaaacaatcgcttgtggacaagc

SEQ ID NO: 623224 - DNA, 608 bp, Homo sapiens
gcgcctgcgtgctacttccccacgcatgctcggaaggtacctgtgggcgagcctgttaagtccacagccaatagacgtttgcttgcctacctgtacctgcacctgtacctaagtgagggggcaggcgggctgggagatgggtggagcacgtttacctgcactaagtgagctgtccaacctaggttcttgggcgcttggagtgtcatggttttgtagtttgtggagaattttcatacctatgaaaattgcagtttggaaatgagcaggttacccattcccacatcatttaatttatatttaaatttaacgtggtgtagggagcaagagggaaagctcctacttttgccctctgaaagttgctggaatgaactaagtagacagattagyaggagaaaaaggcatacaaaatttgcttaacgtgcatagggaaaaatcacagaagagtgattactcaataactcaattaaggtccagatgcttgtatacccttctttgttgagtagagggagataggtatgaatgggcccgaaagccagacagtggtttgcaaatgattctccttggacattcagtgggacagaagtacaaacaatcgcttgtggacaagc

SEQ ID NO: 623225 - DNA, 372 bp, Homo sapiens
gcttctgggaaactcaacccaagacccacaagtgaaattactcaaagaaaagtttcaatattacatctactttcagctgtcctgcaggcatataaattcagcctagcagcttctaattcctcccactgaggcagaaatcattttaaaaaccaaccttgctacagggcacagtggtgcattcctgtagtctcagctacctgaagctgaggtgggaggattgctygagcccaggagttcaaggctgcagtgagctatgagtgtgccactgcactccagcctgggcaacaaaggagaccctgtctcatttggaaaaaaaaaaaaaaaaaaaaaaggccaatctagccatatgcagaaagctgaaactggatccct

SEQ ID NO: 623226 - DNA, 529 bp, Homo sapiens
ggaatgattaattcagaggaagggggtgctgggtggagtgggtagcgtgtagaaatactaagtcaaggatcagggaaggcttattataactacctaggtgatcgcattgtctaaatcaaaatctttcatctcagaatgaaaagaacccattcttaaatctatccaactgcagctgaaatgcttcagattttgttcagtcctctgtacaaattttcaatgtctrcttattatttaaatattcacttcaaatacttaaatcattgaagtggaggagcaaggaaagtgatccctatgaaagtcttccttattgtactttcatagttcctgtattaaaataagtcagtttcatgatttacttgtacatatttttatccttgcaaagtttttatgaagttgacctttctttacattgaaaaaaaaataaaggaaaaagtgattaagtcattatcccaagcccatatagttagtgaatgacatagcataatttaaactcacattcttttggctgtaaaatttgtgtattttctac

SEQ ID NO: 623227 - DNA, 650 bp, Homo sapiens
agaaagtcccagttcaccacgggaagggtggtgcaggggagggccagccaatggggagagttgactggctgtgccaaggcctttagaggtttttggcrtggcacacagtaggtggaggcaagggaagagagcccaaagattcccttcctgccctcctacgaggagaacaaggtctctacctgctcagtgagggaccagtgctctgcctccggagaggctgagagggagaggctttgggagcaggaaaccaggttcagagcaagagcagaatgatgcgcaaggaacaaaagatgggaactaatgtcacgtgcaggcctcagacccacgaagaacttggtgaactgggctgctgcccattaggggagagattcgaactatttttgtgtgaaaaagccccagagtaaatcctctcatgtacacactaacaatgttggggccctctcagagtgattgatttgctgcctcattattcagaaatgaaggccactgcttgtcatgccacacatccacgggtctcctaggcagctcttttaaaaaatcaatttattttatgatagtcacataaaatttactattttaaagtgaaggattcagtgacatttagtaaacttgtaatgttttgcagccaccacctctatttagtccccatc

SEQ ID NO: 623228 - DNA, 650 bp, Homo sapiens
agaaagtcccagttcaccacgggaagggtggtgcaggggagggccagccaatggggagagttgactggctgtgccaaggcctttagaggtttttggcgtggcacacagtaggtggaggcaagggaagagagcccaaagattcccttcctgccctcctacgaggagaacaaggtctctacctgctcagtgagggaccagtgctctgcctccggagaggctgagagggagaggctttgggagcaggaaaccaggttcagagcaagagcagaatgatgcgcaaggaacaaaagatgggaactaatgtcacgtgcaggcctcagacccacraagaacttggtgaactgggctgctgcccattaggggagagattcgaactatttttgtgtgaaaaagccccagagtaaatcctctcatgtacacactaacaatgttggggccctctcagagtgattgatttgctgcctcattattcagaaatgaaggccactgcttgtcatgccacacatccacgggtctcctaggcagctcttttaaaaaatcaatttattttatgatagtcacataaaatttactattttaaagtgaaggattcagtgacatttagtaaacttgtaatgttttgcagccaccacctctatttagtccccatc

SEQ ID NO: 623229 - DNA, 631 bp, Homo sapiens
tgcattgaatctgtagattgctttgggcaatattgccattttaataatattgattcttctaatccatgagcatggggtatttttctattttattgggccagctacaatttatttcaccagtgttttgtagtttctattgtagagatctttgttaaatgtattcctaagcgtttaacttttttgtgtgactactgtaaatagattgagttcttaattyggttctcactttgaacattattggtgtatataaatgctactaattatgtaaattgatttcgtatccggagactttacagaagttgcttattaactctaggagtcttctggaggagcctttagggttttctaagtatatggttgtgtcatcagcaaacagagataattggacaccctcttttctaatttgaatgtcttttatttcttttcttgcctcattgttctggcttgggctaccagtactatgttgaataagagtgatgagagtggacaaccttatcttgttctagacctgaagtgaaatgctttcaacttttcctcattcagtatgatgttgactatggggttgtcatatatggctcttattattttgagatatgttccatttatgcctagtttgttgagggtttgttaa

SEQ ID NO: 623230 - DNA, 597 bp, Homo sapiens
ggaaatagatcctggaaagggagataactgcatttccagactgatcttgagagaggagaagcaaagtgcatttgtgtcttactgatccagcatctttggaggagtggtargttctgtggaaattaatattattatgagctatgttttaagcttttaagatacctttttaaagtaaccattttggatgggaatctttgtaaatatgtattttcctgcctccttaaatattggtgtcttgggtcttcattgtgaacagtcactatgaagtgattctagcagccaatggatgacagtcacagcagccatttgcccatacacccaatggccccaagacactctgcctttgtcacagcccttatgtctttgattctgtgttttgttttcctttctcttcatggccatctgttagctgtcacttgtcattgcttcctgtgtacctaggctgagctcatcttcataagcatttactgcatgcccactatgtgcctgatgccatactagatactggaattacaatgggatgtggagggatggaggaaagttgaaacttatgcattgcagtcagtcggatgtgccaaaaagtaaagataagaaata

SEQ ID NO: 623231 - DNA, 597 bp, Homo sapiens
ggaaatagatcctggaaagggagataactgcatttccagactgatcttgagagaggagaagcaaagtgcatttgtgtcttactgatccagcatctttggaggagtggtaagttcygtggaaattaatattattatgagctatgttttaagcttttaagatacctttttaaagtaaccattttggatgggaatctttgtaaatatgtattttcctgcctccttaaatattggtgtcttgggtcttcattgtgaacagtcactatgaagtgattctagcagccaatggatgacagtcacagcagccatttgcccatacacccaatggccccaagacactctgcctttgtcacagcccttatgtctttgattctgtgttttgttttcctttctcttcatggccatctgttagctgtcacttgtcattgcttcctgtgtacctaggctgagctcatcttcataagcatttactgcatgcccactatgtgcctgatgccatactagatactggaattacaatgggatgtggagggatggaggaaagttgaaacttatgcattgcagtcagtcggatgtgccaaaaagtaaagataagaaata

SEQ ID NO: 623232 - DNA, 586 bp, Homo sapiens
tgcttcagttaaggtctctttttttttaaaataattgggcagattgattccaggttcagactttctatctgggttgtttctgcttctcagatgttctccctttgccctccttcttaaatggcatctggagtagaggaagcctcgatgtcctcatagcagtgggccagagcatcctggccttgagtgcttctcctgagtccttgcccttttgtcatcatgcatcctgctggcattcagggctggagttcacagctactgtgactcagtcttgaggtctcttggcacagtcactggcagactggtctctaccctctgagtcttggcctcaccctgcatcctgtacctggcctgggtggtctaccctgccatttagctatgaagcccccatccctgtctccatggcagcctcatggctggacccttccaccctcaatcttcagctctattacatgtctctcattggatccttgcatgccacatggaagtcaagtgactcttgtgagtgctctctggggcccctgttgatcagaactctacacaccaccattttctgtctactggggwcatctcatgttgatgtggaggc

SEQ ID NO: 623233 - DNA, 601 bp, Homo sapiens
ctcttctcggccccagaccttcctagatctttgccacscatgggcccctggaatgccagggcctgatttgaggaagcgctccttaaagtgcagtctgtgcaatgggctttgaattaatcagggagggtcttgtatggtttaaggaggtagcagggcatttatctatcccctcgagagtggctttgctgaaaatctgctgctgcagttttcatttacatggaaatgagcacacagagagctcttgccccttgtcatctccagatgaaggaagacccagttctttgggagctcttcaaacacacagattatctaaagctgggagtgaacctaccctatctctgtagcagttgcctttgcatcttgggtggaatactgcagccacactcaagggtagactcctgttactctgtcattgctgctattaaaattgctgtttctcaatttcctccatgtagtgtggttaacaggggctttaatcgaaagcagagctggctacctggcctctaccttcactttgctacatggtttctgtgcatcttgctgcctacgtgccttggtcttctaatacttggcgttttcctatagtgcctgctgtgttgat

SEQ ID NO: 623234 - DNA, 527 bp, Homo sapiens
tgcacattttgcacatgcacccttgcacttaaagttgaaaaaaaawtttttgttttaaattagctgggtgtggtggctcatggctgtaatctcagctactcaagaggctgaggcaggaggatggtttgagcctgagaggtcgaggctgcagtgagccatgtttgcaccactgcattgtagcctgggtgacagagtgaggccttgtttaaaaaaaaaaaaaaaaaaaaaaaaaaaaaaaaaaaaaggaagaagaagaagaaaagaaagaaagaaagagaaaagaagaaaaaagaaaatgaaaaaaagagatttgcaatattaaaaataaaaagagggatatacagagagatccagcagagactataaagataatagtgtactattaaaaactatatgccaaagaatgcataaagaagcagaagcttagaagaaacacacattcttttaaaaataaccaactcaaaaaaaaattacgaagtccaaatagctcataaccattaaaacaagtgaatcaattgtctaatttt

SEQ ID NO: 623235 - DNA, 527 bp, Homo sapiens
tgcacattttgcacatgcacccttgcacttaaagttgaaaaaaaattttttgttttaaattagctgggtgtggtggctcatggctgtaatctcagctactcaagaggctgaggcaggaggatggtttgagcctgagaggtcgaggctgcagtgagccatgtttgcaccactgcattgtagcctgggtgacagagtgaggccttgtttaaaaaaaaaaaaaaaaaaaaaaaaaaaaaaaaaaaaargaagaagaagaagaaaagaaagaaagaaagagaaaagaagaaaaaagaaaatgaaaaaaagagatttgcaatattaaaaataaaaagagggatatacagagagatccagcagagactataaagataatagtgtactattaaaaactatatgccaaagaatgcataaagaagcagaagcttagaagaaacacacattcttttaaaaataaccaactcaaaaaaaaattacgaagtccaaatagctcataaccattaaaacaagtgaatcaattgtctaatttt

SEQ ID NO: 623236 - DNA, 457 bp, Homo sapiens
ttcttcttatatcagtggagctttgaagaaaaaaatgatcacatgttcaatctaccatgttcaacaggaagcactaattttaatttgtttcagaaaaaatttttgattgagtaataggactaggcactcttcttggtggtttgtgtataatctcacagaatcctcactgttgctctcaggaggtgctgatagccccagtttacaggtgtggaaacgtaggcagagagaggttaagtaacttcccatgcagagtggtgagtggtggagtgtggattgaaatgcacgtagatctaagctgcaccccctgctcctgscactgcctctcagtaaggagggtgtgcacccgtgggtgtgtgcaccattttgccgtcaccgtaacgggggaggttacagtcagtgcctggattggcgggtttcttttaggaagaaaggccatgctgggctgtggatggagaag

SEQ ID NO: 623237 - DNA, 639 bp, Homo sapiens
ctcatgtgatcctctggtctcagcctctcaaagtgctgggattacaggcatgagccactatacctggcctatggaaggtttaattgatacttacagttactagcactgcagatatttgctgtctggataaataaatgaattaataaacataagcatcgtttgattcctttctccacttcacctcctctgttaatcarttgcagaattttggtctttccttctcctttttgaattgtttttctctccactcacaagaccattatgagaattaggcaccacatctgtcctaggggagaagtcctatcaactccaaagtcgtctcaatccatcacctggcttcagacccttgctcatatcacactaaatgttatctatttacaaaagaaaatattcatcagatttctcccttgtaaaatatattttaagtaattcattgacaaataataattatgcatatttattatgtataacatattgatttgaaatatgtataaattgtggaatggctaaattgagctaattagcatatgcattacctcacatacttttttttggcgagaacaattaaaatctcctctttgagcaattttcaggaatacaatacattgttgttaactatggtcactatgttgtacaata

SEQ ID NO: 623238 - DNA, 520 bp, Homo sapiens
tctgacctcttggggaattgtgaacaatcttgaattcagagataatccattgtatgtgtttgaaagttagtaaaactgaatctactgaatttgcctgcctttttgtggctcacttgggacgtagtatagtatgcaatattttgctcagaatgggaaaaaataatagttatttctggattgtgtcagtatagaygataattaaaatcttttgctcagtatcttatatgtaagatttctccataaatatatatatatatatatatatatatatattcattttattgtctcttgacgatatattgtcaagagtatatcgtctcttgaagtatattgtctcttgaatgctgtgatgtgtaatgacacctcatggttgatctactgagttcatttaggcagaataaattaattaaagtgagtttggggtgtgagaacagcaaatccacagtgaattgagatttttctcttttaattcattgttgcatcataggtcatgaggatagagccctcatgtatgggatta

SEQ ID NO: 623239 - DNA, 520 bp, Homo sapiens
tctgacctcttggggaattgtgaacaatcttgaattcagagataatccattgtatgtgtttgaaagttagtaaaactgaatctactgaatttgcctgcctttttgtggctcacttgggacgtagtatagtatgcaatattttgctcagaatgggaaaaaataatagttatttctggattgtgtcagtatagacgataattaaaatcttttgctcagtatcttatatgtaagatttctccataaatatatatatatatatatatatatatatattcattttattgtctcttgaygatatattgtcaagagtatatcgtctcttgaagtatattgtctcttgaatgctgtgatgtgtaatgacacctcatggttgatctactgagttcatttaggcagaataaattaattaaagtgagtttggggtgtgagaacagcaaatccacagtgaattgagatttttctcttttaattcattgttgcatcataggtcatgaggatagagccctcatgtatgggatta

SEQ ID NO: 623240 - DNA, 601 bp, Homo sapiens
agcctggtgttgccaattccattcctttccaaggtgaagattctttgcctcactagctgatatgtttttgatctgtgtcyttgcccaaatctcatgttaaattgtaatctctaatgttggaggaggggcctggtgggaggtgattggatcatggaggtggatttctcaggaatggtttagccccattcccttggtgctgttgtcatggtagtgagtgagttcttgcaagatctggttgtttaaaagtgtgtggctcctctcctgtctctgtcttgctcctgctctggccatgtgatgtatttgctcccccttcacctcccaccatgattgtaagtttcctgaggcctcctcagaagccaagcagatgccagcatcatgcttcctgcatagcctgcagaaccattagccaactatacctcttttcattatattacaagtctcaggtatttctttatagcaatgcgagaatggactaatacactaccacttctaactcagtttggactcatgatttgttctcagaagtctctctgttgctttatagaatcttcaccatactgcctctgtgactccccactgccatgctcaatccacttgtaga

SEQ ID NO: 623241 - DNA, 538 bp, Homo sapiens
agtccatgctccagggtccacagtgccggatgccgggagagggcacagatgaggaactgcgagaaaggaatggaccctgtgtgggatctggcggtggctgggtaatcctgggcccccagggctggtctctgagtgcaggtgggggtgccgggatgggttctgcctgggcccaaccctcacggggacatcaaagggcatggttgtaaaaagaaaaaaaaaaaccacaccatcagattgcatgagactcactcatcatcacaagaacaacatgggggaaccacccccataattaaattacctccacccggtccctgccttgacacctggagattatggggattgcaattcaaggtgaggtttgggtggggacacagagccaaaccgtrttattcaaataagaaatcaaaagaggaattggaaagtttgttgagctgaaaatgaaaacatgacataccaaaatcagggagttgcaactaatgtatgcttggaggcaaatttaagcactaagatcctacattatagcaaaaaagaaatgtct

SEQ ID NO: 623242 - DNA, 633 bp, Homo sapiens
tctccacattctcaccaacygtagtttcttttgttgaaaaaattggtgtggaaaaaacattttttgggggaggggtgagggacaaggtcttgctctgtcgcccaggctggagtgctgtggcgcgatctcagctcactgcagcctttgcctccagggttccagagattctcctgcctaagactaccgagtagctgagattacaggtgcgtgccatcacatccagctaatttttgtatttttagtagagatggggtttcgccatgttggccaggctggtctcaaactcctgacctcaggtgatccacctgccttggcttcccaaagtgctgggattacaggcgtgagccactgcaccttgcccaaaaagccatttttggaaacgatcttgtaaacaagaagcaaagactgctccaaattgaaatcagttttaaaaccccaaatgcctacatacaatcaatatgagagcagacagagcaggctctttctacaacacttcccgcagcttcagtcaggtagaaggagcacacccttggtcatcaaaactgcgtgctgaccatcagcgcctctctgactggggacaattccaagagaacacatctgttccacagagtactatcaattccaaaaatgtaa

SEQ ID NO: 623243 - DNA, 633 bp, Homo sapiens
tctccacattctcaccaaccgtagtttcttttgttgaaaaaattggtgtggaaaaaacattttttgggggaggggtgagggacaaggtcttgctctgtcgcccaggctggagtgctgtggcgcgatctcagctcactgcagcctttgcctccagggttcmagagattctcctgcctaagactaccgagtagctgagattacaggtgcgtgccatcacatccagctaatttttgtatttttagtagagatggggtttcgccatgttggccaggctggtctcaaactcctgacctcaggtgatccacctgccttggcttcccaaagtgctgggattacaggcgtgagccactgcaccttgcccaaaaagccatttttggaaacgatcttgtaaacaagaagcaaagactgctccaaattgaaatcagttttaaaaccccaaatgcctacatacaatcaatatgagagcagacagagcaggctctttctacaacacttcccgcagcttcagtcaggtagaaggagcacacccttggtcatcaaaactgcgtgctgaccatcagcgcctctctgactggggacaattccaagagaacacatctgttccacagagtactatcaattccaaaaatgtaa

SEQ ID NO: 623244 - DNA, 621 bp, Homo sapiens
ccggactcatcctgtagtcatttctccagggccagaatgcrtaattggcacagactcacttagcagctggcagaaaccccacatcggctccctgactggtagggtgagggccattatgatgggaaaagccaaatggaagccattagagctgccactacctagaaaaatagtaaatcaaaaataatatcgcatccttggagggattgcgaagattagtgccaccatcaaggatttgaaagatgcaggggtggtgattcccaccacatcaccattcagctctctcatttggcctttgcaaaagacagatggatcttggagaatgacagtggattattgtaagcttaaccaagtgatgactccaattgcaactgctgtaccagatgtggtttcattgcttgagcaaattaacacatatcctggtacctggtatgcagacattgacttggcaaatttctttttctccattcctgtccataaggccctccaggagcaatctgccttcagctggcaaggccagcaatatacctctactgtccaacctcagtggtatatcagttctccggctttgtgtcataatcttattcagagagagcttgatcactttttgcttccgcaaggtat

SEQ ID NO: 623245 - DNA, 496 bp, Homo sapiens
aatggggataataaaatccaccatgcttaatttattggcttgtgcaagaatccagtcaagtattgaggcaaacatctcattaaatattggggtgaatgtcatttttaaaaccacagcattgtgcaaatggaataagatttataggagggaatacaataagtaatttgtaaaacaatttgaaatttgtgaataaaaagctattggcaatttttctatgctgagtgagacatgtcctaatgtttgtatttaatatgctaaacagttgccaatgcctaattctaggttcataccctgcaatagcttttcttgttttttttttttttttttttttttttyacaactttcagctgtaaaactggggtcaattatttttagctgtttcttcagcctgtctcattagaaaagtacttcgaggtaatgacttgggcatatttatttgatgattcttcattttgaaagatgtcattttaagacttttctggaagtttcaaatttg

SEQ ID NO: 623246 - DNA, 581 bp, Homo sapiens
aaaccatcctggccaacatggtgaaaccccatctctactaaaaatacaaaaaacaaacaaaaaaattagctgagcatggtgacgtgtgcctgtagtcccagctacttgagaggctgaggcaggagaatcgcttgaaaccgggaggtggaggttgcagtgagccaagatcgcaccactgcactccaacctggtgacagagcaagactccatctcaaaataaataaataaataaataaataaaagaaaagaaaaaataattaaggttaagtaagatcataaggttyaggccatagtccaatatgactagtgtccttataagaaatggaacagacaccaggcgtgggtgtgcatagaagaaagaccacgtgaagaggcagcaaaagggttgccatctgaaagccaaggagagaagccttagaaaccagacttgcagacagcttgatcttggacttctagcctccagaaccataaaaaataaatttttgttgtttaacccacttagtctgggttattttttatgatatctctagcaaactaaaatagtatataatttattttttggcccaaattgcctttcataa

SEQ ID NO: 623247 - DNA, 589 bp, Homo sapiens
atctgtggatacaaccaactgcggatcaaaaatattcagaaagtaaaattgatgatcgtatgtgtactgaacatatgcagactttttttctcattattattccctaagcaatatagtacaactattcgtgtagcgttgacattgtgttaggtattataagtaatctagagataatttaaaagatacaggaggatgtgtgtatgttatatgcaaatattataccattttatataaggactttgagcatcagtgggtttttgtatttgagggggatcctcgagacgaattcccccacgaatacccagggacaactttacaatctaaaagggaaaaaagagcagttcattagttggtatgccttcatgcattttcctttacttgccattggccacataaatggatccyggtttcctcatctgaaaattcaggatagatagtcgctggttttttaagattaaataaagtaacatgaaggcactttgaaaattctaaaaggcaaaataaatctaaaatgctattttaacaaacaatatatttgctaaagtttcagcattatgtcaaaaaataaacttagaaacacagaccccac

SEQ ID NO: 623248 - DNA, 549 bp, Homo sapiens
ttttttcatttcaaccttgtagaatctgatgattatgtgtcttgtggatgatctggtaaagtattttgcgagggttctctgcatttcttgaatttggatgttggcatatctagctaggttggggaagttttcacggatcatatgctaaaataacgttttccaggttgattccattctccgtatctctttcagggacacaaatgagttgtagatttggtctttttacataatcccgtatttctcaaagattttsttcattcctttttctttttttttttattcttgtctgactgtcttatttcagaaagccagtctttaagcgctgagatattttcctctgcttagcctattctactgttaatacttgcgattgcattatgaaattcctgtagtatgtttttcagcaatatcaggttgggttatgttcttttctatactggctattttgtctgtcagctcctgtattattttattgtgagtcttagcttctttggattgtgtttcaatgttcttctaaatcttgatgatctccattcctatctatattct

SEQ ID NO: 623249 - DNA, 320 bp, Homo sapiens
ttaggaagaactcatacaactcaatagcaagacaacatataacctgattaaaaaaaagtggggaaaggacttgaatagacatttcttcaaagatgacagaaaatgaccaacaggtatatgaaatggtgctcaatatcaccartcatcaggaaaatgcaaatcaaaactactttgagataccacctcatacatgttaggatagctattatcaaaaagacaagagctaacaagtgttggtgagggtgtggagaagagggagcacttgtacactgttagtgggaatgtattatatattggtgcagccattatggaagacagta

SEQ ID NO: 623250 - DNA, 402 bp, Homo sapiens
caccacataggagataagaaagggggaattttaaaggatcatccccacttcctaaagctaagttattctagcaatttaataaattggattagggtaggaaacatggagtccaagtccagctcttcccctgaacacctgcttagggctttagttctctacaaaactaaccagggttagaatcattcattaggcaaccacattgcacagtggaaaaacaggggtttttggagtcaggtggatctggcattgagggcaaaatatcagtttctagcttaacaacctagggcacattatttaaattcactgattgtcagttttctacgggaaatacaatatctgccytgcaatgttgctaaatgagacaaaatgtatgaagcgcatgccactgtgcttagcacacag

SEQ ID NO: 623251 - DNA, 605 bp, Homo sapiens
catctctcaaacaaaacaaaacaaaactatatgtgtgtatatayatacatatatatgtgaacatatatattcatttggccagcctgaagtaaaatgaacaaaatgtcatattttgccagtaaaaagtgaattggtaaaacttttttcagaatcataatttaacaatatacactaaaatcgttatacattgtctgctcagcaagtcttactgatgaaataatagaaattttcatagcaatttagctatttagatttttatctggttgtttgtaatttgaaaaaaatctaaatatataccaagatataactataactatatatataaaaaccatgtgttctgtgacatggaaaaaaagaagatatatatatatatatatatatatatatgataataggggaacagtgcatacatatagttttatgttgagaaaggccattatattattttcgtagaatatttaattataaggaaaaattttcaggtcatgatattgagtgaaaaaaaggcaacaaaacatatttggcatagcacatcctaatttttaaaaaataaatacatgtataaatgcatagaaaaaagcctattaagtaatatatcaaatggt

SEQ ID NO: 623252 - DNA, 556 bp, Homo sapiens
cacgaccatgttggggatcaaatttcaagatgagttttggtggggataaaccacatcyaagccagagcagtatgtgcccaggataaaggaagactgcactattcacttaagtgtggccctaatgactatgacattgagtaaatagcattgagtaaaggaaattggatgttagaatatggaagcatggggtcaccaaaaatggccccttttaactttgtgcacctcagactaaagacctgcataaagtggactcaagaatgatgacaggtgttaaaaataattaattagagctgagagtggtggctcatgcctataatcccagcactttgggaggccaaggcacatggatcacttgaggtcaggagttcgagaccagcctggccaacatggtgaaaccctgtttctactataaatgcaaaaattagctgggtgtggtggtgcacgcctgtaatcccagctactcgggaggctgaggcaggagaatcacttgaacctgggaggcagaggttgcagtgagctgagatcgcgccattgcactccagcctgggcaacaaga

SEQ ID NO: 623253 - DNA, 483 bp, Homo sapiens
atttctttctctctacctgatttcttcagaatttaaaaactatttgtgagtattcttaacttatggcaatatagttaattacataaatgcagtaagaatctgttttcttttgcaataggacacaattgagaaactggttattttagcaaggctttkcctgtaatggtatacttttctttaaggaatcaaatttgacttatagagccaataaaagccccttgggaaacctggcctcatacctgtctgcacagtctctgtacaggctttctgaactgtgataattaaagaatgtcactttctgaaagtcccagttatcttgggacctcaagggcagaggaatttatggtacaaacccatggtgggctcagctttaaaaaaaaaaaagtctttggccaggcgcagtggctcatacctgtaatcccagcactttgggaggctgaggcaggcagatcacctgagataaggagcttgagaccagcctgc

SEQ ID NO: 623254 - DNA, 487 bp, Homo sapiens
ttcatgtttagtgcaaacatgtctctgcttcattttccattttttaatttattctcaaccatcaaccatttcctccagggtctctcatgttctagaagcatgatttggggaaaagagtatgaatttttgatttacagagggtgtgaatcctgactgtatctgtacagctttgaaacagtcagctaacttctctacacattcagtttccctatctgtaaaacagaaataatttccatgatttatcgggacttggctgagtgctggagggaacacatggctcaataaatcagccattattttcttcaagacattttctctgccatcgaagagctcacagtttggaaatggagataagacttttwaaaaagattattctaaatcagggagagattaactggctgggagggagcaacatctcagtgattgagcaaggcatgacttaactgaaggcacctagctggtgagcggcagaatgtagccttgactc

SEQ ID NO: 623255 - DNA, 491 bp, Homo sapiens
tccccactacaaaatgggttaagaatgcctgccttccagggttgttatgccggtgaaaagacacttttgcaaagcacctgaaacacagcaagtgctcaaaaagtagtgattcttatggtttaccagatgccatgctaggcactgggaatgcaaagatgaacacccagtgatgcactgtaccatcagagcgaactagttaagtcacatctctgcctttctatttccttattcataatgtagggtaacactcccttccctgccttaccaacgataaaagtaataacaatacaacaatagcaatcataatacctaacacttattgagtaattacagtgtgcccaggcatgttaccaagtgyattacatgcattatttcatttaatctttatggcaggcagaataatgacccccaaagatgttcatatcttgatccttagaacctgtaaatattactttacacggcaaaagagactttgcagatgtgattaagtt

SEQ ID NO: 623256 - DNA, 211 bp, Homo sapiens
agtgcttaacaaattatagttattaatggtagctattatatttttgatgggggagatgtatagtataatccaaaaagatagatgcaatgatggamttacaaagagttgaaagtgcagaataaaaatgggtaaagaagccctcaagtttggaggaattaaggctgcttctcagaggaagtaactcttaaactgaactttcttaaaggcccaa

SEQ ID NO: 623257 - DNA, 689 bp, Homo sapiens
atattgaaatagaggtaaacatttatttgatattttacatggccaaaaggttttggttctttttttcctcttactcttattaayagtttggctgtctatagaatgccaggaaacatgtccattttcctacctttggaaattaaaaaggcactcctctctgtcttctagagtccagtgctgttctcaatgcatgtaaaccaatctgattaatttgcatacagctttttaaagaaatttttggtccttgatcttatgttttgctatgtaaaattttattttagtgtacatttgtgcgagttccccactaccctctattcattgttctggttgcttcatggtccttttcatgcaaagatttgtgttctaatactgaaatgtattattgaattatttatttcttttataatattccatctgttttcttttgttctttctttttgaattctgaatcattagatctaagacttcctgattattttctctcattcaccaatcttttctataccaatgtctatctctttgaattcattatatttttgaaaaatttcctcaaatttagattaacatttttctgttaatttttttcagctattgtgtacttaacctcccaaagttattttttagttccctggcagttgatattggtacctcacaatgcaatagtgtttattttgagccagttttataca

SEQ ID NO: 623258 - DNA, 561 bp, Homo sapiens
atcccacagctagggcacaggcatgtgacttagtctctgccaaccacaagcaccgactccctactttaaataagcaattattgagccaagcgggcaggaatgcacagaccagttgtggtcactgtgtgcaatgtcaggatatcaactgtccctgaggtggagatggtagtatcctatctggctagatatttgrgggtagacttcattgctcatagctatatagccttcatgctgggttagctagctttctgagagtttctattagctacccaagagccttaaatgcatttcacttttctgcttaaattagccacacaattagccaatgtcttttgcttgcaaataataactcttactgatactctatattttctgtttactccaatttttcatctttgggacttccagaccaaaaagacacacagtgatctctggttttttaaatgcatgctgttctcatataaataattataatccaccctaccccccaccccaccccaattgtttgcatgaataggtgtatgtgttttctggatagcaccaaagaaataataaatacag

SEQ ID NO: 623259 - DNA, 561 bp, Homo sapiens
atcccacagctagggcacaggcatgtgacttagtctctgccaaccacaagcaccgactccctactttaaataagcaattattgagccaagcgggcaggaatgcacagaccagttgtggtcactgtgtgcaatgtcaggatatcaactgtccctgaggtggagatggtagtatcctatctggctagatatttgagggtagacttcattgctcatagctatatagccttcatgctgggttagctagctttctgagagtttctattagctacccaagagccttaaatgcatttcacttttctgcttaaattagccacacaattagccaatgtcttttgcttgcaaataataactcttactgatactctrtattttctgtttactccaatttttcatctttgggacttccagaccaaaaagacacacagtgatctctggttttttaaatgcatgctgttctcatataaataattataatccaccctaccccccaccccaccccaattgtttgcatgaataggtgtatgtgttttctggatagcaccaaagaaataataaatacag

SEQ ID NO: 623260 - DNA, 561 bp, Homo sapiens
atcccacagctagggcacaggcatgtgacttagtctctgccaaccacaagcaccgactccctactttaaataagcaattattgagccaagcgggcaggaatgcacagaccagttgtggtcactgtgtgcaatgtcaggatatcaactgtccctgaggtggagatggtagtatcctatctggctagatatttgagggtagacttcattgctcatagctatatagccttcatgctgggttagctagctttctgagagtttctattagctacccaagagccttaaatgcatttcacttttctgcttaaattagccacacaattagccaatgtcttttgcttgcaaataataactcttactgatactctatattttctgtttrctccaatttttcatctttgggacttccagaccaaaaagacacacagtgatctctggttttttaaatgcatgctgttctcatataaataattataatccaccctaccccccaccccaccccaattgtttgcatgaataggtgtatgtgttttctggatagcaccaaagaaataataaatacag

SEQ ID NO: 623261 - DNA, 542 bp, Homo sapiens
agtgtttccttacattttgcaccctgggcccttcgcatgtgtcttacagcccatatctcaacataacatctttccagcctcatctccctctccattatcccacaccccatgtattttcatgcctgtgacctggttagatggccctccctgtccctcgcctcctctatctgctgaaacaccaatcctgcaagacttcaataaaatgccatgtccttataaaaccttcactgatttccacctctctccctcccgtgttaattgctcctctccctatgtatccatgccctttgtttgtgcctatatggaaatttgaattgttgactaggtgtagtggttcatgcctgtaatcccagcactttggaagggtagggcaagaggaytggattgagctcaggagtttgagatcagccttggcaatatggtgagaccccatctctacaaaaaattttaaaaatgaaagtgaaaataaattaccctggtgtggtagcatatgtctgtagtccctacttgggttcagagggatataaccctaaataagctta

SEQ ID NO: 623262 - DNA, 520 bp, Homo sapiens
tctaaccagaagaaacatgaagaaaactatcccaaggtacgttataaccaaatagattagaattcatataaatagaatatcttaaaagcagccagaaatgaaacattgtatacagagaaaaaaggtgataatgacaatagacttcttgacagaaagaatgaaattctgacaacagtgaaataacatatttaaagcattgaaacaaaaaggtcaacctagatttctatacccaggaaaattatctttaaaaaaatgaagatgacataaagatgctttcaggcacagaaaaggtgaaataatttgtcaccagtagaccctcactacaggatgtattaaaggtagtctttcaggcagaagaaacaggatgccacatagaaaagatgtttattataaatcctaaagtaaccacttaaaatgcaattatacctagcagacaaaaaagtagacaaaatgraacaataaattccaaaaaaagaagacaaaaacgtggtaaaaaagaacaggtagaatgaatagaaaa

SEQ ID NO: 623263 - DNA, 520 bp, Homo sapiens
tctaaccagaagaaacatgaagaaaactatcccaaggtacgttataaccaaatagattagaattcatataaatagaatatcttaaaagcagccagaaatgaaacattgtatacagagaaaaaaggtgataatgacaatagacttcttgacagaaagaatgaaattctgacaacagtgaaataacatatttaaagcattgaaacaaaaaggtcaacctagatttctatacccaggaaaattatctttaaaaaaatgaagatgacataaagatgctttcaggcacagaaaaggtgaaataatttgtcaccagtagaccctcactacaggatgtattaaaggtagtctttcaggcagaagaaacaggatgccacatagaaaagatgtttattataaatcctaaagtaaccacttaaaatgcaattatacctagcagacaaaaaagtagacaaaatggaacaataaattcmaaaaaaagaagacaaaaacgtggtaaaaaagaacaggtagaatgaatagaaaa

SEQ ID NO: 623264 - DNA, 389 bp, Homo sapiens
tgtatattagttctctcattttttaaggtattcaaccaccatgctgaaaaggggtactgcacctgatttagaaaaggaaactgactcaggtagaacacctaaattgctcaagatcacacaccttgaaastgaaagaatttacagctctttctattatacagagctacctcccaaagtgaccctatgccttttcacctagcttggactgatgctggggacctcagcatccatatctcctggtttcccaggcaagtctttacctgttgatggaagtgtggaggacacaggggttatggccagtgaagtctccgaagtgaccccaactatatggaacaacaaaaaagtcattataaataacaatgtaacattaaaaaatataaataaaaaat

SEQ ID NO: 623265 - DNA, 566 bp, Homo sapiens
atttggaaaattatgttttcatctaagtctccatcatctctgttaccttgaggattctgtattcagggcattccttaccataaaagaaactggtcctacagagctgtcctgatttcatgccagggccgactgcagaagaacaagttcttaatggccttggccagcccaggtcttcacccctcctgctatagggctccagaataactgcagaatgtgctgagactgcaatatcctgggacaagaagaactgtctgggacagcttgggctttgtcctcatcctagagcaggatgytcctcctagaacagtatgctctgcaacatgagccaagtggcccccagcaatatcaaaccctgagtggaatgctttcagggtccctcgctgtgttgtgaagtggagcacatgcagatgagactccatccaccctgggcagctttccttatccttgggggaccacctccccatggtcctaggcttaagcagcaccctgctgcctgtctgtgagtaatcgagttgtttagttgacttgtgccagtgctcgtctcactgcactaaacctaggaattc

SEQ ID NO: 623266 - DNA, 566 bp, Homo sapiens
atttggaaaattatgttttcatctaagtctccatcatctctgttaccttgaggattctgtattcagggcattccttaccataaaagaaactggtcctacagagctgtcctgatttcatgccagggccgactgcagaagaacaagttcttaatggccttggccagcccaggtcttcacccctcctgctatagggctccagaataactgcagaatgtgctgagactgcaatatcctgggacaagaagaactgtctgggacagcttgggctttgtcctcatcctagagcaggatgctcctcctagaacagtatgctctgcaacatgagccaagtggcccccagcaatatcaaaccctgagtggaatgctttcagggtccctcgctgtgttgtgaagtggagcacatgcagatragactccatccaccctgggcagctttccttatccttgggggaccacctccccatggtcctaggcttaagcagcaccctgctgcctgtctgtgagtaatcgagttgtttagttgacttgtgccagtgctcgtctcactgcactaaacctaggaattc

SEQ ID NO: 623267 - DNA, 579 bp, Homo sapiens
gtagtcattcctatcctttttgctttgacaattctactttttaacctcagaagtttctgccccaggatccatgccccctgtgtctgggaagtgggcaccctcagggaagcctctgggccatcagggaagaccctgcaaatgttctctttcgcctggctggctcagcttcccctgaaaaccccatgagctgaccagggtgctggggtagcagtcagcaggatcagagagcactgataaggaaaacactgctgcacagaggtccatgtctgctttcagagtcagtggatgggtcaccttctargtgctggggacacagcagccgcaagactgacagagcccctggtccatggcccttacattcacgaaaagggggacaggatcagaccaaacacccaaaccagggtcctttttataccaaaagaggttacgaagacagtaaaacaagggaggggtagaagagtcatttggggtggaagggaagccgtgttgaataggctggtggctgggaagctgagcctgccctggggggggcagccaggcagaggatgtggggatcagccagggctgaggtcctgaggc

SEQ ID NO: 623268 - DNA, 667 bp, Homo sapiens
ccattatcattattcagtaactaaaaaataaataaacaaataaagatcattasaagactaccggaattttgataatagagaaaagataacaggtaaaatttgatcatgagaatgagacacactctccttcatgttttatgtattaacattacaaataatgcacaaaggaaccctgtatagacagtcatgtgtgtttaagaaacatagatttaacagatatcttactatttcattcaggttttatgacagattgaaagtatttgctcccctgtcctataggaagatcacacctcccaccctgatgacatcaggcttgaccatgtgacctgcattggccaaggaaatgtgagcagaaaggatgtctattactttaagaaccatcatataactcctacttttttctagggaaacttcagtgtcacaaagaggggactccttccacctggatccaaaagggtaaaagacacaaagatcacagtcagtggaccagtggagaacttttcatgggagtgagaaatacgcatctgctgttaagagtcactgacagatgaagatactttgtgtaaacccatggaaatatattttacttgaaaattatttcattaatcctgatattacttaaacttcccccttcttttaaattttacactaaagaggcctacagaaa

SEQ ID NO: 623269 - DNA, 614 bp, Homo sapiens
tctgatttaaagtgccctctgcattctatcaatcatcttctagttttatttctcattacattaaactacaatattagttactaaattagctttgaaggctgtctccctttcttcatactcctatgtatgttgtatgtggctcattcctctatgaatccagtccaatatcttaaaggtaaaatgatgtgatgatgtcccgacttctgaagggcagaagataaagcattgaattgttttactttccaggagaaaccctcaaaaacacaggaaaatgaatgggaattgagaatgagaaattcargtctgcactgcctgacttcaggtttatttttctatgaaaaaattataaaaacattatttttatttatttatttatttttgagatggagtctcatcctgtcacccaggctggagtgtagtggtgctatctcagatcactgcaatctccacttgccaggttccagcgattctcctgcttcaagcttccccagtatctgagattgcaggtgcccgtcgccacacccagctaattttgtatttttagtagagatggcatttcatcatgttggccaagctggtctcgaactcctgacctcaggttatccacctggctt

SEQ ID NO: 623270 - DNA, 614 bp, Homo sapiens
tctgatttaaagtgccctctgcattctatcaatcatcttctagttttatttctcattacattaaactacaatattagttactaaattagctttgaaggctgtctccctttcttcatactcctatgtatgttgtatgtggctcattcctctatgaatccagtccaatatcttaaaggtaaaatgatgtgatgatgtcccgacttctgaagggcagaagataaagcattgaattgttttactttccaggagaaaccctcaaaaacacaggaaaatgaatgggaattgagaatgagaaattcaagtctgcactgcctracttcaggtttatttttctatgaaaaaattataaaaacattatttttatttatttatttatttttgagatggagtctcatcctgtcacccaggctggagtgtagtggtgctatctcagatcactgcaatctccacttgccaggttccagcgattctcctgcttcaagcttccccagtatctgagattgcaggtgcccgtcgccacacccagctaattttgtatttttagtagagatggcatttcatcatgttggccaagctggtctcgaactcctgacctcaggttatccacctggctt

SEQ ID NO: 623271 - DNA, 586 bp, Homo sapiens
cacctgccttctcctcactcaggaacttctctccattgaagaagttcttcttccccatctccagggctttcccactgacagttgtatctcccccataccaagcccaggtggtcatctcatcccacaattgtctttcaatcccatcaacaattatttggaaaggcttccttgatccccgaatttaagccagctctcttgatgtaggtgtctttccttcagaataattatttacatttgaatcaagtatatattaattaatgtaattatttcactattatcattttcccacataggattgtaagctgtatgtgagcagggttcttgaaacctgtaaatcgttttgatcatcactataaactcaaagcctaggacagtgattgcatgggataaatacttaatatgttgtatcaaataacaaatgtttgcccttctgtaagcagagtaaactctgcttataagttttrtaacctcttaattaattatatttttcattataagtgctgactcttgttacaaacacattttaagtttgacattattggttgatttattcagttaaatgtattaattctgaaacttatttaaa

SEQ ID NO: 623272 - DNA, 586 bp, Homo sapiens
cacctgccttctcctcactcaggaacttctctccattgaagaagttcttcttccccatctccagggctttcccactgacagttgtatctcccccataccaagcccaggtggtcatctcatcccacaattgtctttcaatcccatcaacaattatttggaaaggcttccttgatccccgaatttaagccagctctcttgatgtaggtgtctttccttcagaataattatttacatttgaatcaagtatatattaattaatgtaattatttcactattatcattttcccacataggattgtaagctgtatgtgagcagggttcttgaaacctgtaaatcgttttgatcatcactataaactcaaagcctaggacagtgattgcatgggataaatacttaatatgttgtatcaaataacaaatgtttgcccttctgtaagcagagtaaactctgcttataagttttgtaayctcttaattaattatatttttcattataagtgctgactcttgttacaaacacattttaagtttgacattattggttgatttattcagttaaatgtattaattctgaaacttatttaaa

SEQ ID NO: 623273 - DNA, 603 bp, Homo sapiens
acaggtctttatactgactttagactcattctgtttagataactgtatcacagaagtattagatcaacaaaggttcaaatcatttcttcactaagtttcactctcccatcaaaatccaatgctcagctctcaaagtcagcaggagatttcagtgtaagcagagcaatgatttctgtgcctacaggttgtctttcctaagagaagaaaaaaatggtaactattaatcaatagaaaatccaacaccagtggaacaaatgtgtgcttgctaaagcagcattttcagaacccacattgaatcttcagcatggaaacaaagtgcctgtgcctggaggctcctccagaccttttgcatccctagaatcttgtggagctataatctcttttccataaatctcaattccagaaggtctttattcctgaaattatgttacaatctctttaaaaccagatttggagagatggtatgtggaaatgtttcaatgaatccttggctatstttacatttgttatgaatgttccctatctttgatatttaatacacaaatggaatttatttccacacatttggctggcttaagtctgggcagaaacattacaagtgtg

SEQ ID NO: 623274 - DNA, 603 bp, Homo sapiens
acaggtctttatactgactttagactcattctgtttagataactgtatcacagaagtattagatcaacaaaggttcaaatcatttcttcactaagtttcactctcccatcaaaatccaatgctcagctctcaaagtcagcaggagatttcagtgtaagcagagcaatgatttctgtgcctacaggttgtctttcctaagagaagaaaaaaatggtaactattaatcaatagaaaatccaacaccagtggaacaaatgtgtgcttgctaaagcagcattttcagaacccacattgaatcttcagcatggaaacaaagtgcctgtgcctggaggctcctccagaccttttgcatccctagaatcttgtggagctataatctcttttccataaatctcaattccagaaggtctttattcctgaaattatgttacaatctctttaaaaccagatttggagagatggtatgtggaaatgtttcaatgaatccttggctatgtttayatttgttatgaatgttccctatctttgatatttaatacacaaatggaatttatttccacacatttggctggcttaagtctgggcagaaacattacaagtgtg

SEQ ID NO: 623275 - DNA, 570 bp, Homo sapiens
tccccaagtgctaggattacaggtgtcagccacaacacccagcccattaatgtttaatcccctagaaggtgatccttttttttttttttttttcaaagagacaaattgcagctccttctctgggcttttctamactatagcagataacttaaaatctgacatgccaagatatagccttgtcttagttttctatcactgctataacaaataagcacaaatttagtggtgaaaaaaacaagcacattcattatttcatagttctcatcaggctgacagacatcttacctggctaaaagcaaggaatgggcagggctgcatgccttctggaggctccagggctgagtccattctcttgcctgccccagcttctggaggcctcctgcatgccttggctcgtggcctgccctctgtctttagagtcagcaatgttgcttctctgaccactcttcttccagcatccccctctctaagcacagcagggagaccttcactgattataaagatgcctgtgactaccttggacccaccaggataaccgaggtcactctccacctcccggtcgttaacatt

SEQ ID NO: 623276 - DNA, 572 bp, Homo sapiens
aaataaagaaacaattagaaataatctgggtgatttagggtgaagaatattacattatgaatctttaaggcaatttgaaatccaatcatttttatttaaaamgtttaatatggaaatactctcaattatatttaagacaaagtaagatgttggtagtgtctttattggaatatctatttacagaacttagcaggaaaaatgtctgtgtaatggcttcaattattcacatttattttgtgtgttttgcataaagaaaaactaagaactgcacactaaatttttatgaatgcacacacatatatatatacccacatttttaaatgggttatgataggggagaggactattaaaataactctaaacaatatttattggagggtctcattctcatattagtttattaaaattttatgtaaataattctccacattaatatatatattttttcagactctttcagagacattttaactcacgatgttgtaaaaaccattgttagaagaaaaaagaaattctcatctgaaacttgaacttatcaaaactcacttgtctagaaattagcctgggaacat

SEQ ID NO: 623277 - DNA, 633 bp, Homo sapiens
aactccttggaaacatattaattgggccattgtgttttttcattttgctttataatagcaatagtcctgggcacaatttattcaaaacccagtgtcaggacctgtgaaaatagttgaactaaagtatttcatttattactcccaagaagtctatggtgaacatgccattatcatcccactttaaagaagatttggggtcttaacttggttctgtcattgttcacagtaccacaggtgaatggaggagctaggattttttttcaaacccctataactccagggactctggtctaaactaaaacacatactgtctgccccactctctgaagtggctatttcatatatgtttttattcattaaaactatgatcctcctgtccaaacccttaaatcttggcagacatccttgctgccaagatcaaagagaaaataaaagccataaaaaacagactcccttaatatcccacccttaggatccagcattcaaacccatctgctcttatctctccaatgaggaaaactcattcctctatcaaacctctggatctcatccttttctgtggtagtggaaacaaactattgattcaaattttctctctcmcttgtatccttctcatcagtatttaaatatgtt

SEQ ID NO: 623278 - DNA, 592 bp, Homo sapiens
gaattcatttccataaagtatcccctttgctgttccatgatttaacatgtgtctactttaaaaaaatcttatttgtatctatctggaggctttaatcctttcaaagaagatagttccctttcagacygtgatgtttaccgtaaagtatttggtcaaatacatttttgtaaacacttctttttggcagaagaaaggtatgtgcaatgtatcaagtagacttactatcgataatgccccataaatccgattgaaaactacctttttaataaataatgtcaacctaaaggggatactaaaatgaagacattatgatcaaccctaagctgtaatttgaatgatcatccgtgctgcatggtagtttatttcacgagttagaagatcagactggatccaagagtaagaaattggtgggcctgctaatttgtgctgatatatatgtcccatatatgtatgggaaataggagtagaggcaaaataaataacaaaattgacgtatctcttctcaggtcaaagtcaatacatttttgcttggggttaattgggggaagggaaaagtaaaggctaatagaatagaaacaacttgagttcattc

SEQ ID NO: 623279 - DNA, 608 bp, Homo sapiens
tatatttctgtagtcttctttaatttttctcatcaatgcttttaggggccttgtacctgcttcattgcatgtattgttaagcatgtaatgattctagctattaatctctattatgttttattgaatttcattttctagctgctaattgctagtatggagaaattaagatgatgaaatcaactttataaaggcataatttcggtacaacagactgcaccactttaaaatgtgtaattcaatgcatgtttacaaatggatacactaacggaactactgccacaaccaagatagaggaaattccctatgccccaaagtttcttgtacccctttgcagttcatcagtctttcaaccctcagccccaaggarccgctgtcacttcaggtccgtttgcatttttaaccattttctataaatgaaatgatacctgtgttcttttgtgtctgccttctttcatgcatcaacgtaattttaaaatccatccatatgagtatttgcatcaacagttaatgccttgtaattgctgagtagtattccttcgtgtggctataccatgtttgtttgtccttttacttgttattggacatttctatcattccacgtttgggct

SEQ ID NO: 623280 - DNA, 577 bp, Homo sapiens
acaacaggatacttaagggagaagccctgtgatttcctagttctttgtctgggaagaatttctcagcagctgcacagtgggctagagtccactcagagcagggcagccccactgagctgagaaagaaggcagagatcagagttcaaggccactgaagaaattgcaatctgcagggcagggcaccaataggagacagmtgttcagagggggagctctcgaagtccatgtggggttccatgtgcatacttatcaaggactagactgtacctgcacgaggaaaagactaacagatttaacagaggggtggctgttataaaattgagtttggaccagcggtacttgaggtggaggaggattggggaatggatgatggagttcctgccatccagggtgggaagaacccatgcacacctcattagcacccaggtatccaactaagacactagaatggctgtgctttaggaataagtgtcatgctttaaaaccccttctagaccagccctagtaaagcctgaaatcaaaccctgtcaaaatccacaaaggggtggattggtgattgagtcctgccaaattagag

SEQ ID NO: 623281 - DNA, 537 bp, Homo sapiens
cctccaaactcttccaacctctgcctgttacctagttccaaagttgcttccacattttcagatatccttatagaagcaccccaccctctgtatagttcattctcatgcaggtataaggacatacccaagaccgggtaatttatgaaggaaagaggtttaattgactcacagttccacagggctggggaagtctcaggcaacttataatcatggtggaaagggaagcaaacacatccttcttcacatggcagcaggagagasaaatgagagtggatgaaaagggaagccccttatataacaatcagatctcatgagaacttactatcacaagaatggcatggggcaacagccctcatgattcaattacctccgatcctgtccctcccatgacatgtggggactatgggaactacaattcaagatgagatttaggtgaggacactgccaaaccatattgcataacctgaataaaaatacactcagagcctaaataaatatcagattcaccagttaaattatgatgaaaaaataactgat

SEQ ID NO: 623282 - DNA, 451 bp, Homo sapiens
tgtgtttcccctctatgtgtccatgtgttctcatcatttagctctcacttataagtgaaaacatgcagcatttggttttctgttcctgcattagtttgcgaagggtaatggcctccagctccatccatgttcctgcaagggacatgatctcattcgttttcatggctgcatagtattccatggtgtatatgtaccatattttctttatccagcataccattrtttggcatttaggttgattccaatctttgttattgtgaatagtgttgcaatgaacatacatgtgcatgtgtctttatattaagacaatttatatttcttagggtatacactcagtaatggaatttctagtttcttatcactttctaccctgatgtccctctctctcctcttcaaggccagtaactcttagattttccattttttggctatttcctatatcttttaggta

SEQ ID NO: 623283 - DNA, 451 bp, Homo sapiens
tgtgtttcccctctatgtgtccatgtgttctcatcatttagctctcacttataagtgaaaacatgcagcatttggttttctgttcctgcattagtttgcgaagggtaatggcctccagctccatccatgttcctgcaagggacatgatctcattcgttttcatggctgcatagtattccatggtgtatatgtaccatattttctttatccagcataccattawttggcatttaggttgattccaatctttgttattgtgaatagtgttgcaatgaacatacatgtgcatgtgtctttatattaagacaatttatatttcttagggtatacactcagtaatggaatttctagtttcttatcactttctaccctgatgtccctctctctcctcttcaaggccagtaactcttagattttccattttttggctatttcctatatcttttaggta

SEQ ID NO: 623284 - DNA, 597 bp, Homo sapiens
gatggaggttgcattgaatctatagatcattttgagtagtccgatcattttaacaatattaattcttccaatccatgaatacaagatatctttttttttaattgtgtctttttcattttccttccttaatgttttataggtttcaatgtagagctcttctaccttgttggttaaatttattcctaaatattttgtttttgtagctattgttaatgctattgttttcttgacttgtttttcatgtaattaactgttaatgtataaaaacactattgatttttgtacattacttttgtgttctgtaatgttactgaatttgtttaaatcaaacagttttttggtggactttttatacatttttatatgtaaattttgtcatctgcaaataaaagrcaatttagtttctttctttccacttttggtgcctattattttttctcttgcctaattattctggctatgaaatccattactatgttgaatagaagtggagaaagtgggcatcattttcttgttccatatctagaaggaaaaaattttaaccttttgactttcagtatggtgttagctgtgattttgttatatttggtacattac

SEQ ID NO: 623285 - DNA, 583 bp, Homo sapiens
tttcattttgttcatgtaatgtatcacatttattaatttgtgtctgttgggtcatccttgcatccttgggattaatcccacttgatcatggtggatgatctttttaatgtgttgttgaacttggtttgctaacattttcttagggagttttgcatctatattcattagggatattggcctgtagttttctgttttgtaatgtcttgtctggttttattaataatatcaaggtgatgctgacttcataaaatgtgttggaaggattttctcctcccagatttttggaacagtttcagaaaaattagtattagattttctttaaatgtttggtagaattaagtcataaagccatcaggtcatccyagtaaacatcaattttgattactaggaaactttttatttactgattcagtctctttaccagttactgctgtattcagattttctatttctttgcaattcaatcttggcaagttgtatgtatccaggaaattattgatttcttctaggttatccaattgattggtgtttaattgtttatattggtctcatgttcctttttatttttgtggtgtcaattgta

SEQ ID NO: 623286 - DNA, 600 bp, Homo sapiens
gcaggcacctgccaccatccctggctawttttttttagttcattgccttgcagaaagaagatgatcaattattaggcaatttggtcaatttgaaacatgatggaaactaatgaataaatagctgcctgatggagagattgaatggatgagccatagcaatttattctgtggagctttaagtctgctcctcctcttcaactttgcctgagattcaggcatctcctctgctctttgaaatgtgagagtgttgcttgcaatgggtgcatacttggtgctgcaccatgttatttgtgtcctaaatgtccatattcctgtccttttgctggacttctacttgctccctggtacaaaatcacagtctctaatgactgagattattttaacagttgcttggcttttctccttccaggcttaattactttaatcagttctttaaagccagttatctttctataaagccatgattctaccatgattgataatcttcaataattcctcattttctttaggaaaaattgcttgctctgtagtctggtatggaaggctcacttcttcctgcttgatctttctttgtaattctttattattattgcttttatt

SEQ ID NO: 623287 - DNA, 553 bp, Homo sapiens
tttataaaactcctaagtagaagaaggatgttgaagaaactttaatggattagaaagtgaagggaaaagtgtgaaagaaactccagtagtagacaacgaacccaccgctgtgctcacatgtattgctagggatgctacacatctttgattttccccatgaaaagtgaaagagaacttcttgaggcccaaaatatatcaattcaccatgtatcccatgtagaagcagaatattaaaatatagttaattatcaatatatgcatytgagtaaataataatcagaattatttttggtagaagatgaaatgagatgctattttgaagttcaaatcatgagttatagaaaatagagcaaaagaggaacaagagaaaagtgtgttaattaggacaaaatgcttctgtgattttgtgattactaagtaggtacccagatctttctctacagaaatccccacagctttttgctcattcgaacttcttccatggtggtctatatctcgatattttcttcagaagtgcaggaatcactatttgccttgtaagaatagataaata

SEQ ID NO: 623288 - DNA, 546 bp, Homo sapiens
ttatgtctcatactccctgtttacctttctcatggaaaccctagatcaaattggtatagaaagtattttattaaagaaacttctttattcatatctaccacttattgacaaaaacatcttgagttactatcttctcaaaaacagccaaataaaacagtccatcacaatggtggaatttagatgagaaaatatatactctggttgactagtattttaaattattaaaaaaattttctcagagtaattcttttccttaccatccctggtcctgattcatgtcaatttgagtttttggctttaggttaacwtaacataagacatcaatgataagaataggctgcttcttgttttaagtcccaatccatatagaacctatatcagacaaaatcttttggcaaacccatgatgagtggcacaagactttcctgctcacctagtgagccataagtaagtagttggatactctttttttcgggtggtagttggacacccaagaataaatggctgcatgatgtgtttaggtatttgaggccataaaggcataat

SEQ ID NO: 623289 - DNA, 594 bp, Homo sapiens
ttgaggcaatatagttaattaaaactaagaactacaatgataacaatgaaaacaaaatagagagcttgtatataggaagcttatcttccagggtgtatataaggtggtggaggtgtctgttgctgggtcagaatgcagcttagggcttgggtgagaaaygaatgtaaaaatagtgatttaattcttttgcttttcctccaagtttcctgccctttcaccataaatacaggcttctgaaccctgagtgcaggtaagtaccccatcatgtcagaggaaaaggtaatctggaataagaattgatgcacatagcatgaactgacctttcccctcttgtattctgttgctctggggtagactctacctaccatctgagcttatggtatagaaagggggaaaatcactccttcactccagttgttcaaacgctatcatgaaaagtaaagggtgctaggaaactcataaatgaaggacctgagagaaccaacaatgggaggacctcatctaatctgaaacgtgggtacctgtggtaattcagtcaggctggtaggaaaaattttaagatgaagttataacaaatcttcttggaaggccgga

SEQ ID NO: 623290 - DNA, 630 bp, Homo sapiens
cctaaaatccgtatttttcacaagcttcccccaggaaattctaatgcatgctaaagtttggaaaccactgtttaaaggatacattttttaaaattagcatttaattgcattgaggtgtttgcttttacttgtgatttctttacaaaagttctgaaattgaggcatcactaaacaagtctgaacaattctttatatgatgtatttctaaagtatacctttttaagaaatctatggacaagatatgaaagtcttcagagtcatagattttctccttattcttaaaactgttcaatgcagtacttattagatacctttygtttgctcataaacatttattgaccaaatcattgtattaaaaaccaattagtggtttcttacaagactaaacatactcttattatatcttattatacaacacagcaattgcattccttgatatttacccaaagttgaaaaattaagtccacataaaaacatgcacacagatatttatagaaggtttattcgtaattgccaaaacttggaagcaaccaacgtgttcttcagtaggtgaatggataaacagataaatggagacaatggaatattttttagtgctaaaaagaaatgagccatcaagccatgaaaaac

SEQ ID NO: 623291 - DNA, 602 bp, Homo sapiens
gctcagatatgttttttacttaatattctttcatgatacttttttcatgtcactatcttgagaacccaccacagctaccgagtttccaacacttcttccagccaaaataacagaagccctcttctaagtaccaacttatgccartatacactcggataattaattttaaaatctgcaacggtcaaaatgcattttctcttgttcagtcctcagttgtggtggaatagaagatgcctgttatcttcctaagtaaatgaaggattcatatcaagcaactcagttttcacttttctgaatactcagccctactcccatcatcccatgaccctgaataaccaatactgattgtccccttgtgattctggggacttcaaggaaggaacaagatcatatttacaaaatcaggaacagtactcacctcactggaaattttttcaacagtagtccagatcttgagatcttcagaaatgcaggaatcaatgcttatttgtgtgaggggggagataaatcagtaaagttcccagaaacggaaccgcaggatgttgtaatctccagaaacgctaagaaaatgaagtatctgcaaagataacaaggaaaaaagg

SEQ ID NO: 623292 - DNA, 600 bp, Homo sapiens
tccagtttaaactcattatattatatacctcattcttccagctgataccaattttccaattccaaagccatctccacatttttaagtatttgttacaataataccccatgtcacttttccaaactattacttttctagggcctctaaaagaaaataccacaaactgggtggcctaaacaacagaagtttatggtttcacagttctggaggctataagtccaagatcaagcatgagcagatttgattccttctgatggctgtgaaagaatctgtcctgtgcctactccgtaggttctagcggtttgatgaaaatcttcagtgttctttggcttatagatgcataaccttactatctgtttttatgttcacactgtattctccatagtatgtccttctctgtgttcaaattttccctttttrtaaggcatagtcatatgaaatggaggccactgtaaagactttatctgaattagctttgccaggaagacactattttaaaatccacaggtattgcagctttctgtctagaaagaaaagactagtcattttcaagaaattatactgggacaactagatagtcacatacaaatgaataaactg

SEQ ID NO: 623293 - DNA, 540 bp, Homo sapiens
gaagaaatctaggaaatactattctggacattagccttggcaaagacttcatgacaaagactccaaaagcaaatgtagcaacaacaacaaaaattgacaagtgagatctaattaaagatcttctgtacagcaaattagactatcaacagaataaaaagatagtctacagaatgggagaaagtatttgcaaactatgatttctgagaaaggtctaatatctagactctataaggaacttaaatcaacaagcaaaaaccaaacartttcattaaaaatggttaaaagccatgaatagatctttctcaaaagaggatccatgcaactaacaagcatgtgaaaaatgctcaatatcactaatcattagagaaatgcaaatcaaaactacagggagataccagctcacaccagtcagaatagctgctattaaaaagtcaaaaaataactgatgctggtgaggttgtagagaaaagggaacatttatacattgagggtggaaatgccaattatatgccatatttttttatatggtgaaaggaagag

SEQ ID NO: 623294 - DNA, 607 bp, Homo sapiens
gaaatactattctggacattagccttggcaaagacttcatgacaaagactccaaaagcaaatgtagcaacaacaacaaaaattgacaagtgagatctaattaaagatcttctgtacagcaaattagactatcaacagaataaaaagatagtctacagaatgggagaaagtatttgcaaactatgatttctgagaaaggtctaatatctagactctataaggaacttaaatcaacaagcaaaaaccaaacagtttcattaaaaatggttaaaagccatgaatagatctttctcaaaagaggatccatgcaactaacaagcatgtgaaaaatgctcaatatcactaatcattagagaaatgcaaatcaaaactacagggagakaccagctcacaccagtcagaatagctgctattaaaaagtcaaaaaataactgatgctggtgaggttgtagagaaaagggaacatttatacattgagggtggaaatgccaattatatgccatatttttttatatggtgaaaggaagaggtccagttttaattttcttcatacagctagccagtgatcctgatgctatttgctgaatacttcagcgactgttgaaaac

SEQ ID NO: 623295 - DNA, 540 bp, Homo sapiens
gaagaaatctaggaaatactattctggacattagccttggcaaagacttcatgacaaagactccaaaagcaaatgtagcaacaacaacaaaaattgacaagtgagatctaattaaagatcttctgtacagcaaattagactatcaacagaataaaaagatagtctacagaatgggagaaagtatttgcaaactatgatttctgagaaaggtctaatatctagactctataaggaacttaaatcaacaagcaaaaaccaaacagtttcattaaaaatggttaaaagccatgaatagatctttctcaaaagaggatccatgcaactaacaagcatgtgaaaaatgctcaatatcactaatcattagagaaatgcaaatcaaaactacagggagataccagctcacaccagtcagaatagctgctrttaaaaagtcaaaaaataactgatgctggtgaggttgtagagaaaagggaacatttatacattgagggtggaaatgccaattatatgccatatttttttatatggtgaaaggaagag

SEQ ID NO: 623296 - DNA, 540 bp, Homo sapiens
gaagaaatctaggaaatactattctggacattagccttggcaaagacttcatgacaaagactccaaaagcaaatgtagcaacaacaacaaaaattgacaagtgagatctaattaaagatcttctgtacagcaaattagactatcaacagaataaaaagatagtctacagaatgggagaaagtatttgcaaactatgatttctgagaaaggtctaatatctagactctataaggaacttaaatcaacaagcaaaaaccaaacagtttcattaaaaatggttaaaagccatgaatagatctttctcaaaagaggatccatgcaactaacaagcatgtgaaaaatgctcaatatcactaatcattagagaaatgcaaatcaaaactacagggagataccagctcacaccagtcagaatagctgctattaaaaagtcaaaaaataactgatgctggtgaggttgtagagaaaagggaacatttatacattgmgggtggaaatgccaattatatgccatatttttttatatggtgaaaggaagag

SEQ ID NO: 623297 - DNA, 575 bp, Homo sapiens
taaaatcaatcagatttggctggttgttttatttggttttagtcattaacatttttcacccacaattcatataaccacttaaaattgtgtgctattagcatataataaaaataatatctgtgcctcctgggctcaaaagttagcagcaggatgtcctgactcaatagcaggcttttctgcattaaagttccattctttttcttaagtggataaaaccaggttcagaaagctggagctggtctttagaacaatatacagtttgtcatgagatcatgagaatgtgtgctataagccaaagtagcttatatcccatgaggatatgtaaaatcaatcattaaagaaatggcttcttttggtatcttcagaaattaaaaaaaaaaaaaggatagttaaaaatccctccccaagatccayggtgtgcctggccttaattagggtatctgagaaataaactgacctgattaacacaacactacaccattctaattgccatagtattaccagacaagtgtcttttataaaaaaagcatgcctcagtttcatcacatttaacattttttagtgtactgtaacaa

SEQ ID NO: 623298 - DNA, 600 bp, Homo sapiens
gcttcttttggtatcttcagaaattaaaaaaaaaaaaaggatagttaaaaatccctccccaagatccacggtgtgcctggccttaattagggtatctgagaaataaactgacctgattaacacaacactacaccattctaattgccatagtattaccagacaagtgtcttttataaaaaaagcatgcctcagtttcatcacatttaacattttttagtgtactgtaacaaacatcccatttgcaaaccttgctaggagattttagacactcagrtttcaaagacaatggtgtagtgacaagaatatgggaaaaaggttcaatactggattaatgaaagtgagaacaatatgttattcatgtttatatccatggcttctgtaacaaggctggcatgtggcaggtatcaaataaaaatatgtcagtgactttcaataagtaccaccctctttctgtgcttcagtttcctcctctggaaaatgaaagaaatggatgagctaagctttaactctaacaatacattctaagcagatgttctttaaactgttcaaaaattttattttacccgatcagagctattagcagattatcaggatctgcaa

SEQ ID NO: 623299 - DNA, 549 bp, Homo sapiens
tattcctaagttataatgtaatttacccatatatcttttcgtatatgtatgttttcattttttacactgaaatctttttatctatgtaaagtttgccttattgtatggtttgaggaatagatataatgttttctttcccycatgtggctttttagttattcttatgccaattattaagaggcttatattttctttactgacttcatctgcagcctgaatcgaaagctgtaggtgccctgtctgtacccctttacccttatcacttcagtgcatgtctacaggacttccaattaccatcaacttcctttctttacctgaggtgttttctcttgctaccagaacctgctctgcccatacattgtgggctagaagtacttggaaacacaccagtaaagcagcctacaactaatgactaataaaagttgattacaaaataagccttaggagggataacactgaggaatgtgttatgcccagaataactagcagaagtaagctctaaatacacacagagataacttccttgatgataaaccctttattggctac

SEQ ID NO: 623300 - DNA, 574 bp, Homo sapiens
ttacttccacctccacctcctgggttcaagagattcttctgccgcagcctccagagtagctgggactataggccagtgccaccatgcccggctaatttgttttttttttgtatttttagtagaaatgggatttcaccatattggccagactggtctcgaactcctgactttgtgatcygcctgccttggcctcctaaagtgctggaattacagtcatgagcaaccacacccggccttctgatttctttattcattattattatcgttagttgttttgtgatatgaaaacttcacataaaatttactgccctcttaggaaatctttaagggcacaatagcatattgttaactacagtgtacaatatagtattgataactataatattgcacatgcactatcctgtacaaaactatgtgtcgtttgactaaaccttccatgttgcacttgtttcttacgaggaatgaaaatcgcatcaaaattataattttccaaagagaaatttttatgtgtgattgttttcccaaatcatcaagtttaactttgatgtatgttttcaccttcttgtaaatcaca

SEQ ID NO: 623301 - DNA, 574 bp, Homo sapiens
ttacttccacctccacctcctgggttcaagagattcttctgccgcagcctccagagtagctgggactataggccagtgccaccatgcccggctaatttgttttttttttgtatttttagtagaaatgggatttcaccatattggccagactggtctcgaactcctgactttgtgatccgcctgccttggcctcctaaagtgctggaattacagtcatgagcaaccacacccggccttctgatttctttattcattattattatcgttagttgttttgtgatatgaaaacttcacataaaatttactgccctcttaggaaatctttaagggcacaatagcatattgttaactacagtgtacaatatagtattgataactataatattgcacatgcactatcctgtacaaaactatgtgtcgtttgactaaaccytccatgttgcacttgtttcttacgaggaatgaaaatcgcatcaaaattataattttccaaagagaaatttttatgtgtgattgttttcccaaatcatcaagtttaactttgatgtatgttttcaccttcttgtaaatcaca

SEQ ID NO: 623302 - DNA, 558 bp, Homo sapiens
ctaacaattgaaataataatattaacattatctattacaaatgtaggctgatttgcagataagatactgatttcatatrttctacaaaattcagcttctatgctcatctgtactttgcatttttcttcaataagtttttgcataagacctctattagactaaattaatatcagagaactggtgtgatgttaatgatgaaaatatgcaaaggaggctgatatattagtattcacaattattaggatcttggaaggtaagaattgcactgtcttaacttagtaactgccaggggatgatctttatgatttcttgggtactgactatggctactatgtaataattttacccagaaaaatgtgggaataaattaaaatcaatttaattactactagggctattttttcttaagttaaattgacttaaaatcactagtcagatttaaataatcttttattccttagaaaagttatatccatgccattggtattaaccataattcatgttcttcatgactcaaaggtaaacatcaatttcagtttagagaccacatgatgtaaa

SEQ ID NO: 623303 - DNA, 507 bp, Homo sapiens
actgctgctttgggatcatattaatagtgtccatgagaaacagaagcatgtacacaatcatatttctctaaaactattgttcttaaatatagtctcaaacatttatattacctatcatttttaaycaaagtaacttctatttcacaaagaaaactgaggggtgggtaaccgagaatggcctgccacacaccagcatatagcagagtaggagagttcatggatatgcataacacacattttaaagccacccacatctcatatacagcatttcaaagtggcaagaatgagcatattatcatgacctaaagatacagttttgcggtcatgtgcaatggctcacacttgtgatcccagcaccttgggaggccaaggtgggaggagcacttgagcccaggaatttgagaccagccttggcaccatagtgagaacccatctctataaaataaaaaataaaaacgttaatggggtatgttttattttatttagaaatgatgtagacatctagtg

SEQ ID NO: 623304 - DNA, 507 bp, Homo sapiens
actgctgctttgggatcatattaatagtgtccatgagaaacagaagcatgtacacaatcatatttctctaaaactattgttcttaaatatagtctcaaacatttatattacctatcatttttaatcaaagtaacttcyatttcacaaagaaaactgaggggtgggtaaccgagaatggcctgccacacaccagcatatagcagagtaggagagttcatggatatgcataacacacattttaaagccacccacatctcatatacagcatttcaaagtggcaagaatgagcatattatcatgacctaaagatacagttttgcggtcatgtgcaatggctcacacttgtgatcccagcaccttgggaggccaaggtgggaggagcacttgagcccaggaatttgagaccagccttggcaccatagtgagaacccatctctataaaataaaaaataaaaacgttaatggggtatgttttattttatttagaaatgatgtagacatctagtg

SEQ ID NO: 623305 - DNA, 507 bp, Homo sapiens
actgctgctttgggatcatattaatagtgtccatgagaaacagaagcatgtacacaatcatatttctctaaaactattgttcttaaatatagtctcaaacatttatattacctatcatttttaatcaaagtaacttctatttcacaaagaaaactgaggggtgggtaaccgagaatggcctgccacacaccagcatatagcagagtaggagagttcatggatatgcataacacacattttaaagccacccacatctcatatacagcatttcaaagtggcaagaatgagcatattatcatgacctaaagatacagttttgcggtcatgtgcaatggctcacacttgtgatcccagcaccttgggaggccaaggtgggaggagcacttgagcccaggaatttgagaccagccttggcaccatagtgagaacccatctctataaaataaaaaataaaaacgttartggggtatgttttattttatttagaaatgatgtagacatctagtg

SEQ ID NO: 623306 - DNA, 571 bp, Homo sapiens
acccaatttcaactatactacaaggcttcggtaaccaaaacagcagggtactggtacaaaaacagacacatagaccaatggaacggaaaagagcccagaaataatgctgcacacctatgatctgatatttgaaaaaagttgacaaaaacaagcaatgagaaaaggactccctattcaataaatggtgctgaaataagtggctagccatatgcataagattgaaactggaccccttccttatgccatatacaaaaatcaactcatatgaagtaragacttagatataaaacctaaaactataaaagccgtggaagatagcctgggaaatactattctggaataggacctggcaaagatttcataacaaagatgccaaaaacaattgcaactaaaacaaaaattgacaaatggaatctaattaaagagctttagcatagccaaaaacaaacaaacaaaacagtgaacacggtaaacagataacctacagaatgagagaaaatatttgcaaactatgcatcctagagaagtctaatatccagaatttataaggaactttataagcaaaaaacaa

SEQ ID NO: 623307 - DNA, 681 bp, Homo sapiens
tcacagcattagaaaaaaaaacttttaaaattcatatggaactttaaaaagagcctgaatagccataacaatcttaagcaaaatgaacaaagctgaaggcattacactacccaatttcaactatactacaaggcttcggtaaccaaaacagcagggtactggtacaaaaacagacacatagaccaatggaacggaaaagagcccagaaataatgctgcacacctatgatctgatatttgaaaaaagttgacaaaaacaagcaatgagaaaaggactccctattcaataaatggtgctgaaataagtggctagccatatgcataagattgaaactggaccccttccttatgccatatacaaaaatcaactcatatgaagtaaagacttagatataaaacctaaaactataaaagccgtggaagatagcctgggaaatactattctggaataggacctggcaaagatttcataacaaagatgccaaaaacaattgcaactamaacaaaaattgacaaatggaatctaattaaagagctttagcatagccaaaaacaaacaaacaaaacagtgaacacggtaaacagataacctacagaatgagagaaaatatttgcaaactatgcatcctagagaagtctaatatccagaatttataaggaactttataagcaaaaaacaacc

SEQ ID NO: 623308 - DNA, 537 bp, Homo sapiens
gccgctggagaaggatgcggacggggccagtgactcgtagtagatccctccgcgcggagctcgggccggcgcttcttcctgcgggaaacccctgggtgcccaaggcggcggggccgaggccgcggcgacagtggggcggggcttgcggtgggaggaggcggctgaggcggaaggacacacgaggctgcttcgctgcacacaagagaaagtttcagccaaacttcgggcggctgaggcggcggccgaggagcggcggactcsgggcgcggggagtcgaggcatttgcgcctgggcttcggagcgtagcgccagggcctgagcctttgaagcaggaggaggggaggagagagtggggctcctctatcgggaccccctccccatgtggatctgcccaggcggcggcggcggaggaggcgaccgagaagatgcccgccctgcgccccgctctgctgtgggcgctgctggcgctctggctgtgctgcgcgacccccgcgcatggtgagtatcgggctgaggggcgctgtccgcggcgcccgg

SEQ ID NO: 623309 - DNA, 491 bp, Homo sapiens
aaaattgacaaatggaatctaattaaagagctttagcatagccaaaaacaaacaaacaaaacagtgaacacggtaaacagataacctacagaatgagagaaaatatttgcaaactatgcatcctagagaagtctaatatccagaatttataaggaactttataagcaaaaaacaacctcattaaaaagtgggcaaatgacacgaacagacatttttcaaaaagacatacatgtggccaagaagcatatgaaaaaatgttccacatcactaatarttagagaaatgcaaatctaaaccacaatgagataccatctcataccaatcagaacggctattaaaaagtcaaaaagcaatagatgccggcgtggttgcagagaaaatggaacacttatatagtgctaatgggaatgtaaattcgttcagccgttgtgcaaagcactttggtgatttttcaaagaaccgggaacaattaccactcgacccagcgatcc

SEQ ID NO: 623310 - DNA, 491 bp, Homo sapiens
aaaattgacaaatggaatctaattaaagagctttagcatagccaaaaacaaacaaacaaaacagtgaacacggtaaacagataacctacagaatgagagaaaatatttgcaaactatgcatcctagagaagtctaatatccagaatttataaggaactttataagcaaaaaacaacctcattaaaaagtgggcaaatgacacgaacagacatttttcaaaaagacatacatgtggccaagaagcatatgaaaaaatgttccacatcactaataattagagaaatgcaaatctaaaccacaatgagataccatctcataccaatcagaacggctattaaaaagtcaaaaagcaatagatgcyggcgtggttgcagagaaaatggaacacttatatagtgctaatgggaatgtaaattcgttcagccgttgtgcaaagcactttggtgatttttcaaagaaccgggaacaattaccactcgacccagcgatcc

SEQ ID NO: 623311 - DNA, 491 bp, Homo sapiens
aaaattgacaaatggaatctaattaaagagctttagcatagccaaaaacaaacaaacaaaacagtgaacacggtaaacagataacctacagaatgagagaaaatatttgcaaactatgcatcctagagaagtctaatatccagaatttataaggaactttataagcaaaaaacaacctcattaaaaagtgggcaaatgacacgaacagacatttttcaaaaagacatacatgtggccaagaagcatatgaaaaaatgttccacatcactaataattagagaaatgcaaatctaaaccacaatgagataccatctcataccaatcagaacggctattaaaaagtcaaaaagcaatagatgccggcgtggttgcagagaaaatggaacacttatatagtgctaatgggaatgtaaattmgttcagccgttgtgcaaagcactttggtgatttttcaaagaaccgggaacaattaccactcgacccagcgatcc

SEQ ID NO: 623312 - DNA, 563 bp, Homo sapiens
cctttgtttgtagaatttcagtgagcatagtcctgggttaacctgacaacagtcctactgtttattgatgcttataggtgagcctatttctctttctagctttcttccacttaatttaytttcttttggaattcttgaatttaataataataatattgatgttattagtcatcactataactttttattgagtatgtattttatgtcagacacagtgtggctaagtgctttacatacattatctcatctaatccttagaaaaaaccctggtgtattagtcttaatttaaaagatgtactttggaaaggttagtagtttacccaagattatgcagctagttaaaagtggtgctggggctgggcttggtggctcacacctgtaatcgcagtgctttgggagtctgaggcaggaggatcgcttgacaccaggagtttgagactaacctgggaaacatagggggaccccatctttacaaaaaataaaaaaattagccaggagtgggggtgcacacctgtggtcccagctacttgggaggctgaggcaggaggattgcttgagcccca

SEQ ID NO: 623313 - DNA, 563 bp, Homo sapiens
cctttgtttgtagaatttcagtgagcatagtcctgggttaacctgacaacagtcctactgtttattgatgcttataggtgagcctatttctctttctagctttcttccacttaatttactttcttttggaattcttgaatttaataataataatattgatgttattagtcatcactataactttttattgagtatgtattttatgtcagacacagtgtggctaagtgctttacatacattatctcatctaatccttagaaaaaaccctggtgtattagtcttaatttaaaagatgtactttggaaaggttagtagtttacccaagattatgcagctagttaaaagtggtgctggggctgggcttggtggctcacacctgtaatcgcagtgctttgggagtctgaggcaggaggatcgcttgacaccaggagtttragactaacctgggaaacatagggggaccccatctttacaaaaaataaaaaaattagccaggagtgggggtgcacacctgtggtcccagctacttgggaggctgaggcaggaggattgcttgagcccca

SEQ ID NO: 623314 - DNA, 537 bp, Homo sapiens
gccgctggagaaggatgcggacggggccagtgactcgtagtagatccctccgcgcggagctcgggccggcgcttcttcctgcgggaaacccctgggtgcccaaggcggcggggccgaggccgcggcgacagtggggcggggcttgcggtgggaggaggcggctgaggcggaaggacacacgaggctgcttcgctgcacacaagagaaagtttcagccaaacttcgggcggctgaggcggcggccgaggagcggcggactccgggcgcggggagtcgaggcatttgcgcctgggcttcggagcgtagcgccagggcctgagcctttgaagcaggaggaggggaggagagagtggggctcctctatcgggaccccctccccatgtggatctgcccaggcggcggcggcggaggaggcgaccgagaagatrcccgccctgcgccccgctctgctgtgggcgctgctggcgctctggctgtgctgcgcgacccccgcgcatggtgagtatcgggctgaggggcgctgtccgcggcgcccgg

SEQ ID NO: 623315 - DNA, 403 bp, Homo sapiens
gtgggatgatttgtagaaggcttactataggacaggtttacagcagatttttgaaaaaagggtggaagaaaggaacctaagttggagatataccagaagggaagcatgatgtttctcactggaaattaaaaagatttcaatataggggacagtaaacaagattgtggaaataatayggagtgttcgagttatggattactaaagagtaagatggttagatgattggaatgggacagacaagcagatcagagattgtaaagaacttggatttgaaaggcttggtattaatactgttgctagtttctgagcagaagaatgacatgaaaattatgcttaggaaagattattcttttagtcatatgcttaggttcagcaaggaatttccagactgtccttagggaga

SEQ ID NO: 623316 - DNA, 586 bp, Homo sapiens
tctttgctgctccatctccttcctttctcctccctccattgaagtcaggaatctaaaaatagtcatcataccttagtgtatrtttaaagttctcttaactgtatctcgcaagggctttatttttagttacaaaatttttataagttgttttggccactactagaagcagcctttcagggaggtagcaaaggcatttttagggaacatttttaggagtcttcatctgggaatcaccccaagcagggagctcctcagaaacattctcatgccccggaccttcgtgctcaccacgcttgactgtgtagggagtttgagataaaatggtctacagtcattcatttcgggtaccttcctctggactctacatttctggtcacttttctgtcatcacccagcttcttaggtcagtacccggtgatactcatggtgatccgggaaggctggaccagggaagtggaggacaggctgtgctgatggtttattaaagtctgtggcttcttactcctccacaagactcctcatcagagggtgcggcttgggtcatgctgggcactcagcagctttgtggtgggtatcggtttgtgct

SEQ ID NO: 623317 - DNA, 586 bp, Homo sapiens
tctttgctgctccatctccttcctttctcctccctccattgaagtcaggaatctaaaaatagtcatcataccttagtgtatgtttaaagttctcttaactgtatctcrcaagggctttatttttagttacaaaatttttataagttgttttggccactactagaagcagcctttcagggaggtagcaaaggcatttttagggaacatttttaggagtcttcatctgggaatcaccccaagcagggagctcctcagaaacattctcatgccccggaccttcgtgctcaccacgcttgactgtgtagggagtttgagataaaatggtctacagtcattcatttcgggtaccttcctctggactctacatttctggtcacttttctgtcatcacccagcttcttaggtcagtacccggtgatactcatggtgatccgggaaggctggaccagggaagtggaggacaggctgtgctgatggtttattaaagtctgtggcttcttactcctccacaagactcctcatcagagggtgcggcttgggtcatgctgggcactcagcagctttgtggtgggtatcggtttgtgct

SEQ ID NO: 623318 - DNA, 586 bp, Homo sapiens
tctttgctgctccatctccttcctttctcctccctccattgaagtcaggaatctaaaaatagtcatcataccttagtgtatgtttaaagttctcttaactgtatctcgcaagggctttatttttagttacaaaatttttataagttgttttggccactactagaagcagcctttcagggaggtagcaaaggcatttttagggaacatttttaggagtcttcatctgggaatcaccccaagcagggagctcctcagaaacattctcatgccccggaccttcgtgctcrccacgcttgactgtgtagggagtttgagataaaatggtctacagtcattcatttcgggtaccttcctctggactctacatttctggtcacttttctgtcatcacccagcttcttaggtcagtacccggtgatactcatggtgatccgggaaggctggaccagggaagtggaggacaggctgtgctgatggtttattaaagtctgtggcttcttactcctccacaagactcctcatcagagggtgcggcttgggtcatgctgggcactcagcagctttgtggtgggtatcggtttgtgct

SEQ ID NO: 623319 - DNA, 586 bp, Homo sapiens
caaactggatccatctaggggcaagtatagggcaaccagagtgtaaggggttgagaggtaagaaaggagactgctagaagtcagctggaaatgaaaaattccaaagctagaatgtcatgatgaataacaaccaagaaaacattccagtaccatgaaaaaaaatacgttccagtttacattcagctatgatttttaaaaactgaaccctaagttaattagttcaaatacagtttcattagaaaatatctttgcatttttcaaagaaatatataggataatataaatcctggctttaattcaagaattaataaaaaaaatattaagaatcccagttcagttctgattcaggaataagataactgataatttgaggctagaatttagtctacagatgttagaggccctacagtagaacrctccgagcagaggaaacagcatctgtgaaggcctagaggcaaaaggaagcagggtatgtttgaaacactagaggtcagtgtgagtggagttcagactgatggcaagttactgatcatgagaggcttatgaaccgtgataagaagttcggactccatcctaaggacggtga

SEQ ID NO: 623320 - DNA, 620 bp, Homo sapiens
ataaatgattacatgattcaaattagatcacaaacacctatattattattagatccattcctccagcccaaatgggggtggtaagtatacgttgttagaccagtgtaactaacttcaacaactttttgttttgttctgttttgcaaatccacccaagaatgcattaacttcaacaattttttaaaaacaatttccacaatcctctccttgtgtctcaaccatgctcaggaattacaagtacaataatctcctcaacctcccctagcctttcctagctcagaaatccgacataggccacttcrcatgcctgatcagataagctttcccaatgctgaaaaccaactgcttctaaccttttaaacctgatttccatgaaaactcaggggtgaaagaaacaaataatccaaccaaatcagttccttcttattgaaagagttcttcatctttaatctgaaatcctaaataattttttctatgaatcaattgcttctgagatgagaggtacaagacactacaaactatgaccacacaaaagatttttaaaagcttttgattcacagtgagttaacctacaaacttgaagttactagacaatagtacttttagtctactctttaggt

SEQ ID NO: 623321 - DNA, 627 bp, Homo sapiens
tatttaagtcacaagaacaagctatttaattatattacttttagtttctcttttaataaaraatagataatgctatcattctagatactaaataagtattttcttaacataatattactatccactttatcttgtagaagaaataactaaaatacatctgtcttcactcctgtatttgtttgcattttaaggattaaagacagaaatagaaatgtaaacaactttattttgaaaatatttcaacactgcaaatatctctgggtctgatattctagtaatctaattggctagtaattgatgttagtgtgatttattgttgaaggctaaatgtgtttttcagtttcaagaaaattgcttttaataattgcctagaacaagaggttgatttggcagcaagatgttgacgggaagttagagaagtcaataaaggaagtttttagctgagagagagtgattattcactcccatagcctctgcattgttatccattagccacgataagaaccttagggaattctgagagtgtgtccaggaaaggatctgtcaaactagaatagtatctcctccttgagaaaggaaataaccaaggattccgcagctgagaggctgccagggctagtgaaatag

SEQ ID NO: 623322 - DNA, 574 bp, Homo sapiens
tatatgacctagcccttgactcacagtaaacttgagagactaggcttacaataaatgattcgaggataacttattcagttatctaaacaacggatgggactggatcactgaggcagtgacctgtgggcaggcgggacaatgcagaggtcaattatgtgccatcggagttgatcagatggacctgggcttaaatccctgtgccactgcttagcagctgtgtgatctaagacaacttactcaggtttcattttctgcactgtgaagtagaaataataataccttctcataagctgttgaagcattacaaacaataaagcaggtaaaatkcttaatacaatgtttgacacacaaaattgccattatcgttattaacgctttattgttgcgtcatctatgagtatttatgatggaggaaactgatttagactaggggcacattgaattctttggagggacttcagggaggtatcttaagagccgtgagagagtctcaggaggcagtgaagactccctcactgctggaacaatgctgtgggctcaccctaggccttcaggaggggagagagatgtgcaa

SEQ ID NO: 623323 - DNA, 613 bp, Homo sapiens
tcggcctcccaaagtgctgggattacaggcatgagccatcgcgcccggccaattctatgttttttatacacattcttctcataaagtgtgcgcatctatacactgtaagtgtgtgtatgttgtggtatttatataatcaaatacaatttaccaccattgttcaagatcgcaagatcgtgcttcattcttatctctactttttagcatggtttccattagctattcctgagaggaaattcacagtccttgcattttacagatggtgaaagtggtttagaggaggtcaatggcttaagcaaggtcacagatcaagttttagcaacatttggcttaaatcgggatcaataacctctgactgtccagcctgatccttacagggtctgcctgtcctggggcctgggccacrttccaaattgggtcatctggtgcatgctgcctgtctgaaattccccttgtggttttgctcacatctggtgtttttcacttctctttctaaacacgtgctttgatcctattgctgctacagcagaaagatgtccatggttccaaggagcatagctaatttagtgagaggtgaaagatactcctctcaacaggacttctaaaaataaac

SEQ ID NO: 623324 - DNA, 574 bp, Homo sapiens
  misc_feature 1, 2, 3: n = A,T,C or G
nnnttatcctggtattatcatggttttactgactaaaagaggacacgtgtaacaaaatcagtaaggagggtactccaagaatccatgttaaagttaatgagggcttgaacccaaacataaaggatggaaatgatgtaataaaataccttttgaaagttatatatttaaaaattttcggctaacattctacttagaggtgaatgaagaaagcagaggagtctaatgcaatgcgtgacttgtagctcaggtaaaggggtggcaggtgacgcttaaatactagaaatataagaagcagcacaggtttggttttatctktgagaacaatggagtggaggtatgctttacatgcaattatttatgggatattcaaaacagatatatatcaagcaaaaaacttgggcccaaaaaacaagtttgaaggtatatttgggagttaccagtaatataggtaactgttgaagctctaaatatagaagacaaactagaggagcttgtttcttgaagaattcttgtcacacttgacattttttacagagatttcttaaaacaggggcatatcttctttggctaacat

SEQ ID NO: 623325 - DNA, 406 bp, Homo sapiens
aatgtaaccaatgatactttcttttcctgacaatcgtatttaaacttgctatcttcctcccatccctcagcctctagcatatcctgttcttccttgctttattcttccaacgcttatcattttacctgacttatttttctgggctgttgtctattcctccccctgtaacccatgctctatgagagcaaggatttatgtattttgctcactactatatcctcagtgtcttgactattcctggcacagagtagctgcttaataaataatttactgaatgagtgaatacatccacaaaagkagtgattatgaaaattgggtcataatttgaaaagtggaaagtacgttactgtaagctgtgatgtgcacagtggctgtggcaatgtggtgtagcatagtctgggagctg

SEQ ID NO: 623326 - DNA, 400 bp, Homo sapiens
tgttcaaatgtaaccaatgatactttcttttcctgacaatcgtatttaaacttgctatcttcctcccatccctcagcctctagcatatcctgttcttccttgctttattcttccaacgcttatcattttacctgacttatttttctgggctgttgtctattcctccccctgtaacccatgctctatgagagcaaggatttatgtattttgctcactactatatcctcagtgtcttgactattcctggcacagagtagctgcttaataaataatttactgaatgagtgaatacatccacaaaaggagtgattatgaaaattgggtcataatttgaaaagtggaaagtaygttactgtaagctgtgatgtgcacagtggctgtggcaatgtggtgtagcata

SEQ ID NO: 623327 - DNA, 651 bp, Homo sapiens
gtgttcatggtcagcagccaagtagagcgggtaggacatttgcttcagagttgagcaagcctcagaatcccatctctgcacattctagctgtgtaaacttgtaggcagattacctactctaaaacttagtttccacatttgcaaaaggggaacaataatagctccacctcattattttgtcatgaggatttcatggatgatacatgtaatgcacattgaaaaactcaacaaatgttagaaatkgtaaatagttctggaaggcatttatcattcccattttacagatgagaaaattaaagctcagagagtttaagggctagagtcatacaattggttagtaagatagctaggatttagctcaccctcccagctccatatccacagtacttgctgccccaccattgagtgtagacaattgggggtggctctaagccatgggccaaatatgtctgtccctatcatcatggaatgacatgttatttattaagcccatatatgcttgaggtgccaggaaatgaatgcttctggggtgaggtaggctcttcatgtgcagccttcatgtacagattccagccaaggaaaccaagcctggcactaatcccttgtccaagcccagagacgctgtgcccacggagtaggtcagaagtcctt

SEQ ID NO: 623328 - DNA, 651 bp, Homo sapiens
gtgttcatggtcagcagccaagtagagcgggtaggacatttgcttcagagttgagcaagcctcagaatcccatctctgcacattctagctgtgtaaacttgtaggcagattacctactctaaaacttagtttccacatttgcaaaaggggaacaataatagctccacctcattattttgtcatgaggatttcatggatgatacatgtaatgcacattgaaaaactcaacaaatgttagaaatggtaaatagktctggaaggcatttatcattcccattttacagatgagaaaattaaagctcagagagtttaagggctagagtcatacaattggttagtaagatagctaggatttagctcaccctcccagctccatatccacagtacttgctgccccaccattgagtgtagacaattgggggtggctctaagccatgggccaaatatgtctgtccctatcatcatggaatgacatgttatttattaagcccatatatgcttgaggtgccaggaaatgaatgcttctggggtgaggtaggctcttcatgtgcagccttcatgtacagattccagccaaggaaaccaagcctggcactaatcccttgtccaagcccagagacgctgtgcccacggagtaggtcagaagtcctt

SEQ ID NO: 623329 - DNA, 651 bp, Homo sapiens
gtgttcatggtcagcagccaagtagagcgggtaggacatttgcttcagagttgagcaagcctcagaatcccatctctgcacattctagctgtgtaaacttgtaggcagattacctactctaaaacttagtttccacatttgcaaaaggggaacaataatagctccacctcattattttgtcatgaggatttcatggatgatacatgtaatgcacattgaaaaactcaacaaatgttagaaatggtaaatagttctggaaggcatttatcattcccattttacagatgagaaaattaaagctcagagagtttaagggctagagtcatacaattggttagtaagatagctaggatttagctcaccctcccagctccatatccacagtacttgctgccccaccattgagtgtagacaattggggrtggctctaagccatgggccaaatatgtctgtccctatcatcatggaatgacatgttatttattaagcccatatatgcttgaggtgccaggaaatgaatgcttctggggtgaggtaggctcttcatgtgcagccttcatgtacagattccagccaaggaaaccaagcctggcactaatcccttgtccaagcccagagacgctgtgcccacggagtaggtcagaagtcctt

SEQ ID NO: 623330 - DNA, 597 bp, Homo sapiens
tttccccatgtgaaaatgagaataacgtctgttctgcctacttcacttgaactatttgaggataaaagaaggtaaaatgcaataatggtcatgaagattttataaaccttgaagtgatgtacaagtataccatactgtttcacttttattactattataactgtttaaaaaagcatttgtgaccagtacaatcctggcttttctctggagactaacatccagtttcatagttattttacttttgatagggaaaagggaattattcctgttatatattgcaatatttaggatcctctagcaatttctcaggctawgacttcatgttcccagaagagggcagcaaaactccaaaggctctgccttttcctcaattaaaatgtctaaagcagtttttccttgagaggaaaagaactatactgtaaagaatagccctttaaaaatgatggtatttaggtgacaaagctaatcctattacaataaatataacattcattccaaataagatttttccttttctctgtcctgtgaagaaaataattgactgtttcttcaatctcatgttaattatttgacttatatttccagaaactcctaccc

SEQ ID NO: 623331 - DNA, 597 bp, Homo sapiens
tttccccatgtgaaaatgagaataacgtctgttctgcctacttcacttgaactatttgaggataaaagaaggtaaaatgcaataatggtcatgaagattttataaaccttgaagtgatgtacaagtataccatactgtttcacttttattactattataactgtttaaaaaagcatttgtgaccagtacaatcctggcttttctctggagactaacatccagtttcatagttattttacttttgatagggaaaagggaattattcctgttatatattgcaatatttaggatcctctagcaatttctcaggctaagacttcatgttcccagaagagggcagcaamactccaaaggctctgccttttcctcaattaaaatgtctaaagcagtttttccttgagaggaaaagaactatactgtaaagaatagccctttaaaaatgatggtatttaggtgacaaagctaatcctattacaataaatataacattcattccaaataagatttttccttttctctgtcctgtgaagaaaataattgactgtttcttcaatctcatgttaattatttgacttatatttccagaaactcctaccc

SEQ ID NO: 623332 - DNA, 539 bp, Homo sapiens
gctagatcttctttagttagaaacattaagggcatttactttattacaacatttaaagtgcattctaatcttcatgaggaattttaggtaaaagaccgtatcctgagattcatgcaagtctttggcattatgttactatttaaagtaagtaatatgtagtggcttctctgacatattctttctaagagagttaaggaaaatagttgtaactaaaarcaaacattgaaacagtttaaggtaggtttacgtagcaacagaattattcgttatgtttacagataattaactcatatttatactttgctgattttctctggcacctttacaagatttttttatttttgtaatataaaaagtaattatgtttgaaaaagtagttaaggatgtttgaagaatctagaaaagcataaataaaatgtccacaatcatgctgccattaattttttggtatacgtctttggtttttttacccttagatttagaaaagctgttgatttatttatatatatatatatatatatatatatatgtatatatat

SEQ ID NO: 623333 - DNA, 539 bp, Homo sapiens
gctagatcttctttagttagaaacattaagggcatttactttattacaacatttaaagtgcattctaatcttcatgaggaattttaggtaaaagaccgtatcctgagattcatgcaagtctttggcattatgttactatttaaagtaagtaatatgtagtggcttctctgacatattctttctaagagagttaaggaaaatagttgtaactaaaagcaaacattgaaacagtttaaggtaggtttacgtagcaacagaattattcgttatgtttacagataattaactcatatttawactttgctgattttctctggcacctttacaagatttttttatttttgtaatataaaaagtaattatgtttgaaaaagtagttaaggatgtttgaagaatctagaaaagcataaataaaatgtccacaatcatgctgccattaattttttggtatacgtctttggtttttttacccttagatttagaaaagctgttgatttatttatatatatatatatatatatatatatatgtatatatat

SEQ ID NO: 623334 - DNA, 539 bp, Homo sapiens
gctagatcttctttagttagaaacattaagggcatttactttattacaacatttaaagtgcattctaatcttcatgaggaattttaggtaaaagaccgtatcctgagattcatgcaagtctttggcattatgttactatttaaagtaagtaatatgtagtggcttctctgacatattctttctaagagagttaaggaaaatagttgtaactaaaagcaaacattgaaacagtttaaggtaggtttacgtagcaacagaattattcgttatgtttacagataattaactcatatttatactttgctgattttctctggcacctttacaagatttttttatttttgtaatataaaaagtaattatgtttgaaaaagtagttaaggatgtttgaagaatctagaaaagcrtaaataaaatgtccacaatcatgctgccattaattttttggtatacgtctttggtttttttacccttagatttagaaaagctgttgatttatttatatatatatatatatatatatatatatgtatatatat

SEQ ID NO: 623335 - DNA, 473 bp, Homo sapiens
tatcctgagattcatgcaagtctttggcattatgttactatttaaagtaagtaatatgtagtggcttctctgacatattctttctaagagagttaaggaaaatagttgtaactaaaagcaaacattgaaacagtttaaggtaggtttacgtagcaacagaattattcgttatgtttacagataattaactcatatttatactttgctgattttctctggcacctttacaagatttttttatttttgtaatataaaaagtaattatgtttgaaaaagtagttaaggatgtttgaagaatctagaaaagcataaataaaatgtccacaatcatgctgccattaattttttggtatacgtctttggtttttttacccttagatttagaaaagctgttgatttatttatatatatatatatatatatatatatatrtatatatatattttttttttttagtttatgaacagatctac

SEQ ID NO: 623336 - DNA, 558 bp, Homo sapiens
tattatttattatagacttattatagyttaaaactttattttaatttatctcccatttcaagatccacgtttgctatatgttgtgtcagataataaaaatgccataaggaaaacagaggagtgatcttttttaatatgtcattattttctatagttctttagtggtatggacatggaataaggtggcattttgtgggacagtataccaaacttagtgataaaatttatacttttaattttggaggacaaaagtcttgtattctcagccttgtggataagacagtgctctgagctgtctgaggtttcctaaattgggattcaacatcatgaagggtatgtgtctggatagtttatttgttggtttgggaaggtgagtttttgtcttttttccccctctgagttgatttctttagttggagagaagcagaccagatgaagaaaatactttatctcttatggcatttttggtttaccacattagtgatgacccgtcttctctgagcagcaggccatgcttctctgttcagtagttcagttttcactaacttaactgcagat

SEQ ID NO: 623337 - DNA, 601 bp, Homo sapiens
atattttgtcaactcttccaacagggaagaaatagtatcttaatgttacaagttgcattcccctgattagccatgaagttgggtatattttcactcatttattgacaatctgtatgttttcctacagattgtctattcacatcctttgtcaaaatacatttgtttttatttgtctaggagctacttgcaaataatgactattgattgttttaagtgctacaactaatttctctcaggctgttttgacatttcttaaaaacacaattaaagacactgaaatttctcatgcttataattacaacactttgggaggccgagatgggaggatcacttgaggcccagagtatgagaccaagctgggcagcagagcgagacaccaagytgggcagcagatcaagaccctgtcttaacaaataaataaataaaataaaggtatgcaattttcagttgattcttcatcattaatttcacctgattctttatgtatttgtttcatgactcccggggttttccccaaccattcatcttactaaaattcaatcttcaaataaaatctggtcacctctctttgctctcattcatagttgcccttgatttttca

SEQ ID NO: 623338 - DNA, 638 bp, Homo sapiens
ctgagaggcagacagcgtgcccctggcagccttgaaatgaggrgtcatttggggatcctgaaagctgaggttctagcccaggaagtgccccagagcccggccatcctgacacactgactctccttccatgctgggagacagcagctctgccctgcccacctgcccagaagtggccagctggctttttgccaggttctgccctctgcagccccagagctacacctgtcctttcttagaagctgccaatggccatgagtgtccaggccactctgggaaggactgtagtaaaatagtcaatgtgtttaatccatgtttcccactggcccacccatgcctttgacccacaggacagtggccacgcatgtgcttgggaaaaccaccataacaggtccagacaagagtgctggcctgagcatgggtcacgctaacgtgggtggctcaattaaggaacagggatggacttcctgtcctgtcgcccccacacactcctgcttcttctagtggccatttctgtgtgaggctggagcacagtggaaggtctgtgaacctgtattaagcaaaatagaaactaaatgtggacttggactgaaaggaaattgagttagacaatgaaaatggattggaatggaatggaattc

SEQ ID NO: 623339 - DNA, 638 bp, Homo sapiens
ctgagaggcagacagcgtgcccctggcagccttgaaatgaggggtcatttggggatcctgaaagctgaggttctagcccaggaagtgccccagagcccggccatcctgacacactgactctccttccatgctgggagacagcagctctgccctgcccacctgcccagaagtggccagctggctttttgccaggttctgccctctgcagccccagagctacacctgtcctttcttagaagctgccaatggccatgagtgtccaggmcactctgggaaggactgtagtaaaatagtcaatgtgtttaatccatgtttcccactggcccacccatgcctttgacccacaggacagtggccacgcatgtgcttgggaaaaccaccataacaggtccagacaagagtgctggcctgagcatgggtcacgctaacgtgggtggctcaattaaggaacagggatggacttcctgtcctgtcgcccccacacactcctgcttcttctagtggccatttctgtgtgaggctggagcacagtggaaggtctgtgaacctgtattaagcaaaatagaaactaaatgtggacttggactgaaaggaaattgagttagacaatgaaaatggattggaatggaatggaattc

SEQ ID NO: 623340 - DNA, 428 bp, Homo sapiens
atgaatgactgtcagaatattttgttgggcagtcctgatttaaaactaagactggcttgtggttaaatgaataagtttggtttttgaatattaatagtaattccaattcagtgaatgctatcactgtttacyccttctaaagatatgattagactttgttaataatgtttaagatggtgagtaccatcttaaaacttattggagattggttttatatttatatttatattggtttatatttagatttatatgactggttatgtgaatatatttaaatactggggaaattccttcactgtctcagaaccaagcaagatgcacctgtgttttgtgtttatttgcctcttaaaggcaagggttgaagataaggtagcaatgtcttctttgtattgttggccttaactatgccagtgtcattagaattccct

SEQ ID NO: 623341 - DNA, 428 bp, Homo sapiens
atgaatgactgtcagaatattttgttgggcagtcctgatttaaaactaagactggcttgtggttaaatgaataagtttggtttttgaatattaatagtaattccaattcagtgaatgctatcactgtttaccccttctaaagatatgattagactttgttaataatgtttaagatggtgagtaccatcttaaaacttattgragattggttttatatttatatttatattggtttatatttagatttatatgactggttatgtgaatatatttaaatactggggaaattccttcactgtctcagaaccaagcaagatgcacctgtgttttgtgtttatttgcctcttaaaggcaagggttgaagataaggtagcaatgtcttctttgtattgttggccttaactatgccagtgtcattagaattccct

SEQ ID NO: 623342 - DNA, 428 bp, Homo sapiens
atgaatgactgtcagaatattttgttgggcagtcctgatttaaaactaagactggcttgtggttaaatgaataagtttggtttttgaatattaatagtaattccaattcagtgaatgctatcactgtttaccccttctaaagatatgattagactttgttaataatgtttaagatggtgagtaccatcttaaaacttattggagattggttttatatttatatttatattggtttatatttagatttatatgactggttatgtgaatatatttaaatactggggaaattccttcactgtctcagaaccaagcaagatrcacctgtgttttgtgtttatttgcctcttaaaggcaagggttgaagataaggtagcaatgtcttctttgtattgttggccttaactatgccagtgtcattagaattccct

SEQ ID NO: 623343 - DNA, 428 bp, Homo sapiens
atgaatgactgtcagaatattttgttgggcagtcctgatttaaaactaagactggcttgtggttaaatgaataagtttggtttttgaatattaatagtaattccaattcagtgaatgctatcactgtttaccccttctaaagatatgattagactttgttaataatgtttaagatggtgagtaccatcttaaaacttattggagattggttttatatttatatttatattggtttatatttagatttatatgactggttatgtgaatatatttaaatactggggaaattccttcactgtctcagaaccaagcaagatgcacctgtrttttgtgtttatttgcctcttaaaggcaagggttgaagataaggtagcaatgtcttctttgtattgttggccttaactatgccagtgtcattagaattccct

SEQ ID NO: 623344 - DNA, 541 bp, Homo sapiens
gtaaatcattcaaatatataagatagtcctgcaagttgaaactctagtaggattttacaagatcaggatgatcttgttaaaaaaaagtcacgaaaagtcaccaagagtgaaaggtgactccaagcaataatgtatctagacatggaaatatttcaaaagtcttatttcacctattccttaataccagtgcaataaggagaggtggttaatgctcctttcatattcagttaattctgcaggaccgtgctataggttgaataattagaaaatccctttaactactgggaagtgaggagcscctctgcccggccaccaccccgtctgggaggtgtgcccaacagctcattgagaacgggccaggatgacaatggcggctttgtggaatagaaaggcgggaaaggtggggaaaagattgagaaatcggatggttgccgtgtctgtgtagaaagaagtagacatgggagacttttcattttgttctgcactaagaaaaattcttctgccttgggatcctgttgatctgtgaccttacccccaaccc

SEQ ID NO: 623345 - DNA, 647 bp, Homo sapiens
atgttcagacaatctcagtttgttctcagtgcagcaatccttttaaattacatccatcactcttttgctcaagcacacttcatggctccctattttagtaaagtaaaagaaaaagccctttcaatggccttcacaggctggtgtctctgtattactccccgtccctccccctagcacacatggctcactctcctccagtcacaccaatgtccttgggaagtcttccaccaagtctttgttcaaatgacatcttctcaatcaccactctgtttagaaatagaatcacctcctaacccacacccttctctgccctatttcttctctccagtccatttatcacctttcaatatactatacaattttcttttttattattgtgtttattgcttattttctattcctcacacactagaatrggagctttgcaggcatttctgccatgcttttcattgaggtattctaaggtcttagaacagtgcctgacgtatagttagtagttactcaatagatatttgttgagtgaatgaatgaggaaaggaaagaatatgcccaatattcatgatcatttattaagtggtaacaaaaataatgtgaaacgtaagtttaattatatttgcttctctatactttggaccacatgtctatat

SEQ ID NO: 623346 - DNA, 384 bp, Homo sapiens
gtaaatcagctttacaaagtgagaccttgttgttagagggtagcaatgaattactgcctctactggacatcacttcatgggactcattactttttccaaaacctaattatcttaccacatcacaaagtattttacttagtcattagatgttttgaattacagaggtgaaattttctattatttacagacaaaatacgggaagggtagataatctagagagagagagagaacagagtgtttctaaatttatgctattgacaataataaaagttcagagaaaaagagcaaaartcaccaaattttaaacacaacatgaatatctgcttcaaccaatgaagaaatgaagaaataaaaacatgtaaagcatcaagacaaaaccctgcc

SEQ ID NO: 623347 - DNA, 511 bp, Homo sapiens
ctttgtgagaaacccctcagttgccttcctaaagagaaaggcattccattagtataagtaaaggaagataagatgtatcttgtaaagtatagaaggtttgtcacgagaacattttgtaaagatagaagtttcaggtgattaacaagaagtactagataaagtgagtagaaaaattargaatcagtacatacgtgatcccagacttgctgtgggatgaaggtggtctgattcacctccacatgatgtgagctttctgctctgcctaatggccaggtgtatttatgtggtggaggcaaagacattccacgactatagggagatagctcctttaaagcacatgctccactctattctactgccttactcaccaagtgagtttttgatagttattttattctccaggaaagactttcattctttgaatagcattatctgatgaactgacataagtatttcttttcttttctttgtttcttttgagacaaggtctttctctgtcactcaggctgga

SEQ ID NO: 623348 - DNA, 511 bp, Homo sapiens
ctttgtgagaaacccctcagttgccttcctaaagagaaaggcattccattagtataagtaaaggaagataagatgtatcttgtaaagtatagaaggtttgtcacgagaacattttgtaaagatagaagtttcaggtgattaacaagaagtactagataaagtgagtagaaaaattaagaatcagtacatacgtgatcccagacttgctgtgggatgaaggtggtctgattcacctccacatgatgtgagctttctgctctgcctaatggycaggtgtatttatgtggtggaggcaaagacattccacgactatagggagatagctcctttaaagcacatgctccactctattctactgccttactcaccaagtgagtttttgatagttattttattctccaggaaagactttcattctttgaatagcattatctgatgaactgacataagtatttcttttcttttctttgtttcttttgagacaaggtctttctctgtcactcaggctgga

SEQ ID NO: 623349 - DNA, 511 bp, Homo sapiens
ctttgtgagaaacccctcagttgccttcctaaagagaaaggcattccattagtataagtaaaggaagataagatgtatcttgtaaagtatagaaggtttgtcacgagaacattttgtaaagatagaagtttcaggtgattaacaagaagtactagataaagtgagtagaaaaattaagaatcagtacatacgtgatcccagacttgctgtgggatgaaggtggtctgattcacctccacatgatgtgagctttctgctctgcctaatggccaggtgtatttatgtggtggaggcaaagacattccamgactatagggagatagctcctttaaagcacatgctccactctattctactgccttactcaccaagtgagtttttgatagttattttattctccaggaaagactttcattctttgaatagcattatctgatgaactgacataagtatttcttttcttttctttgtttcttttgagacaaggtctttctctgtcactcaggctgga

SEQ ID NO: 623350 - DNA, 578 bp, Homo sapiens
ccctagctgttgctcaagccactcaggagggtacaagctgtattacatggtggcatccatgagatgctaactctgcaggcacacagagttcatgagctgtggaagcatggctacctccatctaggtttcaaaagatgccttggagagccttggagaataggcagagaacttctaccaggagaagactgccactgaaaattcccaccagagcaatgccmagcagaggcatgaggttggagtgacctgtgacatctgagacatgtagggccaccagtgttcagtgacagccttggggagccacagccacttgactctaacccataacagcttcagcatgagctgagctcagacaatccacgggagtaggatcccctggagtcttggggacccaacccctgccccagtgtgtctggaataagggacgtggagtcaaagaatattattctcaggcctcaagattgaatgttgtttgccttgttgcgttttagacttactcaggacctattacccctttctgcctttctgttactttttcttagaatgggaatgtctatctgatgcctgtcccgctactgtat

SEQ ID NO: 623351 - DNA, 578 bp, Homo sapiens
ccctagctgttgctcaagccactcaggagggtacaagctgtattacatggtggcatccatgagatgctaactctgcaggcacacagagttcatgagctgtggaagcatggctacctccatctaggtttcaaaagatgccttggagagccttggagaataggcagagaacttctaccaggagaagactgccactgaaaattcccaccagagcaatgcccagcagaggcatgaggttggagtgacctgtgacatctgagacatgtagggccaccagtgttcagtgacagccttggggagccacagccacttgactctaacccataacagcttcagcatgagctgagctcagayaatccacgggagtaggatcccctggagtcttggggacccaacccctgccccagtgtgtctggaataagggacgtggagtcaaagaatattattctcaggcctcaagattgaatgttgtttgccttgttgcgttttagacttactcaggacctattacccctttctgcctttctgttactttttcttagaatgggaatgtctatctgatgcctgtcccgctactgtat

SEQ ID NO: 623352 - DNA, 640 bp, Homo sapiens
ttttcccagggccacccaccacaggcccatagggaatactgccagrctaacactgatgttcactcaaggcccaagggcatgaaagttactaggtgtgggactcacccttctggcccagggcaggtccagaaatgccctccaagagccaatacccagaatcgaggacaacaagtgcctgcttggtgctgtaccccactgtggccaactcattacttaaactgatttttgtttctcatgaaggtgcctgttttgtgtagatggttgttaaatgtggtgtttctgtagggaggacaatcagtggagggttctgttgggccattttgctccgcctcatgctccccacatataaattcattttaaacttcacatttaaatattggcattttaatttcaaagtaagtactgttttgtttcttcactttctactttatacttcagttgtgagttcctatgtcactgcttgcactgttatttgtttatttttaaaaatttctggttttgcttttgcttctacttggaacatccctttacactcttttgggttgttacttgccagtttagatgctttcttacccaggaaatattaaagttctatactagagccttgtactttattagctggaaatatttgcatgtagca

SEQ ID NO: 623353 - DNA, 640 bp, Homo sapiens
ttttcccagggccacccaccacaggcccatagggaatactgccagactaacactgatgttcactcaaggcccaagggcatgaaagttactaggtgtgggactcacccttctggcccagggcaggtccagaaatgccctccaagagccaatacccagaatcgaggacaacaagtgcctgcttggtgctgtaccccactgtggccaactcrttacttaaactgatttttgtttctcatgaaggtgcctgttttgtgtagatggttgttaaatgtggtgtttctgtagggaggacaatcagtggagggttctgttgggccattttgctccgcctcatgctccccacatataaattcattttaaacttcacatttaaatattggcattttaatttcaaagtaagtactgttttgtttcttcactttctactttatacttcagttgtgagttcctatgtcactgcttgcactgttatttgtttatttttaaaaatttctggttttgcttttgcttctacttggaacatccctttacactcttttgggttgttacttgccagtttagatgctttcttacccaggaaatattaaagttctatactagagccttgtactttattagctggaaatatttgcatgtagca

SEQ ID NO: 623354 - DNA, 640 bp, Homo sapiens
ttttcccagggccacccaccacaggcccatagggaatactgccagactaacactgatgttcactcaaggcccaagggcatgaaagttactaggtgtgggactcacccttctggcccagggcaggtccagaaatgccctccaagagccaatacccagaatcgaggacaacaagtgcctgcttggtgctgtaccccactgtggccaactcaktacttaaactgatttttgtttctcatgaaggtgcctgttttgtgtagatggttgttaaatgtggtgtttctgtagggaggacaatcagtggagggttctgttgggccattttgctccgcctcatgctccccacatataaattcattttaaacttcacatttaaatattggcattttaatttcaaagtaagtactgttttgtttcttcactttctactttatacttcagttgtgagttcctatgtcactgcttgcactgttatttgtttatttttaaaaatttctggttttgcttttgcttctacttggaacatccctttacactcttttgggttgttacttgccagtttagatgctttcttacccaggaaatattaaagttctatactagagccttgtactttattagctggaaatatttgcatgtagca

SEQ ID NO: 623355 - DNA, 642 bp, Homo sapiens
gcctgttttgtgtagatggttgttaaatgtggtgtttctgtagggaggacaatcagtggagggttctgttgggccattttgctccgcctcatgctccccacatataaattcattttaaacttcacatttaaatattggcattttaatttcaaagtaagtactgttttgtttcttcactttctactttatacttcagttgtgagttcctatgtcactgcttgcactgttatttgtttatttttaaaaatttctggttttgcttttgcttctacttggaacatccctttacactcttttgggttgttacttgccagtttagatgctttcttacccaggaaatattaaagttctatactagagccttgtactttattagctggaaatatttgcatgtagcagatcatatttaaatgatacatcattgttcctatttcatttatccactcctcaaagcctgtgactattttaattaatatcatatatcmgtgcttataaacaaggcctgtccataaatgttgttaggaactgttttacttattttgtttttattccttagttttaacatctttattataaaatcaaacacaaatacagaaagccatacaaaacaaatatatagcttaatgaattatattatgttgg

SEQ ID NO: 623356 - DNA, 558 bp, Homo sapiens
gaaaatcaccttcactagaggaagacaagaaggaaagaaacaaggaagagaagatcgcaaaacaaccacaaaacaacaaaatggcaaaagtaagtccttatcaataatatcattgaatgtaaatggactaaactctgtaatcaaaaatacatatactggctgactgaataaaaaaacaagactcattgatctgctgcctacaagaaatacacttcatctacatagacacacagaaactgaaaataaagggataaaaacagatattttgtgccaatggaaaccaaaaatagagtacgattagccatacttacaacagacaaaatagatttcaagacaaaaattataagaagagacaagatcactatataatggtaaaaaagtcactacagcaagaggatataacaattctaaagatagatgtacccaraactggagcacccaatatataaaagaaatattaggctgggtgcagtggctcatgcctgttaataccagcactttgagaggctgaggcaggcagatcacaagatcaggagattgagaccatcctgggtaaaa

SEQ ID NO: 623357 - DNA, 507 bp, Homo sapiens
tttcaaaagctccaccttatttcattcgcattttatttttaacttttaggttcatggatacaaatcaggtttgttacrtagataaacttgtattatgggggtttgttgcacatattatttgaccatctaggtattaagcctagtaaccgttagttattttttctgatcttctccctcccctcactctccaccctctgaaaggccccagtgtgtgttgttcccctctgtttatttgttctcctcatttagctcccacttgtcaatgagaacatgtggcatttaattttctgttcctgtgttagtttgctaaagataatggcctccagctccatccatgtccctgaaaagacatgacctcattctttttcatggcagcatcctattctgtggtgcatatatactacattttgtttattcagactatcattgatgggcatttaggttgattccatgtattggctattgtgaatagtgcttcaatgaacatacacatgcgtgtgtttttat

SEQ ID NO: 623358 - DNA, 631 bp, Homo sapiens
  misc_feature 557: n = A,T,C or G
atgatcatatgtcctagaataatgcgattgcatttcaccattgcaatatgtcaatagttgtaaaatcagcagcagttgatccagtttggaaatatgagggtggatgtaacacagtggaataaagagacacgtaggtaaggcagagggtgttgaaaatggtgtgtgggttgggaaaggaattaaaggacagtgaagtactgaccaactacgcagctggtatttgctagttaatactaaagctgtgaaataagaaagaaagaaatgtgatagcatcttggcgattcttytgggatgaaaaactttttaatacaattttttgttttaagcattggtatttacagaatatcatgctcattaacaactttaaaaagtgacaagattaatgtaccatctgaagctgataattaactggtatcgtaaaggtcttgtaatatagctaaggagaattgttgagatttagccattgaaatgtaattacacacaaaggttgcagcttctttggggaggttgactgatggggtttgaaatgccttgaattattttaaaaatctactttntgatacatagtgacaaatttgaggatatctaaaagtaaatgttaaaatttttgaaataggcggccaatggaaat

SEQ ID NO: 623359 - DNA, 631 bp, Homo sapiens
  misc_feature 557: n = A,T,C or G
atgatcatatgtcctagaataatgcgattgcatttcaccattgcaatatgtcaatagttgtaaaatcagcagcagttgatccagtttggaaatatgagggtggatgtaacacagtggaataaagagacacgtaggtaaggcagagggtgttgaaaatggtgtgtgggttgggaaaggaattaaaggacagtgaagtactgaccaactacgcagctggtatttgctagttaatactaaagctgtgaaataagaaagaaagaaatgtgatagcatcttggcgattcttctgggatgaaaaactttttaatacaattttttgttttaagcattggtatttacagaatatcatgctcattaacaactttaaaaagtgacaagattaatgtaccatctgaagctgataattaactggtatcrtaaaggtcttgtaatatagctaaggagaattgttgagatttagccattgaaatgtaattacacacaaaggttgcagcttctttggggaggttgactgatggggtttgaaatgccttgaattattttaaaaatctactttntgatacatagtgacaaatttgaggatatctaaaagtaaatgttaaaatttttgaaataggcggccaatggaaat

SEQ ID NO: 623360 - DNA, 566 bp, Homo sapiens
agaggaagagttagtacaaaagccctaagaaatgaagtgacaagttcaagaaacaaacaaacaaacaaacaaaaagacagcttgtctatgtcatagtaagcaagagggaaatggcttaagatgaaatcrgtaaactagacagaagccggtcatggaagctttgtaagttctgctgaagaattcagattttactctgaatacaacaggaagctagttgaagattttaagcaaggaatgggcttgatctgatttataatattggggttttttgtttgtctgtttgttttttgagacagagtcttgctctgttgcccaggctggagtgcagtggcacaaccttggctcactgtaacctccgcctcctcggttccagtgattcacctgcctcagtctcccgagtagttgggattacaggtgcacaccacaacaccctgctaacttttgtatctttagtagagatggggtttcaccatgttggccaggctggtctcgaactcctgacctcaagtgatgcacccatcagcctcccaaagtgctgggattacaagtgtgagtcaccacactcc

SEQ ID NO: 623361 - DNA, 549 bp, Homo sapiens
  misc_feature 1, 2, 3, 4, 5, 6, 7, 8, 9, 10, 11, 12, 13, 14, 15, 16, 17,18, 19, 20, 21, 22, 23, 24, 25, 26, 27, 28, 29, 30, 31,32, 33, 34, 35, 36, 37, 38, 39, 40, 41, 42, 43: n = A,T,C or G
nnnnnnnnnnnnnnnnnnnnnnnnnnnnnnnnnnnnnnnnnnntcagattgttcactgttgtcatatagaaatgctattgatttttatatgttgattttgtatcctgcaactttactgaatttatcagttctaatagttttttggtgcaatctttaggttttttccaaatataagatcatatcatctgcaaacaagaataatttgacttcttccattccaatctggataccctttatttatttttcttgtctgattgctctaaccatacttcccacactatgtggaataacagtggtgaaattgggcatccttgttgtgttccagatcttcgaggaaaggctttcggcgtttcccctattcagtatgatactagctgtgggtctgtcatatatggcttttattatgttgtggtatattccttgtatccccagtttttttagggtttttaatcatgaarggatgttgaattttatcaaatgctttttcaacatcaataaaaaaccatatgaaatgatcatatggtttttatcctttattctgttgatatg

SEQ ID NO: 623362 - DNA, 588 bp, Homo sapiens
tgtagtgctttattaaatgtattggttaatcaaaataattcaccagtgtgtaaagagaattgtctaaaaataagtaacattaacaatgacaaagacccaaatggtggtccatcaggttccaaagcatctatgttggtgtgttttycattaaactaaccttactaatttgctttaaacctaagcaaataagcaaattaaacaaataattacttacattgtcacactaatttaatattttaaaatataatttcattggttttgtcattttgctataatttaacttaaaaaattgcttaggtactttcactgtataagagctatatatagaaggactttatacccatttttatgtcagtacatatataagtaatattagtaaaagaatttaatatttgtttttctaatattttccctcaaagaagttccatacattattcgaatttgagaaacattgaattaagaagttgtttttctaaatgaaagtttattatttttaattcactatactttttcaatttttggtaatattcccagatttatccatgtatacttaatgttttcttatcttatggtaggcttttttaaggg

SEQ ID NO: 623363 - DNA, 588 bp, Homo sapiens
tgtagtgctttattaaatgtattggttaatcaaaataattcaccagtgtgtaaagagaattgtctaaaaataagtaacattaacaatgacaaagacccaaatggtggtccatcaggttccaaagcatctatgttggtgtgtttttcattaaactaaccttactaatttgctttaaacctaagcaaataagcaaattaaacaaataattacttacattgtcacactaatttaatattttaaaatataatttcattggttttgtcattttgctataatttaacttaaaaaattgcttaggtactttcactgtataagagctatatatagaaggactttatacccatttttatgtcagtacatatataagtaatattagtaaaagaatttaatatttgtttttctaatattttccctcaaagaagttccatacattattcgaatttgagaaacaytgaattaagaagttgtttttctaaatgaaagtttattatttttaattcactatactttttcaatttttggtaatattcccagatttatccatgtatacttaatgttttcttatcttatggtaggcttttttaaggg

SEQ ID NO: 623364 - DNA, 588 bp, Homo sapiens
tgtagtgctttattaaatgtattggttaatcaaaataattcaccagtgtgtaaagagaattgtctaaaaataagtaacattaacaatgacaaagacccaaatggtggtccatcaggttccaaagcatctatgttggtgtgtttttcattaaactaaccttactaatttgctttaaacctaagcaaataagcaaattaaacaaataattacttacattgtcacactaatttaatattttaaaatataatttcattggttttgtcattttgctataatttaacttaaaaaattgcttaggtactttcactgtataagagctatatatagaaggactttatacccatttttatgtcagtacatatataagtaatattagtaaaagaatttaatatttgtttttctaatattttccctcaaagaagttccatacattattcgaatttgagaaacattgaattaagaagttgtttttctaaatgaaagtttattatttttaattcactatactttttcaatttttggtaatattcccagatttatccrtgtatacttaatgttttcttatcttatggtaggcttttttaaggg

SEQ ID NO: 623365 - DNA, 419 bp, Homo sapiens
tatatcaagtttctagtaacataagcatctaagttatgtttaagtggctcatacttcaggttgttgaacaaatctcatgcctctgtaaamtcttatagtgaagtaaaacctacatatttctagtgtttgcatatgaacagattttatagatttacaaattaagattttaatcgactctttcagagttccttgagtgaggagactaaatcaacttactttgatcttttaaaatgctgtattacttttttaagtaaatgctatcacggcttagcaatattatttaaacaatactattataaccttctggaagacactccttagccaaatatattttgaatcaaagattttttgggaatcaaagagacaaaaataactgtcttggctcttcaggtactatgacatagtcccagacataagaa

SEQ ID NO: 623366 - DNA, 601 bp, Homo sapiens
ggggggataggaagtagaagtaatcagggaaagccttcaggccaagatgcaaagctgatacctgcaaaaggagagaggggaggaagggggactcattaggaagcatctcagatacagtagggctttgagaaagtttgagccaacccaatgggaaacaccagtgcaaagatcacacatatagaagccccatattgggcagaaatttccaggccctatgctcaagcatcagctgggagcagctcatgggagtatggtctcaaagtgaaagctgaagcagatcccaacagtgtggcagatggaggttgtcagctcctaacactcctcataacagattcttaacctaagccagttttgtctctctgctgtctctccaactccactacttttgtakgccagaattcaaatatcattatcactagtgatctaatttaaattttcattcaagtgtataagagacggtgtgaatgaataatgatgaaaaaagtaatgtaagctgataccgacttctccagtatgtttagattttgcacataacaatattattttttctctattaaaaaaatgaagatagcctttaaaaataaacaacttgtattgccat

SEQ ID NO: 623367 - DNA, 430 bp, Homo sapiens
gaattcagctataaatccatcttttcctgggctttttttggttggtagactatttattactgcctcaatttcagaacttgttatttgtctgttcagggattcaacttgttcttggttgagtcttgggagggtttatgtgtccaggaatttatccattttgtctagattttctagtttatttgcagagctgtttatagtattctctgatggttggttgtatttctgtagggtcagtggtgatatcccctttttcattttttttttcttttgagatggagtttcattcttgttgccccaggtggagtgcaatggtgtgatcttggctcactgcaaactccacctcctgggttcaagtgattctcctgcctcagcctctcaagtagctgggattacaggcatgtgccackatgcctggctaattttgtatttc

SEQ ID NO: 623368 - DNA, 577 bp, Homo sapiens
attaagaaattagaacttgaatattcagattatgtattcagctctcattggacagtaaatgtctgataagcttattgtttgatcaagcacaggaatgacaaggttaccccaaatcggattcagccaacatttttaaagcactggctattgggaggattaaatgagataaggtatgtcaggagcttagcacagtgcctcgggaacactaataagcactcaacagatattatctactattattatcatgtgccaggtactatcctaagggctcccacgtaggttatctcattttatcctcacaaacactgaatgtcaggttattatttatcttcattgtgcagatggaaaaaaattgagatttggaggttaagtaactcccccattgttgctcrgttattaagtggcggagccaaggttagtgccctgcctgcacctgtgccagtctctaacacaggtaaggcatagagtcatatacttgcccaaactggtagcacaatctggtgtggattttccccacccatacataagtccacactggggaactatccaggtaagttcaaacttctcatcctgggat

SEQ ID NO: 623369 - DNA, 514 bp, Homo sapiens
ttaaccatagagcctagccagttcccagcacacaagaattgcatgataaaacaaggccctgatccaccttgcctgcccatgctaactcctaggccactaaagtccatagttagcaaattctgtgagtaactgcagctcgggctagcaaactagttgcaatggatgtagctgtcagtgaagccagaaactatcagttgtctgaaaatcatggcttccagctgaaatgaaagctccctgaaaagtgttcattttttcatatttctcatgcaggaagacatatcaagcagagatgtagaaamctatctgcaaattgtttgatgctccttctatgagaaggtggagtctgtgtgccctttccttgcacctggcaggacctctgtgatcgtgtctttcttgcatgtggcaggacctctgagaacagaatgttgcagaagtgacactgtgtgagagacttcagagtcaggtttaaaaaaacttgaggcaatccctctgggagccttcagtcaccagttac

SEQ ID NO: 623370 - DNA, 578 bp, Homo sapiens
ataccaaagatctgcagttctccaaacagatcatttttgtttcctgtgcccgcaatgatctcccctgcttgtctagttggcaaactcctattctttttccaagaccctcacatgccattttctttgcatggcctttcccagagagataggaagagaatcaaactactattatagctgtgttttaagaattaaatgagataatacacactaagtgcttagcacagtgagtggcacacagcaaatgcttgatcaactgtagcaatggttattattggccccttatgtagactgtttctgcttctccaggtttttgttatagtgtccagatattatgttctatttgtcttagcaggtgacagtttatttgccagtacaccagagagttaagggcagggacatcatcttttcacctccatgtccctcacattgagcatcacattgagcacatagtaggaactcaattaatagctgatgaatgagcaaatgactgcatcaacayaaggcaatgattgtgtattgtaattagcaaggacatgctggttctacgctgatggctctggccttttcagcagtgatat

SEQ ID NO: 623371 - DNA, 618 bp, Homo sapiens
tggagtagccattctttattcctttactttcttaataaacttgctttcattttactctagggacttgcctctaactctttyttgcaccagatccaagaaccctctgttggtgtctggattgggatctctttctggtaacactagtaataaaaaattgaaattttaaattttaaaaattattatttagcatgtcaccaaaaaatgaactagttaagtacaggtttagtaatataaatcaaggatctgtatgaggaagcctactaaatgctgatgaaagaaatcaaagttctgtataaatggaggtatatccatagatggcaatacacaatattgttaaaattccaattcttctcaactttctgtagattcaacaaaatccagtcaaaataataggaagctattttgtggaaagcaacatgatcctaaaatttaaatgaaatggcaaaagacatagcatactcaacacgatattaaagaagaataataaggaagattcacccattccattttcaatgctactgtactcaagacagtgtggtgttcgtgaatgaatagacacatagatgaatggaccagagtagagaagttcagaaatatagtgcagtgatcattgacaaa

SEQ ID NO: 623372 - DNA, 618 bp, Homo sapiens
tggagtagccattctttattcctttactttcttaataaacttgctttcattttactctagggacttgcctctaactcttttttgcaccagatccaagaaccctctgttggtgtctggattgggatctctttctggtaacactagtaataaaaaattgaaattttaaattttaaaaattattatttagcatgtcaccaaaaaatgaactagttaagtacaggtttagtaatataaatcaaggatctgtatgaggaagcctactaaatgctgatgaaagaaatcaaagttctgtataaatggaggtatatccatagatggcaatacacaatattgttaaaattccaattcttctcaactttctgtagattcaacaaaatccagtcaaaataataggaagctattttgtggaaagcaacatgatcctaaaatttaaatgaaatggcaaaagacatagcatactcaacacgatattaaagaagaataataaggaagattcacccattccattttcaatgcyactgtactcaagacagtgtggtgttcgtgaatgaatagacacatagatgaatggaccagagtagagaagttcagaaatatagtgcagtgatcattgacaaa

SEQ ID NO: 623373 - DNA, 550 bp, Homo sapiens
taggagttcattaggaagtaggggtggtgtgtatttcttcatgatagggacactgacaaaataacaaatcagtcaaagattgaagtacattttgaaattgaaagagatgttcacaataggcagtcacaagtttgtatacatcaactccaccactgtccacactgtccacacaccactgtccacaactcatagaaataattttttttctgatgtaataaatttgaaaggaatgtaaaaatagaagaaagaataattttgaggattgggatcacttgtatatacagagcttaaccattgggaaagagaatygagactcatgtaactatttattactttttaaatgcataaagttaaggctatgagcaataaagaatttattccatcaggaaaatcctgcaaactagttgcctaggaatatagtttgcccctttgggcaaacatatctccaatgaggacaatatattgttcatactggtatagagcttgcttattagacaacagtttgtgtattaagactcatttcaagactcttctctcagccttacagtgt

SEQ ID NO: 623374 - DNA, 550 bp, Homo sapiens
taggagttcattaggaagtaggggtggtgtgtatttcttcatgatagggacactgacaaaataacaaatcagtcaaagattgaagtacattttgaaattgaaagagatgttcacaataggcagtcacaagtttgtatacatcaactccaccactgtccacactgtccacacaccactgtccacaactcatagaaataattttttttctgatgtaataaatttgaaaggaatgtaaaaatagaagaaagaataattttgaggattgggatcacttgtatatacagagcttaaccattgggaaagagaattgagactcatgtaactatttrttactttttaaatgcataaagttaaggctatgagcaataaagaatttattccatcaggaaaatcctgcaaactagttgcctaggaatatagtttgcccctttgggcaaacatatctccaatgaggacaatatattgttcatactggtatagagcttgcttattagacaacagtttgtgtattaagactcatttcaagactcttctctcagccttacagtgt

SEQ ID NO: 623375 - DNA, 550 bp, Homo sapiens
taggagttcattaggaagtaggggtggtgtgtatttcttcatgatagggacactgacaaaataacaaatcagtcaaagattgaagtacattttgaaattgaaagagatgttcacaataggcagtcacaagtttgtatacatcaactccaccactgtccacactgtccacacaccactgtccacaactcatagaaataattttttttctgatgtaataaatttgaaaggaatgtaaaaatagaagaaagaataattttgaggattgggatcacttgtatatacagagcttaaccattgggaaagagaattgagactcatgtaactatttattactttttaaatgcataaagttaaggctatgagcaataaagaatttattccatcaggaaaatcctgcaaactagttgyctaggaatatagtttgcccctttgggcaaacatatctccaatgaggacaatatattgttcatactggtatagagcttgcttattagacaacagtttgtgtattaagactcatttcaagactcttctctcagccttacagtgt

SEQ ID NO: 623376 - DNA, 571 bp, Homo sapiens
ctaaaaaagccaacatcaatgttgtgagctgcctaaggagtgggccatgtgacagagaactgtaggttcagccataagaagccaggactcttactcataaaaccacaaggatttgaattctgccaataacytgaataaacttggaattggaatattcctgtgttgaaaactccaggtgagaccaatgccctgcctgcacttctgcaggctgtgggattctgatgagaggactcaggtaggtcatgcctggactcctgacctatagcaacacagttaatacatgtggtttaagctattaattttgtataatgtggtgtacagcaataaaaaatgaacacacttggatacaaataactttgtcattttcataagagaaacaactctgaagtcacatttttaatcattccacctgaatagcacctcttgtattctgttcctgaattctagacaattccttctggcaagtcatgacatatagttcttcaattccatcacaactaccaaccattgtttctatttcatcatcattcctcaacattttcagattctcccttccttcttggcttgttgt

SEQ ID NO: 623377 - DNA, 571 bp, Homo sapiens
ctaaaaaagccaacatcaatgttgtgagctgcctaaggagtgggccatgtgacagagaactgtaggttcagccataagaagccaggactcttactcataaaaccacaaggatttgaattctgccaataacctgaataaacttggaattggaatattcctgtgttgaaaactccaggtgagaccaatgccctgcctgcacttctgcaggctgtgggattctgatgagaggactcaggtaggtcatgcctggactcctgacctatagcaacacagttaatacatgtggtttaagctattaattttgtataatgtggtgtacagcaataaaaaatgaacacacttggatacaaataactttgtcattttcataagagaaacaactctgaagtcacatttttaatcattccacytgaatagcacctcttgtattctgttcctgaattctagacaattccttctggcaagtcatgacatatagttcttcaattccatcacaactaccaaccattgtttctatttcatcatcattcctcaacattttcagattctcccttccttcttggcttgttgt

SEQ ID NO: 623378 - DNA, 380 bp, Homo sapiens
aggcctttgatgtatatctgcagggcacccctaaggatacttaagtctctccctttgctactattggaggttcaagacatggcacaaaaatctgtactctctgagccccatagcttttaccatataagggaggcccagttggttgacaagtcagaagcctcactctcagctctgattgyggtataatcacatttccaccaaaaggagtgcttgataaactctgacaaaattcagggtcctgttcaccaaatacatgttttttgggaggaaatatgtcataattcttctgttgtcacattgaccttccactgctaaaaacaaaaggtttagcatcatatagaattgtttgtgcattagaaatggtatgctcttagtttggg

SEQ ID NO: 623379 - DNA, 555 bp, Homo sapiens
ttcagggaacaagtcctccagcgcacacaaggggatgactctatttttagtgcatgtgttaacatgcagctatattttggggaggattctttttccacttccaatggacttttaattggcaaaagttttaatatcaaaacgtgcaccattccccaatcgaagcatgtcacaaactgccccatgccctgaatactaaataaatctgaattaaaataaaaatagagacagcaaagggattaacagttccttgctctttcctattcatgaaagccaagccttgaaggtggcccatgaagcagaactaagccctggtttttcaactggttttcccaggttgaggggraaaagtaggggttaaaaacaaggcctttatatcatgcaaagagctaacctcagcaccccctgctcccagatgtctctgatagagctgtttccctaaactttcagaaccctggcagctcccccagtttccagtcatctcctgggggtggcatgtaatggaatgtaaatttacatgtaacatagttgagggtccgttctctttcaatctgttgg

SEQ ID NO: 623380 - DNA, 502 bp, Homo sapiens
acaaacatgaaaacatgctcaacatcactaatgatcagggaaatgcaaatcaaaaccacaataccataccaccttactcccgcaaccgtggccatcataaaacattcaaaaaataatagacgttggggtggatgcagtgaaaagggaacacttgtacactgctggtgggaatgtaaactactaaaaccactatggaaaacagcgtgaagattccttwaagaactaaaagtagagcaaccatttgatccagcagccccactactgggtatctgcccagaggaaaagaagtccttatacaaaaaagatacttgcacaagcatgtttataccagcactactcgcaattgcaaaaatgtggaaccagcccaaatgtccatcaatcaactagtggataaacaaactgtggtgtatatatatatatatatatatatatatatgatgaaatagtactcagtcataaaaaggaacaaattaatagcattggtagcaacctggatgggatt

SEQ ID NO: 623381 - DNA, 502 bp, Homo sapiens
acaaacatgaaaacatgctcaacatcactaatgatcagggaaatgcaaatcaaaaccacaataccataccaccttactcccgcaaccgtggccatcataaaacattcaaaaaataatagacgttggggtggatgcagtgaaaagggaacacttgtacactgctggtgggaatgtaaactactaaaaccactatggaaaacagcgtgaagattccttaaagaactaaaagtagagcaaccatttgatccagcagccccactactgggtatctgcccagaggaaaagaagtccttatacaaaaaagatacttgcacaagcatgtttataccagcactactcgcaattgcaaaaatgtggaaccagcccaaatgtccatcaatcaactagtggataaacaaactgtggtrtatatatatatatatatatatatatatatgatgaaatagtactcagtcataaaaaggaacaaattaatagcattggtagcaacctggatgggatt

SEQ ID NO: 623382 - DNA, 495 bp, Homo sapiens
aaaaacaaacatcatatgttctcacttataaatggcagctaagctatgaggatacaaaggcataagaatgataaaatggacttcagggactcagggggcaagggtgggaaggggtgagggataaaagtttacaaattggcttcagtgtatattactcaggtgatgggtgcaccaaaatcttacaaatcacaactaaagaacttatgcrtgtaaccaaataccacctgtttccgaaaaactatggaaataaaaagcttaaataaataaactaaaaaaaaatgttggaggttagtgatttcaatcatttgtagagaaacattaataaagaacaaaaaatgtagtgagagccaggtgccgtaatttacaaatgttattccattttgttctcaaaataatactgcaggatgaacaatataaagataccaatttgcagatgagaaaagtaaagcttataaaagttaatttgccaggggtgaaatttcaggatttgtcttc

SEQ ID NO: 623383 - DNA, 626 bp, Homo sapiens
aagactatatataaggttgtaagtgtcactgtttagtttatttgttatagtcatagcataacatgttagccgacttactagaatgtagaactcatgaggaaaggtattttcatctgttcaatgttgtggcttcattgcctagacaggtgcttggaacttagcaaatattcaaaaagtgttgaaataaatgcgtttgatgtaggtgaagtaaccattatttttttctctagcattttctgtataatcccacagaatatgattatgcacagtgctgtcatatagtggctaaaacagtgcattttacacagcactgcattgatttgctgaaaccatgaaaaatgagacaaactatatttagagtgtagaccattaatataaagagaggaaaggctgtgagtttattagaaaaggcaatcctaaatttatgaaaataaaraggaatatattcaaattttttttcattttcaagatgtacagaagaaaatttatttcagctgtgactggtcattatttaactaacgaatagaagatatattttatctactcctcaacaaattaatgtgtacttaggctccaggcttgtgattgtgtcatgctacgtggcctactaatgacccctagaaata

SEQ ID NO: 623384 - DNA, 524 bp, Homo sapiens
tttttcaggttggaatttcacgttatactctattcacatactaactctgtgggcttgcataatcacgcattgcatctaacatacagtcactgtgctaagtagttactgaggctacaggtgtggtagaagatggctttgctccaattatatgggagagcagattccagtttccagatctagtttaaatgaagctaaaacaggaatgaactttaaaattgctcccatcaattcagtytgcagaaaacactgatgctgatgaagaaaatggtggctcacacctgtaaccccagcactttgggaggctgaagcaggcggatcacttgaggtcagcagctcaagaccagcctggtgaacatggtgaaacaccatctcttctaaaaatataaaaaaaattagctgggcttggtggcaagtgcctgtaatcccagctactggggaggttgagacaggagaatcgcttgaacctgggaggcagctgcagtgagccgagatcacaccatttcactccagcctgggcaaccaag

SEQ ID NO: 623385 - DNA, 539 bp, Homo sapiens
caaactaaaaagcttctgcacctcaaaggatacaatcaacagaatgaaaaggcaatctgaagaatgggagtaaatatttgtaaaccatatgtatttgataaggttttaatctccaaaatatttaagaaactcctccaactcaatagtaaacaagcacacaagtaaacaaaacaaaaatcaatgcaattaaaaaatgaacaaaggacttcagtagatatttctccacagaagtcatagaagtgctcatcaggtatataaaaaaacatactcaatgatatggttcagctgtgtccccacccaaatctcaccttggattgtagttctcataaatcccacgtgttgtgagagggacccagtgggaggtaattgaatcatgggggkggttacccccatgctgcttttctcatgacactgagtgaattctcatgagagctgatggttttataaggggcttttcccccttttgatcagcacgtctccttgctgccaccatgtgaggaaggatgtatttgcttccctttctgccatgattgtaagtt

SEQ ID NO: 623386 - DNA, 564 bp, Homo sapiens
tatcctcactgacacctattgtttgagtttttattatacccattatagtgggtgggtagtggcatctcggtcaccatttgtgacgtcacctgcaatgatattagtcttttttttttttttttttttgagacagagtctgactctgtcgcccaggcttggagtgcagtggcgcgatctcggctcactgcaactttcacctcctgggtttaggtgattctcctgcctcagcctcccgagtagcagggattacagacacccaccaccacacccagctaatttatgtatttttagtagagacaaggtttcgtcatgttgaccagactggtctygagctcctgacctcaggtggtccgcccgtctcagcctcccagagtgctgggattacaggcatgagccactgcacctggccaatgctagtcttaaggctggaattaggcctggccagcttgtcatctgcatctcttttctaaagatgacatttcatatgtatagaatcatacaatatgtagtcttttgctctggcttctttcacttagaataatgtttttggagttcacccatgtt

SEQ ID NO: 623387 - DNA, 613 bp, Homo sapiens
tctaaagccaaagactgaaattgagactctgccttcaacatttgctgctccatgacgttcttgattgcaatgagaggctggctgtggccagcttgcgggtgcatcacagcagggagctttaacattctttcctctgctttccagctgacatgttcctccggctctgccacacccatcagatggcaggtggggagcagattaagacatgggcattcgcagggtgcacagaacgctggcttacaaacacctcctctcataggcatgcaggtgaacagatgggtgggtgggaggttccccttcacccacagtcctgaatctgagttcttgggttaggatttggtatggcagccttcacattgcacagatatccctacattgggctgctctgcatgcctgcaatgagagtttttgggcttcttgcaggcaggaggtgctgagtattcacaccaaagcttggacatataagacaccagtgacccctattctgctaattcataacactcagccggctcccacattcccactgcctgtgcccatccccgrgaggctttcctaccttcctttttctgctttataaagcaacagtgagattccaggagcaaggccagcaaag

SEQ ID NO: 623388 - DNA, 441 bp, Homo sapiens
taactgcttcttttctgtatgtgacaattttcattgttgatgatattttagccttaaagtctaaattgcctgatactaaaattgttattccaacactcttttaattcaaatttacccagcttatctttttaccattctatgttttcagtttatttgcatatttttaaaatgactccaacayaaaacatttgctgaattgtataaaacccattctaagattttatctttggattgctggttttaacccatgtactctcattactgtgtaattattggtgttttctcattgattttagccaagtctttcaattaaaaaaattcccttcttttttgctatttttctttttctttttattaaattcacatacaattgtaagaaatagtatagagagatctcatgtacctttacccagttcttcataatggtaacactttgcaaaa

SEQ ID NO: 623389 - DNA, 441 bp, Homo sapiens
taactgcttcttttctgtatgtgacaattttcattgttgatgatattttagccttaaagtctaaattgcctgatactaaaattgttattccaacactcttttaattcaaatttacccagcttatctttttaccattctatgttttcagtttatttgcatatttttaaaatgactccaacacaaaacatttgctgaattgtataaaacccattctaagattttatctttggattgctggttttaacccatgtactctcattactgtgtaattattggtgttttctcattgattttagccaagtctttcaattaaaaaaattcccttcttttttkctatttttctttttctttttattaaattcacatacaattgtaagaaatagtatagagagatctcatgtacctttacccagttcttcataatggtaacactttgcaaaa

SEQ ID NO: 623390 - DNA, 441 bp, Homo sapiens
taactgcttcttttctgtatgtgacaattttcattgttgatgatattttagccttaaagtctaaattgcctgatactaaaattgttattccaacactcttttaattcaaatttacccagcttatctttttaccattctatgttttcagtttatttgcatatttttaaaatgactccaacacaaaacatttgctgaattgtataaaacccattctaagattttatctttggattgctggttttaacccatgtactctcattactgtgtaattattggtgttttctcattgattttagccaagtctttcaattaaaaaaattcccttcttttttgctatttttctttttctttttattaaattcacatacaattgtaagaaakagtatagagagatctcatgtacctttacccagttcttcataatggtaacactttgcaaaa

SEQ ID NO: 623391 - DNA, 518 bp, Homo sapiens
  misc_feature 1, 2, 3: n = A,T,C or G
nnnttgttgttgttgttgttgttgttgttgttgttgtttttctgcttgatccatctggctctaggagaacttccactggtccctgatggtgctagctgaaggggcagaaggcagaaggggcctccccccaggtcaggtaactgaatgtctcttggtgcgggtgtaaagtctcagactctggaggacaagaagacttccctggctgggtacctactgtggcagaattccccttgcccctggtggggcagggaggggagaggagaacacttcccaggctgggcatctgttgtggcagggtccctcttgccaggggctcctggctaaccaggtgtctctgggaggggaagggagttggaggccaggagggaaggagagctctcccctggctgcttattgttagyagggctccaaatccagggcaggaataaacctagctgagctgcctttggttgcttggttggaggtcaggaaatccaggtctaggtcatcttttttcatgaagtaggtatgtaggaagc

SEQ ID NO: 623392 - DNA, 477 bp, Homo sapiens
aaaaaaacaagagaataaaagatagaaaccaatcacaaaaacataagaaaaccccatcctggaatgctgaatattttctaaattttaaatagctttggattaaaagaggaaacaaaaatgcaattgcaagcaacataattcaaggcaaatggaataatgtctaaagaagtgctttgagaaaatttaatagccttttaatagttactaaaaactaaagaataaaaataattaaatatctaacacaagatgctagaaaaggaccaagtaaatttacagaaaaaataataaagaaaaataatttaagagcaaacaacagcacttcaaaatttgttaataagatatatctcatgttgtgttcttactatacacacacaaaaagggggaatacaaggmaacgttgggaagagttgtatttgtctattacctctgttgtggtgctggtattatggatgtttgcacgtgtccaaactcaccaaa

SEQ ID NO: 623393 - DNA, 566 bp, Homo sapiens
ccattcacttgctctaagggcaggtgcaaattcatttgcctagggaaagacgccctagtaggggaaagagaaaccagtcgagtttttgacagatgtgatagattagaaatgatgattcccaaacacttggtttgtaccaggagacgttagttaagttctggaattgtgcaatacactgaagagaagccaagtaatttatagatggcagactaaaatctcctgcagtgcataagaaatacatcttgctagagataggaagtttgacataaatacagggtgagtttctccttaagacatatggtagatttttgaagctgtctagagtaggagctaaagagctaagctcaaaatctctaaataatagaactgagtcttgtttaattttttagggctaagaagaagagactaaccaaaatctcaatcaaatgccaacgtggactagacctgaagaaaagggatgarccagagttaaactaagtttcactaaatacagcagaagacaggatgattgaacctgaagataggttaattaaaaatatctaaaacacaaagggaaaaaatataga

SEQ ID NO: 623394 - DNA, 486 bp, Homo sapiens
ttacaatggaaactatttatttattgaagtttggtagaactcgaagtggagatatttgagcctgaacttttcctttgtggaaaaatgtttgatgatggtctcaccttttaaaattccttcagactacttatattaaaattgtgtattttagtaaatttattccaagtaagttttcatgttttttgcataaaattgtccataatatccaattattaccttttaaaatgtctgcagacttacaatktgatagatttgggaggaaaaaaagtctgcagaatccatagttatgttttcctttttattattgttattgttaatctttgccttattttttcttaaaaaaccttaccaggattatgcaaattttgttagccctttcaatgaacaactttatctttgttaacctttcctattttccctctagcctctatatcttttaccttctcttttatgtttttcatctctttgtgtctctgcactgaattc

SEQ ID NO: 623395 - DNA, 577 bp, Homo sapiens
ggctctacaaatgcttttcagtacagaagatgtctgagctggctttgaaaatgggtgcagtgtggggaggagggaaagttaataagcagaaggtggaaaaattgaagagaaaataattcataggaacttgaagacatagaagtgtatattgtatgtgggaaggaacaggggtcagtttagtgtcagtaaaggacaagatattggccaaggggataatgatggcagraagtgaatggtaaggtacctgggggtggggtgcagattctggagggtcttaaatgccattctaaacagttggatcttgttcaatgggtccagcaatgaactgttagtacagattcttagtaaaaagattaacttcagaataaatgtagtcaaggagataccttctccttcctcctctcccaacacacccagaaaaccatttcttctctgcccactcacacacataaacccatttcagcagtgcaggagtagggatagggagggtatgccagacctgtgaatgagaacatggtgaaaacaaaagaccttgtggaattcaaaccaaccagagtcggtggctgcatgtgggggg

SEQ ID NO: 623396 - DNA, 565 bp, Homo sapiens
tcaacctgggctacacagtgagaccttgtctccacaaaaaataaacaaaattagccacgatggtggtatacacctctggtcctctactcaagaggctgaggtgagagcatcacttgagccccagaagtcaaggctacagtgagctatgagccattattgtgccaccacactccagcctgggtgtcagagcgagagcttatctctacaaaaaaaaaaagaacaatagtgtgtggaagaagctcattgttctagggaagcacagagtgcaaggcaactccatcaccccatggagaggactttccacagcctatttctttgcactgaatgattccactcttaggatgaaatgtgcagtcttcttgatccaatattgtattgatttgaagtgtccattccaagtggcttccagaaggaagtaaaacractcaaattaaaaaatatctccattctttcttgcttatgttctttgatcaagttgtctttgtgctcttatgaaatggctacagcccagtcctcacagcccaacataagtttgccaaaagatactctgggaatcctaaatggt

SEQ ID NO: 623397 - DNA, 583 bp, Homo sapiens
tccccttgaccttctctatagaaagagatctacagtaaaacaatccaattatttcccagatctttagggcaagaagaaattatccatctgagatattataagcaaagtttgtgtaatacaataaaaaaggagagctagatcattagaaacatttaattcaggagggcaactagggcatgcaagaaaatttaatagtgaaaagattctttcgaaagaataaagaagaaaaataatgctaataatgstaatgtattttctcatttaaatccaataaggtaggcatttaaatataaccgtcttggaaattagaaaactgatatgttaaataaattgaccaaggacacaggtaaaatgtggcagagctgggatgtgaacatgcttagtctggcttcagagcccatgccgtcaattagttctcctgtggtcttccaatagggtgatagcccacatcaacacatatccccagaggcatccatgctgtagtcccagccagagaagattaacattatttagaaactttcttccaaatagggaggattttgaaatagaaaatattaaatgagactttaaaaaggtttataat

SEQ ID NO: 623398 - DNA, 617 bp, Homo sapiens
tataatgaaataacgtggggggcagtcccattggcattctttctttggactgcagygagctcacgatcagggaaaccttaagactaatttaaggacattagccaacaaactaatttctaggggaagcacctaataggcagagagaatagataatgtagtagtcccaagatgggagcaaacataacatgtttagagaatgaaaaaaggccagtgtggctacacaagcaaggatgagagtggtatcagatttggttggagaggtaggcaagtgtacttcatgtggagtagtgcttctcaaatttttttactatgtataagaatcacttgaagtgcaagttcaaacagattcccaagccctgtcccaatagatcacaattgaaaaagtctgtagtaggggctgagtgttgtgtttctaacaaggtcccaggtgatgctcatcagcaatctgcactttgactgcgactgatgtagagctttacaggtgaggataaggagatgagattttcgtgtagggtaggcgagatggggagcccctgaagcattttaattagttaaaggatatgatctgttttactttttaaaaagatcgtcatctacaggttagaaacgataatcca

SEQ ID NO: 623399 - DNA, 617 bp, Homo sapiens
tataatgaaataacgtggggggcagtcccattggcattctttctttggactgcagcgagctcacgatcagggaaaccttaagactaatttaaggacattagccaacaaactaatttctaggggaagcacctaataggcagagagaatagataatgtagtagtcccaagatgggagcaaacataacatgtttagagaatgaaaaaaggccagtgtggctacacaagcaaggatgagagtggtatcagatttggttggagaggtaggcaagtgtacttcatgtggagtagtgcttctcaaatttttttactatgtataagaatcacttgaagtgcaagttcaaacagattcccaagccctgtcccaatagatcacaattgaaaaagtctgtagtaggggctgagtgttgtgtttctaacaaggtcccaggtgatgctcatcagcaatctgcactttgactgcgactgatgtagagctttacaggtgaggataaggagatgagatwttcgtgtagggtaggcgagatggggagcccctgaagcattttaattagttaaaggatatgatctgttttactttttaaaaagatcgtcatctacaggttagaaacgataatcca

SEQ ID NO: 623400 - DNA, 537 bp, Homo sapiens
tctgctgttccaaagacttcccatattattcagaacaaaagaactcatttcctttctaaccttcatctccactctttttatattcattcctcttcaaccttaagtttcgtaagcatgccaggcatgctcctgccttgggacctttgacctgcttttctctacccggacttttcttctttctcagttactgaatgtcttactcccttaccttcatacagttctggttcaaatgtagttttctcagggaggcccttccagaccatcctagctctgatactgtctaattgcttccctcttttattattttttttttaatttttatttatttatttwtttatttttgagacggagtctctctctgtcgcccaggctggagtgcagtggcacgatcttggctcactgcaagctccacctcctgggttcccgccattctcctgcctcagccttctgagtagctgggactacaggcgcctgccaccacgcccagctaattttttttttttttttgtatttttagtagagacagggtttcaccat

SEQ ID NO: 623401 - DNA, 553 bp, Homo sapiens
tattactatctttagacacagggtcttgcactgtcacccaggctggagtgcagtggcacaatcatggctcaccgtaatcttgaactaccaggctcacatgaacctcctcactcagcttccagagtagctaggactatgggtttgtgccaccatgcctgtctaatttttawtttttttttatagaaatggggtctcactatgtttcccgggcttgtctcaaacttcctgccttaactgatcctcctgctccaatctcccaaaatgctgggatcacatgcatgagccactgaacccagctgacaataaaatattttaaatcaaggtattacattgtgttttgagaaataatactgttcatacttaatgtaatacagaataatgtaagcataactattttgtgcactgggaaactaaaaaatgtgtgtgacttattttattgcaaaattaattttattgctgtgttctggaaccaagcctgaaatatcttttaggtatgcctacgctggatttgagacatgtatttgtgagttcattagttacagtagctagtatt

SEQ ID NO: 623402 - DNA, 640 bp, Homo sapiens
caagctgggagtaaggaggaggacgtggctgcagccagagtaggaggttgctaaagatttgggagttttaagatacctattaaatattgtctcacgttgactcartgacatcaggccacataattttgtactgttttttcatcacattcaatccttgtttttctttttgagatggagtctcactctgtctcccaggctggagtgtagtggcgtgatctcagttcactggaacctccccctccagggttccagcaattctcgtccctcagcctcctgagtagctggatttacaggcatatgccaccatgcctggctaattcttgtatttttattagagatgggtttcaccatgctagccaggctggcgtcgaactcctgacctcaagtgacctgtttgcctcggcctcccaaagtgctgaaattgcaggcatgagccaccatgcccagcccatcacattcaatcttaatcccctcttctctaaatgtacaccataagttctctcttgttcaggtaagaaaatataggtaactcagtgaaagatagtcattgtgggtagaaaagaatacaaaacaggtgttattagtgatgtcaggttaacaatgccaccttcatgaattgattattggtaattaattcagt

SEQ ID NO: 623403 - DNA, 325 bp, Homo sapiens
gttcttggccttctgggctcattgggagcctgtggcagcagagggttcaggatcccagggctcaggccccagctgggatgtagcttggccccgcctcactcccaggaaggatagtgccatcaggccggtcatcaggcatccggctgtaacagcagggctacagccagccacctctgagcccacggcagcccagccacgctacttctcaggcctgaaggatgtgcyttcactcccaagcgggagacagctggttcacagtgggctgctgcctccgtgaagccttctgtgaaccccttcctgcaggctgggcaggtgttcacccagc

SEQ ID NO: 623404 - DNA, 500 bp, Homo sapiens
tcctcacattcccaggcccatgtggtctttcttggaggcaaggttggtggtgcagtggttgtctgctgagcagggctggagcagcgggtgtgccccggcgggtggacagagcacctggcacctgggccrgaagatgcctccttgactctcaccctgtctggctgccctcaggtcccaggctttgaggagctctgcctggtttctgggtaatcagaaaaccccatgcccagcagcctgcctggctatcctttccctgtggcctttggcttttccacgcacatcctctttaactgcactgagtccctggaaatcccccgagtcccgcttccccgtgggagccagtgcctgccgggcggccccttctgcctgcagtgggttgagcgggcagggcaggtgcttgactttggcttcactggcctcagtcccaggcggccccttctgcctgaagtgggttgagtgggtggggcaggtgcctgactttggcttctctggcctcagtc

SEQ ID NO: 623405 - DNA, 544 bp, Homo sapiens
cctctttttatttggaaatattggggccaaataaacataataaaatactccatgactcagaaatatccttctttatgctgtggcaaatgcaaatgtcttgttcacatggccagccaccagccatgttggatgcccctttatgcatttcacctctaacgcaygtacacgctatactgactctcccagtagatgacggcccactattcatgccagcgtccttagggcctgccatgttacagatgctatagatacttcacaaatgcttctgaactaaataaagaactattcattttttataaccttggttctggagttctggagagataataaatgatggctatttataatcattaactcatctgagtatataattccaactgtttagctgttctgcaaagaatgtttggtcttttcatttcacaccctttctcaattaagctgagctgtaaccaagttcccctatacatattcctattatagaactcataacatttttctgcccactcacatcctcctctgctaaactataaagatcttaccttat

SEQ ID NO: 623406 - DNA, 568 bp, Homo sapiens
ccagctattcaagaggctgaggtgggaggatcacttgagcccaggaggttgaggctgcagtgagcagctgtaatcataccactgtactccagcctaggcaacaaagtgagacctgtctttaaaaaaaaaagaaagaatgcccttttccttccaaaagaagtaatcattaaagataaacagagttgccaatttgggggtgttccttctctattaagtcactgacacaagtcaagtgtctagaaaattctttattttggagaatcaaagcacacctaatttaatggagacacaactgctgtcccagtgtagctgatggagcagatgaaagcaaaatgcttctcyccattttaagacattaaacttctgtaagaaactttcatttctccactatttgcttagttaaggtcaagctgatcaaagttgatattagttttacattggtttatttatatatttattttgaaggttaaaattagccatgtcaaaatgaaggacagatataaaataatgaacacttagaggtgtaaatataaaaataatattaacctaagatattccagtttacagt

SEQ ID NO: 623407 - DNA, 441 bp, Homo sapiens
atacaagctttttaaaagaatgctcagatgactttgaaaaaaaatattttcataagagactaaaagtaagactagttttggttatgaatattttgtataagaatatttaaagataaacatactcttcaaggaaccaaacatgctatatgcaaatcatttttagcataatgttatgttgatacaggaaatactattccctctgacattactagkagcagtctcttgctttataattctctttttcatctaagtgtaatttaagatctttgtagtaaggagctcatttataggacagtcaaatttaatgaatgggagttggtaggtagaatgcattaaatataactggtgttctttttattatcttttgtgctcatatttaagaacagagattcttgtcagttttctcaagagaaaaattatgatgtaatagacagtgtacac

SEQ ID NO: 623408 - DNA, 574 bp, Homo sapiens
cgtctgtcctttatgtacactatatacacagataagtaaaacaaaatgcacagacataatgattcatcttgcctcgctgtaaacaggatggcatagagctctctgcacctccccctcctctctcctcccctgaaccactgcacaaacacaatgagtattactcaacaggtgatttggccattcccccccaaaaatatttcctatgaattgtaacaaaaaggtatttacaaaatgtgattttgctacctctaattttaacatatcaggcacttcagaacatctaaaaagaagagacatttcaaaaaagcttagcattgtcaactatatacacagtagtgaggaataaaatgcacacaaaacaatggatagaatatgaaaatgtcttctaaatatgaccagtctagcatagaaccttcttctcttccttctcaggtcttccagctccatgtcatctaacccacttaacaaacgtgracgtatcgcttccagaggccgtcttaacaactccatttccaaaagtcatctccagaagacatgtattttctatgatttcttttaaacaaatgagaattta

SEQ ID NO: 623409 - DNA, 574 bp, Homo sapiens
cgtctgtcctttatgtacactatatacacagataagtaaaacaaaatgcacagacataatgattcatcttgcctcgctgtaaacaggatggcatagagctctctgcacctccccctcctctctcctcccctgaaccactgcacaaacacaatgagtattactcaacaggtgatttggccattcccccccaaaaatatttcctatgaattgtaacaaaaaggtatttacaaaatgtgattttgctacctctaattttaacatatcaggcacttcagaacatctaaaaagaagagacatttcaaaaaagcttagcattgtcaactatatacacagtagtgaggaataaaatgcacacaaaacaatggatagaatatgaaaatgtcttctaaatatgaccagtctagcatagaaccttcttctcttccttctcaggtcttccagctccatgtcatctaacccacttaacaaacgtggacgtatcgcttccagaggccgtcttaacaaytccatttccaaaagtcatctccagaagacatgtattttctatgatttcttttaaacaaatgagaattta

SEQ ID NO: 623410 - DNA, 547 bp, Homo sapiens
atgacacagtaataaggaaatgatgaagtgcacactaaaaggaagctgttgcatttcacaggacagttctacagaaaggtgacagtctcccagaagaggcctccagcacgggttgctaatgtgaggactgctggtgtcctcctagtaccctgggtataggatcactctaaacactcagcctgagagacaagggggaggagagaactgcaagtcttgayaaacttgcagagtccctccttccctgaactgggagatctgccaagagaggccaacgctgacctctctgtgtcccgtgatatatcctggcacataggtgggctggtcaactgctggcatcacagttaatgggatgtgctcagttccaggaatctgatagtcaacaaaccaaccagacaaacactaaacagattttactaatcacctactgtgtatagtgtactaggtttacagaatctatgtttatccctgttcatggaccaaatgagaagctgaactttctgggtagcaagcaggctggaaactacctacttctgtcaagggctgaggt

SEQ ID NO: 623411 - DNA, 520 bp, Homo sapiens
gaagtcctgttatgaaatattgtttgatgtgttggaaccccacttccttatttataatgagtgatttcatttcaaagatggctgataggcattaaatgtttccatctatggcaagctgcttagcacaatgcctaattggaattaccgtaattcctaattgtaattaaggctagaattagcacctaatctgacaggcactaacaaaactagtcagtcctcttggactaggtggaatatcagtttggacccatgaaaaccagactcatgtgcaagaaatcagagacacaagtggacccatttcttctaagatataggaatatccttaaaagacaggtgcatgtatttttcccaatcctgctgtttgccatttttttccttttttttttytttttttttgtttttttgagacggagtcctgctctgtcgctcaggctggggtgcagtggcgcgatctcagcacgctgcaagctctgtctcctgcgttcacgccattcttctgcctcagcctcccgagtagctg

SEQ ID NO: 623412 - DNA, 520 bp, Homo sapiens
gaagtcctgttatgaaatattgtttgatgtgttggaaccccacttccttatttataatgagtgatttcatttcaaagatggctgataggcattaaatgtttccatctatggcaagctgcttagcacaatgcctaattggaattaccgtaattcctaattgtaattaaggctagaattagcacctaatctgacaggcactaacaaaactagtcagtcctcttggactaggtggaatatcagtttggacccatgaaaaccagactcatgtgcaagaaatcagagacacaagtggacccatttcttctaagatataggaatatccttaaaagacaggtgcatgtatttttcccaatcctgctgtttgccatttttttccttttttttttcyttttttttgtttttttgagacggagtcctgctctgtcgctcaggctggggtgcagtggcgcgatctcagcacgctgcaagctctgtctcctgcgttcacgccattcttctgcctcagcctcccgagtagctg

SEQ ID NO: 623413 - DNA, 193 bp, Homo sapiens
ttatacacaccatggaatactactcagccataaaaaggaacaaaataatggcattcgtagcaacctagatggaatcggagactactattctaagtraagtaactcaggaatggaaaaccaaacattgtattttctcactcatatgtgggagctaagctatgagaacacaaaggcataagaatgatacattgga

SEQ ID NO: 623414 - DNA, 513 bp, Homo sapiens
ggggggaagggaggaaatctttatgtatctgttaaaaatgttaaaccatcttcatcatgttgcattataacttctttatctcgtttctttttcttgaatcgctagaatttgaaaatgtatcttcaatcatattgaagtcctcaaataagtgtttttgtttcattaaatgatttctttgatatcatgytggcattaactaggctgagtctactgtggtcaaaagaaacgtgaacctaaggttctttgcctggggtttctatctccctagctactgctgcctggttctatcaccaacgttttaaatactggtattagcgcatgtcaattcttgtcctcgtacacttttgaattactttgacaaggaataccaagtcactattatagagccaatccagatgaggcaaggaatgtcactcatacatggggatctaaaaaatgcattttccataccttcttcttggctccaattgaaggtatggaggaaggtaagaacttcccttctcagagtgagga

SEQ ID NO: 623415 - DNA, 439 bp, Homo sapiens
atgttgcattataacttctttatctcgtttctttttcttgaatcgctagaatttgaaaatgtatcttcaatcatattgaagtcctcaaataagtgtttttgtttcattaaatgatttctttgatatcatgctggcattaactaggctgagtctactgtggtcaaaagaaacgtgaacctaaggttctttgcctggggtttctatctccctagctactgctgcctggttctawcaccaacgttttaaatactggtattagcgcatgtcaattcttgtcctcgtacacttttgaattactttgacaaggaataccaagtcactattatagagccaatccagatgaggcaaggaatgtcactcatacatggggatctaaaaaatgcattttccataccttcttcttggctccaattgaaggtatggaggaaggtaagaactt

SEQ ID NO: 623416 - DNA, 439 bp, Homo sapiens
atgttgcattataacttctttatctcgtttctttttcttgaatcgctagaatttgaaaatgtatcttcaatcatattgaagtcctcaaataagtgtttttgtttcattaaatgatttctttgatatcatgctggcattaactaggctgagtctactgtggtcaaaagaaacgtgaacctaaggttctttgcctggggtttctatctccctagctactgctgcctggttctatcaccaacgttttaaatactggtattagcgcatgtcaattcttgtcctcrtacacttttgaattactttgacaaggaataccaagtcactattatagagccaatccagatgaggcaaggaatgtcactcatacatggggatctaaaaaatgcattttccataccttcttcttggctccaattgaaggtatggaggaaggtaagaactt

SEQ ID NO: 623417 - DNA, 513 bp, Homo sapiens
ggggggaagggaggaaatctttatgtatctgttaaaaatgttaaaccatcttcatcatgttgcattataacttctttatctcgtttctttttcttgaatcgctagaatttgaaaatgtatcttcaatcatattgaagtcctcaaataagtgtttttgtttcattaaatgatttctttgatatcatgctggcattaactaggctgagtctactgtggtcaaaagaaacgtgaacctaaggttctttgcctggggtttctatctccctagctactgctgcctggttctatcaccaacgttttaaatactggtattagcgcatgtcaattcttgtcctcgtacacttttgaattactttgacaaggaataccaagtcactattatagagccaatccagatgaggcaaggaatgycactcatacatggggatctaaaaaatgcattttccataccttcttcttggctccaattgaaggtatggaggaaggtaagaacttcccttctcagagtgagga

SEQ ID NO: 623418 - DNA, 574 bp, Homo sapiens
agatttgatctttggagagtctaggtattcaagtggaggaatagtgggaagaaaaatccacagcatgcttcctttaggcataggacatagtataaaaatatgtggcatatttggcataggtaaaatcacctgtcaaggctagaggaatggggctagcttaggagggctgccaggccccattacagacatagccctttgtcatacagacaaaacgttgttatcacagcattttatgtgatatcattaaatcattaaattaatttaatttaattaatttaattaattwaattaaattgtgtgtatctttaccttagaaatgcaattctagctacaatttacagaaaagatgaaaggggaagatatttatctttgaaatatatctgtacatgtatataccccacatttgacatttgaatgcatacatacatatttttttaaagctggtataaaatagtacttatgtttatttttgttgtaagcctacaaaactatttgactttaaaaatcatataaatcatctcaataaagtcaaagaaacgaaggagaatagaataataaaataccaaaagaattc

SEQ ID NO: 623419 - DNA, 619 bp, Homo sapiens
aactgtttgagagttagaataaagaagaaactgcactgagactgttatccagttctgctgtgctcctaactccatacttagccatgacattatgctttaagggttaatgcactcgaagcttcaaatgagaatgtttacaattcaaaaagaaaagaaaaagagttacagtgttttgttggcagagaaaggatgcaaattagggaacatcacattcttagtgtgcaattaacaagttcagtaacatctaaaagtttccaggacttgacttccccagggagaattcaatgtaggacatctggaatgatagattttacgtttgttcagagagttaaagtggtttttgcattgtctcctggggcagatttacagctactttgtttaagtggaacagatcaactctgtacactgagaatgctcatcttaaaatttaggaaatgaaagctagagagyaatgatactatctcaaggtaggatagagtgttaatggaaataaaaatatcttttagactagtttactaaatatggtcagaacaaacactttgaaggagatgggagaggaatgattgatgagtttctgaatgatgtcttaaccaaaggatcgaatgatgcattgaggagg

SEQ ID NO: 623420 - DNA, 601 bp, Homo sapiens
gaggctcaatctaaggtagactgtgagcctgtgrgaggtgggtctgttttcatcatttatctgtttatcggctaccaagtgtcacaggtcaagatgctgatgcccaggctccagcccaaggcaatagaagcagaatcaaggggttctctgtgcagaacccttggttggctggagaaccattgatctagattgggaggaaaaagtcttccaaaagcccggaagaggcagtgcaactccggcaggggtccaaggaaggtaaagcaccccacgcgactgctggagacgggcgaggagtgagaggcaggtgggaaggtggcttcagccagtttccccaaggaccttccttacaaaactgaggtgctaggctgtttttcatggttaacagggagccattgaaggcccccaaggaaggatatgatatgttcaaagctgagtaccagccatggcagcctctgcttcctcctgcctcttcccttactcctagattctacttccaccatgtgacaaaaagaaaagcgcttgggccttgcagcccgttctgttagaaaatgcaggtttggggtgtatattggtggaccagcaagaaaggaagggggcccca

SEQ ID NO: 623421 - DNA, 601 bp, Homo sapiens
gaggctcaatctaaggtagactgtgagcctgtgggaggtgggtctgttttcatcatttatctgtttatcggctaccaagtgtcacaggtcaagatgctgatgcccaggctccagcccaaggcaatagaagcagaatcaaggggttctctgtgcagaacccttggttggctggagaaccattgatctagattgggaggaaaaagtcttccaaaagcccggaagaggcagtgcaactccggcaggggtccaaggaaggtaaagcaccccacgcgactgctggagacgggcgaggagtgagaggcaggtgggaaggtggcttcagccagtttccccaaggaccttccttacaaaactgaggtgctaggctgtttttcatggttaacagggagccattgaaggcccccaaggaaggatatgatatgttcaaagctgagtaccagccatggcagcctctgcttcctcctgcctcttcccttactcctagattctacttccaccatgtgacraaaagaaaagcgcttgggccttgcagcccgttctgttagaaaatgcaggtttggggtgtatattggtggaccagcaagaaaggaagggggcccca

SEQ ID NO: 623422 - DNA, 605 bp, Homo sapiens
tgccttctaccatgattgtaagttttctgaatcctccccagccatgctgaactgtgagtcagttaaacctctttcctttataaattacccagtctcaggcagttctttatagcagtatgaaaacagactaaaatactacccaacagagaaaaatgcttatatgctatgtgagagaaacaagcaaataaaggaaaaattatatttcttttttatagactatattcagataaagttttaaaaaatattcttatgtatgaggaagtaggaaaatacgtagtggtgtactggagccagttctgttcacaaaagccaattgtgcatatcttttcctaattgtctgttctgtcatgttaaattgtgctagtagcttgaactsagctatagtgagggtatttatacaatgataattggcaaatgctacaaatcagggctgctgcattgttgacttgctgctgctgcctcttcagagagctgattgttaaacatttatacataccaatgaaaatatgacctataatcaagagaaaaaacagtcactagaagcagatcaatagatggcctagttattaagcagaaagggactttaaagtagctattataaatat

SEQ ID NO: 623423 - DNA, 558 bp, Homo sapiens
gtaaagcgggtggcaaaagagacagtgtgtaagttaagacaaggtcataaaaggtgctgtggctgcctctgtgctcacccttagatyactcaccctaggagaagtcagatgtcatatagtgaggagactcaagcagacccatggtgaggtccacatagtaaaagaaaacaatgagggttcttgccaacaattagcaaagaactaatgcctcctgccaatggccttatgagtgagccatccagaggtggatcctccaatctcaattcaacctttagacgatggtagttccagccaacatcttgattacagtctcgtgaaagatcctaagcaagtgccatgaaactaagctgctcccacattcctgacccacagatactataaaatagttgtttaatttgtaaatcactaagtttggaggataatttgttacacagcaatagatacctaatgcaaagagaaaacctgaaagcaaataggggaaaatgactcattatattcagaggaacaacagtaagaaataacattacttccaaaaagaaacaatgcaaactagaatat

SEQ ID NO: 623424 - DNA, 558 bp, Homo sapiens
gtaaagcgggtggcaaaagagacagtgtgtaagttaagacaaggtcataaaaggtgctgtggctgcctctgtgctcacccttagattactcaccctaggagaagtcagatgtcatatagtgaggagactcaagcagacccatggtgaggtccacatagtaaaagaaaacaatgagggttcttgccaacaattagcaaagaactaatgcctcctgccaatggccttatgagtgagccatccagaggtggatcctccaatctcaattcaacctttagacgatggtagttccagccaacatcttgattacagtctcgtgaaagatcctaagcaagtgccatgaaactaagctgctcccacattcctgacccacagatactataaaatagttgtttaatttgtaaatcacwaagtttggaggataatttgttacacagcaatagatacctaatgcaaagagaaaacctgaaagcaaataggggaaaatgactcattatattcagaggaacaacagtaagaaataacattacttccaaaaagaaacaatgcaaactagaatat

SEQ ID NO: 623425 - DNA, 587 bp, Homo sapiens
catataaaggagctccaatttatcttgcaacacacttctcaacaaaaacaggagtgggatgatgttttcaaagtgctgaaagaaagagacctctgccattctagaatactatagcctgggtcgggtgtggtggctcacgcttataatcccagcactttgggaggctgaggtgggcggatcacaagttcaggagcttgagaccatcctggctaacacagtgaaacctcatctctactaaaaatacaaacaattagccaggcatggtgatgcgtgcctgtagtcccagctacttgggaggctgaggcaggagaatcacttgaacccaggaggcagaggttgtagtgagctgagatygcaccactgcactccagtctgggcgacagagagtaagactccgtctcaaaataaataaataaataaataaataaataatactatacccagcaaatttatccttcaaatgtgaaggagagtaaagtctttcacagacaaacaaaagctgagagaattcaccaccaccagacctatcttacaagaaatactaaagcacattcttcagtctgaaagaagaaaaaaaagtttaatgt

SEQ ID NO: 623426 - DNA, 552 bp, Homo sapiens
tttttaaagttttatagtttctatttttgtgtgtgtgatataagttgtcacttctttaaaataacttgttgtacctatatgatgttttttgtaagtctcttggtaaccacagtgcaaaaacctataatatagttaataaaaatcaaaagcagtgaattaaaacataccacaagagaaaatcacttaaccacaaaggaagacggtaaaaaaaaataaaaaataaaagaaagaaagggaaagaggagttacaagacaaccagaaaacaagcaacaaaatggcagtagtaaatccttactaatcaatagtaacagaggctggacatggtggctcacagctgtgatcccagcacttggggaggctgaggcaggaggactgcttgagccccatagttcaagaccagcctgggcaacatggtgaaacccygtttaaattagccatgagtggtagcacatgcctgtagtcccagctacccaggaggctgaagtgggaggattgcttgagcccaggatgcagaggctgcagcaagctgtaattgcaccactacattccag

SEQ ID NO: 623427 - DNA, 552 bp, Homo sapiens
tttttaaagttttatagtttctatttttgtgtgtgtgatataagttgtcacttctttaaaataacttgttgtacctatatgatgttttttgtaagtctcttggtaaccacagtgcaaaaacctataatatagttaataaaaatcaaaagcagtgaattaaaacataccacaagagaaaatcacttaaccacaaaggaagacggtaaaaaaaaataaaaaataaaagaaagaaagggaaagaggagttacaagacaaccagaaaacaagcaacaaaatggcagtagtaaatccttactaatcaatagtaacagaggctggacatggtggctcacagctgtgatcccagcacttggggaggctgaggcaggaggactgcttgagccccatagttcaagaccagcctgggcaacatggtgaaaccccgtttaaattagccatgagtggtagcacatgcctgtagtcccagctacccrggaggctgaagtgggaggattgcttgagcccaggatgcagaggctgcagcaagctgtaattgcaccactacattccag

SEQ ID NO: 623428 - DNA, 478 bp, Homo sapiens
gttgggcaggtagagtcctgagggctggggtgggaggtcttgctcctgctggaggagccatggtgcaccggtcagactgggcagaggttaccataccccgggcaggacaagagctcatgggaggagaatcccctctgggacatagacactctgggttctgggatgctccctgagatcagcctgtacagctttgaactgcctctgccattgcctcagtttccccatctcacccagacctcgggcactttaaagatgcaaaaaagatccaataggttcagatttcagctctgctacatgtcagcttggacacatcattcggtctctcggagcctccctctccccagctatgaataatgggggctaaatgagaggcactggagagccrgaaacagcatgcagcctcattcacagtgctgccctttcttgtatgtcctggtcccccaaagtctgcctgctgccatcatgccttgtgccctcc

SEQ ID NO: 623429 - DNA, 620 bp, Homo sapiens
tatggtttcaatgtttctgaaatttcctaaaaatggaatcatacaaaatgtagtcttttgtgtctggtttctttaacttagcataatgcattctaaattcacccatgctgtgtgcatgggtagtttattcctttctactgctgactagtattccattgtgtggatgcgccacaatttgtttatccattcaccagttgaggaatatctggggttgcccattaggcacaagactgttacgaacattcaagtaaattatttgcgtgaacatgaacatttgtttgcatttctcttgcataaatacctaggggtgagattgctaggtcacgttgggtatatgcttaattttatgagtaactaccaaatggtctttccaaagtractgcaccatcttatacccccatcagcaataaatgagcatttcacagccttgccaacactcgatattgccagacttcatcaatttcaccattctggtgagtgtatagaataatattgtaatttagtttgaatctccctgatgattaatgatgttgagcatcttttcatgcttgagcatcttttcatgagcatcatagcactgtcactaatactttatcttccatttttgtatccttgctgaa

SEQ ID NO: 623430 - DNA, 628 bp, Homo sapiens
tctctgctcagccaccatcctgtagtttcgctaatgccctctaatgggcccatttagcagccctgtctcagctgtcactgcagcagctaattgctactcctcctccagctacacacagagctctgcaatcagcctgacgattccacgccgcccagctcaaactagstgaggcgctgcagacctcagccaacaaggagcttctccaatcccccaggtgccatgttcttgctgttgtttcctggggcccctgaagtgcctgaccctgagcaagttcaaggagcacacagggaggaggagccagggacagagtcagagtcagtaggcacagagctcttggcagcctgggatgaggaggggagtcacagggaccctgaatgggaatagagttccagtctcgcaactgtgtcttgtcttatagcaggagctccccaaagcagactctgggtcaaagattcaactgcaagtaatttgcttaggagatgcccccaggaagtgctacgagagaggcagaaggcaggcagggaggcaggaagcagggagagccatgaaaatgtgtggtaaggaggttacagctcaggtcctggcttgggcccccagggagtgccctctgagagcctatgtggaagca

SEQ ID NO: 623431 - DNA, 628 bp, Homo sapiens
tctctgctcagccaccatcctgtagtttcgctaatgccctctaatgggcccatttagcagccctgtctcagctgtcactgcagcagctaattgctactcctcctccagctacacacagagctctgcaatcagcctgacgattccacgccgcccagctcaaactagctgaggcgctgcagacctcagccaacaaggagcttctccaatcccccaggtgccatgttcttgctgttgtttcctggggcccctgaagtgcctgaccctgagcaagttcaaggagcacacagggaggaggagccagggacagagtcagagtcagtaggcacagagctcttggcagcctgggatgaggaggggagtcacagggaccctgaatgggaatagagttccagtctcgcaactgtgtcttgtcttatagcaggagctccccaaagcagactctgggtcaaagattcaactgcaagtaatttgcttaggagatgcccccaggaagtgctacgagagaggcagaaggsaggcagggaggcaggaagcagggagagccatgaaaatgtgtggtaaggaggttacagctcaggtcctggcttgggcccccagggagtgccctctgagagcctatgtggaagca

SEQ ID NO: 623432 - DNA, 530 bp, Homo sapiens
accaggaggaggagaccccttgacccccacagacactcgaattggcagggagagcagcttagagaagtgataggaatagcaagccagctgatatggagcccagggggtttgatgtgggagcctctgtagtggagcacagccatggatggccatgcccctaggcttgactgcttcagtaggatacttcagcccaagggaaactgttggggctgaactctgcagggcagtcttgctcatcagataagcctggtcagccctgagcaccccttggtctgctggcttcgcctggggccccagcctggctgcgcctgcttccagggcagcctcatgtgccttgggggcctacatcatagcttctgtgctggtggacagtgccttactggtggaaagctccagcaggtcggcccccacatccacrcaccagcacacaagctccttccccacactgcagtttcccccaggcccacggcaacccctcacattgatttgctgatgtatgtgtgtacgggcagtatttactttccttgccc

SEQ ID NO: 623433 - DNA, 609 bp, Homo sapiens
gtggaaattgaataacctgcttttgaatgacttttgggtaaataatgaaattaaggcagaaattaagttctttgaaactactgggagcaaagatacaacataccagaatccctgggacacagttaaggtggtgttaagatggaaattcatagcactaaatgcccacatcaaaatgttagaaagatcccaaattaacaacctaacatcacaactagaagaactagagaaccaagagaaaaccaacctcaaagccagcaggagacaagaaatgaccaaaatcagagctgaactgaagcagattgagacacaaaaaaccattaaaaagattaacaaatccaagagttsgctttttgaaaaatattaataaaatggagagactacttgctacactaataaagaagaaaggagggaagatccaaataaatattatcaaaaatgacaaaggggatattaccatagaccccacagaagtacaaataaccatcagagaatactatgagcaccctatgcacataaacaagaaaatctagaagaaatggataaattcccagacatatacaccctcccaaaactgaggcaggaagaaattgaacccctgaacaaaccaat

SEQ ID NO: 623434 - DNA, 467 bp, Homo sapiens
ttctgcacaacaaaagaaactatcaacacagtaaacagacaacctacagaatgggagaagatatttgcaaactatgcatctgacaaaggtctaatatttagcatctataaggaacttacatttacatgaaaacaagcaaccgcattaaaaagtgggtaaaggacatgaacatacacttttctaaaggaaacatgtatgcagccacgaagcatatgaaaakaataaaatacctaggaattttaaataccttggaaggtaacctcacaaggctcaaatcaaggtgtcaattttttgcattttcatctggatgttgggatcatcaaaagttcaacatcactgatcattacagaatgcaaaccaaaaccacaatgagatactgtctcataccagtcagaatggctgttattaaaaagtcaaaaaataacagatgctggtgaggttatggagaaagaggaatgcttttacac

SEQ ID NO: 623435 - DNA, 582 bp, Homo sapiens
gttgctcctcaggctgcttgaattcctttcctgaaagcaccttttcttgctctatcacataggctgcaaattttctaaacttttatgctctgcttcccrtttaattataagttccaaccttaggtcatttctttgctcttatatctgattgtaggctattagaagcagccacattgtttcttaaatgccttgctacttagaaatttgttctgccagataccttaagttcagccttctacaaagccctaggacatggacacaaggcagccaagctctttgctagggcataacaagtgtgacctttactccagttcccaataaattccttcatttccatctgagaagccatcagcctggacttcactgtccataccactatcagcattttggtcataactgcttacaaatctctaagaagttccaaaagtttcctcgccttcctgtcttcttctgagccctccaaattattccaacctctgctgcttccacaccttcaggtatctttatatcaataccctactccttggtatcagttttctatgttaggccattttgggtcactcaaaaggaatacctgagggt

SEQ ID NO: 623436 - DNA, 584 bp, Homo sapiens
cccgcagaactcacaggaatactagggcccgaggttccgaggccacaccacagacctgcctggttgaggatacattggccccaccaagcactaaacgctgtcccactggcaggaygtaggtgtggccattgccagagctgcccaaagcttggtcttgttgcaactgtcagttgggaaggtatccagtcctagaaactttgcctcattggcttctattccaagtctgggaaggattcgtctgatccacggagcctaggtcacgtgtctattctctacctgcaagagggactgggagaaaggttattggaatttctgttgctataagagcaagtgagtgctacttcccactaagatagagggtaaagaataccccaaacacaggcagagggactcagatccaggtggccagggatagcaagcaaggctagttttgtctatataaccttgactttcccaggtttggtccttaccctgttcacataggatgaaagccccgaagtctcttgtaccacagctaagggagagataatccagtctccaaggcaaatgcttgggagtgccttcactcaagagccaccgaggga

SEQ ID NO: 623437 - DNA, 521 bp, Homo sapiens
gactatgtactgtttcccaggaacaaggacaaatgaagcaaggttaatatgacaagtagttctctggtgcccaacatcgacaaagtccagaaagaaactaagcatcagagatctagcatggatgggagggacctgataaaggagacatgtctcactggggcattcaacccccaagcttagaagggccccaaagtcatagctgcagggagcaactaggttcacaggaacagcaatgattccctgtcacagctgaggcaaggagatgggcagtgatgaagttggtagggagacaacttcccagtccatgaggacaagcgtcagtccaggtaatagtaagcagtgccatcataacagattcagatccaggcagtgtgacaaaggtttcttttgttcacatcaagggggtaaggtggtatgcgcaaggctcttcctagtgtaggcctaggtatggcctgtcttcagctkcattgtctagaataggtggagcctccaggcagggtcacttctgcatggcaaaagcc

SEQ ID NO: 623438 - DNA, 590 bp, Homo sapiens
actagagataccagcacaggaagacatttgagggccagaaacattcaggaatagccttgtacagagatcaaagagaaagttcctccctttgacacagggataagtcactgtcaaggcaaagctcagagttttgcagcctatgtcatttactaggggcatctgcttctcagcagcttctgtgacaggtcctcattcccaaagcatcaggacctgaagtcagagtcargagggccagctgcagaggcttcataggtgcaatcagagcaccagcctgatgtgagccgcagcagatctgagtgaaattctgtgaaactctcaaaagttggcttgacccaagtcagtggcatgatcataagtctgcaattcccatacagtcattcacctgaggcacaggcctaccattccctgccacatacgaagtagtactccagcatggagactccatgtttagaggatgttgagtagcacagtcagctgtaagcaaccatctgttccaaagcagctgtctttcctaggagagcacccttgggaatctcagtgataatttaagcataaaaaccactgagaagctctattaagagaggctactg

SEQ ID NO: 623439 - DNA, 590 bp, Homo sapiens
actagagataccagcacaggaagacatttgagggccagaaacattcaggaatagccttgtacagagatcaaagagaaagttcctccctttgacacagggataagtcactgtcaaggcaaagctcagagttttgcagcctatgtcatttactaggggcatctgcttctcagcagcttctgtgacaggtcctcattcccaaagcatcaggacctgaagtcagagtcaagagggccagctgcagaggcttcataggtgcaatcagagcaccagcctgatgtgagccgcagcagatctgagtgaaattctgtgaaactctcaaaagttggcttgacccaagtcagtggcatgatcataagtctgcaattcccatacagtcattcacctgaggcamaggcctaccattccctgccacatacgaagtagtactccagcatggagactccatgtttagaggatgttgagtagcacagtcagctgtaagcaaccatctgttccaaagcagctgtctttcctaggagagcacccttgggaatctcagtgataatttaagcataaaaaccactgagaagctctattaagagaggctactg

SEQ ID NO: 623440 - DNA, 590 bp, Homo sapiens
actagagataccagcacaggaagacatttgagggccagaaacattcaggaatagccttgtacagagatcaaagagaaagttcctccctttgacacagggataagtcactgtcaaggcaaagctcagagttttgcagcctatgtcatttactaggggcatctgcttctcagcagcttctgtgacaggtcctcattcccaaagcatcaggacctgaagtcagagtcaagagggccagctgcagaggcttcataggtgcaatcagagcaccagcctgatgtgagccgcagcagatctgagtgaaattctgtgaaactctcaaaagttggcttgacccaagtcagtggcatgatcataagtctgcaattcccatacagtcattcacctgaggcacaggcctaccattccctgccacatacgaagtagtactccagcatggagactccatgtttagaggatgttgagtagcacagtcagctgtaagcaaccatctgttccaaagcagctgtcttycctaggagagcacccttgggaatctcagtgataatttaagcataaaaaccactgagaagctctattaagagaggctactg

SEQ ID NO: 623441 - DNA, 480 bp, Homo sapiens
gctcctgaaccctcctcctaagggacaagtttagctaaatgattttattgctaacattaaagaggatagtgtatgatcttataatactggtctactaataagttagggtttggtagcactttcctgcctgaagggtcttacaaaaatacatgaagtcttrtagatgagcatttgactacaaatgagacctcatttttaggtctttggacacagtgaagaataaactgtcaacagatgaacacttgcaattgatattatgaggaacactaactgaactcaagtaggtatctcaactagttctatttttccttattagacctataaggcaagttgtattcagttatgtcttagaattggatcaatagaagccttgaagttcccataagtacctccataatatctgcaattttgtctcttgttcacagtacctaagatagtaactatccggctgtttgtagtcaaggcttgctgacctctatt

SEQ ID NO: 623442 - DNA, 482 bp, Homo sapiens
cacagcctagacagctgacagtccttctgctatatgaggcctaagtagttcatggtgggaaacactgcaggcatgttctgtgaccagctgaacagagaaaggcttagatggaaactagcccmaatgtgctgagagctttgaggtcactcctctcccaacaacactgaacaagcaatttctcttaagagtgtggtcataggacatactgtcacccagaaattgagacaggcaaatatgtggactttcaaccaagattaacttctgcagaagctgctgaagccagtagcttacaaaagacacttgaatggtaactgagaggttgctggaggtggggtttctgaaccagcttgagtgaggaactccagggaccataatggtagaaggcttatagatttgtgggttctacctccaggagccctatcaggttcttatggtgagggttagaggaaaaccctatttcagaccttcagggttgtaggcca

SEQ ID NO: 623443 - DNA, 567 bp, Homo sapiens
tactatataacaattgaaaacgtcactgacactgaccaacagaaaatcagaatgatcactggttagtatgcttatgggcatgggtttggaagacatcagtgttacaggctaaatggtgtcccctcaaaattcgtatgctgaagtcctaacccctgtacctcagaatgtgactatatttggggatagggtctatacagagatttttaagttacaataaggttgttaggatgagtcctgatccaacataactagtgtctttataaaaagaaattaggatacagatgcatgtctgtgaagacgtaggaaaaagacagccaactacaagtcaatgagggaggcctcagggaaaacccaccttgccaagaccttgatctggacttacggcctccagaattgtgagaaaataaacttctgtcatttaaaccagtcagcctgtggtactttgttatggcagccctagcaaactaatacaatcagtctgtcaagatctgtgtcttctccctaaacatagaagtggtctgacagsttccgtggtcccttagtgtcctatgatccacatcctacatc

SEQ ID NO: 623444 - DNA, 627 bp, Homo sapiens
atttgttcgtgttatctatgatttctttcagaagtacatagcagttctctttgtagagatctttcccctccttggctacatgtattcctaggtattttattttttgtggttattgtagataagattgcattcttgatttggctctcagtttcaacattattggtggacagaaatgctgctgattctgtacattgattttgtrtcatgagactttactgaagtcttttatcagcactaagttcctttcagtggaatctttagggttttttaggtatggaatcatatcagcaatgagggacaatttgacttcttttcatatttggatgcctcttatttccttctcttgtctgattgctatggctaggactttcagtactatgttgaataggagtggtgagacagggcatccttgtcttgttcctgttcttaaggaaattgcttcaaacttttgcacatttaagataatgttggctgtgggtttgtcatagatggttattattttaagtatgttccttcaatgcctagtttgttgatgttttcttcatgaagaaactgaattctatcaaaagctttttgtacatctattgagatgatcatatggtttttgtttttaattctgtttatgtg

SEQ ID NO: 623445 - DNA, 627 bp, Homo sapiens
atttgttcgtgttatctatgatttctttcagaagtacatagcagttctctttgtagagatctttcccctccttggctacatgtattcctaggtattttattttttgtggttattgtagataagattgcattcttgatttggctctcagtttcaacattattggtggacagaaatgctgctgattctgtacattgattttgtatcatgagactttactgaagtcttttatcagcactaagttcctttcagtggaatctttagggttttttaggtatggaatcatatcagcaatgagggacaatttgacttcttttcatatttggatgcctcttatttccttctcttgtctgattgctatggctaggactttcagtactatgttgaataggagtggtgagacagggcatccttgtcttgttcctgttcttaaggaaattgcttcaaacttttgcacatttargataatgttggctgtgggtttgtcatagatggttattattttaagtatgttccttcaatgcctagtttgttgatgttttcttcatgaagaaactgaattctatcaaaagctttttgtacatctattgagatgatcatatggtttttgtttttaattctgtttatgtg

SEQ ID NO: 623446 - DNA, 551 bp, Homo sapiens
tactcattattgttaaaaatgcaataaaggccgggcacggtggctcacacctgtaatcccagcactttgggaggccaaggcgggggaatcacgaggtcaggagattgagaccatcctggctaacatggtaaaactccatctctactaaaaatacaaaaaattagccgggcatggtggcgggcgcctgtagtcccakttactggggaggctgagacaggagaatggcacgaacccgggaggcggagcttgcagtgagccaagattgcgccactgcactccagtctaggcgacagagcgagactccatctcaaaaaaaaaaaaaaaaaaaaaaaagcattaaagacaaaaatatatgatactatttgaaatactctttcaaagctttaagcatttgaaatattaatcatgcaattaaaatatatacttcactaagaaaagaaacagcgtctcaataacatttgcagcacctgttagagtataaaatgtcactttaaaagctaaaagctttatttaaataattctattctgtactatttgcagctaagatcaat

SEQ ID NO: 623447 - DNA, 551 bp, Homo sapiens
tactcattattgttaaaaatgcaataaaggccgggcacggtggctcacacctgtaatcccagcactttgggaggccaaggcgggggaatcacgaggtcaggagattgagaccatcctggctaacatggtaaaactccatctctactaaaaatacaaaaaattagccgggcatggtggcgggcgcctgtagtcccagttactggggaggctgagrcaggagaatggcacgaacccgggaggcggagcttgcagtgagccaagattgcgccactgcactccagtctaggcgacagagcgagactccatctcaaaaaaaaaaaaaaaaaaaaaaaagcattaaagacaaaaatatatgatactatttgaaatactctttcaaagctttaagcatttgaaatattaatcatgcaattaaaatatatacttcactaagaaaagaaacagcgtctcaataacatttgcagcacctgttagagtataaaatgtcactttaaaagctaaaagctttatttaaataattctattctgtactatttgcagctaagatcaat

SEQ ID NO: 623448 - DNA, 524 bp, Homo sapiens
cattccattgtctcaggctccaggcccagcttaggtgccacaccagctcagagatcaatcagccaacatggcttcaggttttaggcacacaccagcgccaggacaacactgagtccacaggacaggcttgagtccatgggggaaggcatgaatcctaagtccacaggggttggtgtggagcctgggtctgcatggctagttctaaagccttgatttttgagggctagcctggcaccagggtcttctggggtggtcctggaccctgggtttattaaagccagcctggaacccatgtccccagaagcctgaggctataggaagctagggctggcctggtgctgggacaggcatggggccttggtataggtatgggtatgggtatgggtatgtgggattctgggatcacagatgctgttctggttcctggtgccacagaggtcagctcaacgtggggtgagtaggttctgtcctggagtctaggtctagtaagtctcatccgggtcctcyatccacaggggctgacc

SEQ ID NO: 623449 - DNA, 610 bp, Homo sapiens
tcttcaataaaaacaattatatgttgctggtgaaaatataaaatggtgtagccactgtggaaaacaatttggatgtttcccaagaagttaaaaaaaagcattaccatataacctagcaattccattcctaggtatataactttgcttttgaagaagatctgggtaaaacaattagaaattgttggaaaaacgttaaataagtgagaattcaaattgcttctcaaatcccttaaagtcttgctctaatttgaagaatctgaagctagaaatcatagatactttcagaaatgaattatgaaaaatattagatttcaagcagctgactcatatttaaaggggctcactctacattaaatgataaataaataaatatatttacattatttaagtttaagtaagatgcctaaaatacatatttattatcaattttaatgtctttaactgtttttcgttaactgagtaactakgtgtcctaattgtgttggataaaaattgcttctattctgctagtaactgtccagcttaaggaagaagtgagacagttggtcagtcttggcctgaaggggctttgatgaaatgctgagaaacttagcacagtgcccaccacaga

SEQ ID NO: 623450 - DNA, 598 bp, Homo sapiens
catgttgcccaggttgatctcaaactcctgacctcaggtgatctgccctcctcggcctctcaaagtgctaggattacaggtgtgarcccctgcgcctggcctcattactaaatttataacatgtcgttattataataccataaaatatattcattattgtagttatttattggcctccgaaacaagattttctataattttgacaattcatatctattagatttatattccctttctataacccaaccttatcattttatcttatattaaaacaaatgaactatcgatgtttgctgctagtgtacatggacaaaaattgtcaatattgtggagctgaacattgtcgacactcatgtattcacagaatcccttaagtgtaatgattgcatcactctgagtatttccaaaggtaaaaatgcccagttgaaaacattccacggcttaaagaagtcaaataagaaaaatagttccattcaaaaagacataactataaaagcatctagatcaccaaagaatctctaaatggtcaagttaaatgtgacacaattaagaataattgttttgtttgcagctgagaggaagagggtttcaaatatgt

SEQ ID NO: 623451 - DNA, 560 bp, Homo sapiens
caatacctagtttattgagagtttttatcatgaagggtgtcgaattttattgaaggtcttttctgcacctattgagataatcatgtggtttttgtcattggctcatcacagataggaaaaatttagaaatacctgatacttttaacaaatgcttgattaattctatctagaaatcagcttctagtggacaaattgggaaagaaggaagagaaataaaaataaaacagagcatgctatagaaacaggaacaaaaacttgaataacaacacaggtacatgatctagaaagcaggagttggatctttgatagaatataaamaaaatggtgtaatgtgggaaatagacgtatatttccaaaggaatcccagatatgaaaaagtcacagccaaatagaaactgcaaataaactcttcacagaaggataggaacacctggttaatggtggctctcagtctttaggggatgcagttacatagtttaaggggaacttggcatcaccagttcttctcagtctctcatacagcacggcaaaatgtgtgacctggagtaagtttattaaca

SEQ ID NO: 623452 - DNA, 582 bp, Homo sapiens
tcctgttggtcacaatgcaaccgaattcatcctctccagccacgtttattcttcagacccatcgtgctctctgggcacctgcctttctggttggtgaggagagagcagaggaatgcccaggtttgggaagaacagtgggacctgtagagaaattgccatscagaaactatggacgggtaggagttggaggcttttgagaagtcagtcagcccatttctgtcttaccacttaataatgctgagaggttgcaggagtttgtattgttttaatttacgaagagcaggaacctcttagtgctatggaagtaattgaagaggcaacatggctatgaaaattatcaggcaccaaacagcagtgatactgatggggtgaatgcctgcatcccaactgccccttctcaggatgagcctcagatacataggagcaggactgagtttgggctatgtgaccccatccctgtgccacacccatgcacttgagtggtccagtggtgggcacctgacccaagctgagccaattagagttcttccctgagaattttccaaattcgaaccatttggaggtaggaggcattaggatgtg

SEQ ID NO: 623453 - DNA, 611 bp, Homo sapiens
attttctcatctacaaaataaggataatagtaatgcccagctcatgactttactgggaggcccacaagggagtgaagtttcaaattcaagtgctgtgactttctcttgtaaaacaaaaagcagatcacatggccttacaactctttgatcattcgattcaattcaattccacttaataaatattgctgagtgaccaccatatgccaggtctgatgagagctggagctcttgtaatgagcaggacagatgagggctgtcttcatgcagctgacattctaatgggggacagcagaaaataaacaggtaaaccaagaaatgaacaactaagacagttttgaatggagagaagcccaaggaagaaaacaaaatgggatgtagagtgagtggggtatgtgcttgagaggagagcagggcaggctatttcaaactgggacagttttagaaattctggggtatgtattgaccatggatataagccatctcgttagktcccatgcccagcatgcaggtgttgggcccagggtcaatgaaggatgtgtgtgaatggctgaagaactccgcatgcacactgccttgccagctttggactctgcaacctaaagaattgatat

SEQ ID NO: 623454 - DNA, 632 bp, Homo sapiens
attattgacttctgtatgtggcagatgtaccttaccaattatgttttgtttaggctaacagcgcagagtgacagtttaaaacttgcgtggcaggagaaatttactttgtaatggaaatatttccatagatttgcggagggtggtgaactggttgttcactgtgttcgatttctggttctgtgaagtagaacatactttatgaaacctacttttaacctctggaatatcagtgattaaattataactcggttctagtgtttaagcagtgagagatgtttatttatagcagtgtgttgccaaaaaagtcatgagaaaaagttgctagaaattttggtattctrtcacaacttcaattatgatgttttctgatagctttcagttaatacaatttgactagattattattttgaaatttgtagactagccaatgacagtgagattacatatcattttgagattttttttttaatgtagacttggaatttaggtaaatctgaagtaagttatgaataagttatggaggcattgagaagtttattactttgaaaaactattatctgtatcattgaataacaaccatttaaaagtatggcaaaattgcttttcactttgaagggatttttttaaaaaca

SEQ ID NO: 623455 - DNA, 612 bp, Homo sapiens
tcggggtgctgacaaggtaggaattatgcagcttcctgttacctttyttagcatctcacatgctacagaaagaagagatacatgaagccagtggttttccaaaggtaatcttacactgaagtttagtccataaaacagattaaaaaggagccaggtagcttattgggagggagggaaggaagaagagatgctatagtcccaaccattcccctttatctcccctccctgaccccctactccaaaggtccttcttttgatcactgtgccaagaaagaaaacacttgaaaaccttgcaatagtcaacaggcctgtcatgtggagagcagagaagctatttctaagtaattgggaaatatatttttgatcaaaatccatttccattcaaacagcttcatccagctctgttttagaaacaagattaaggatgcttttatcaaacaaatacatcctctgggaagtgtgtaaggtttgatttgtgaatacatttaagtctttgacttatctagttgccacatggaccttacaatttataagacagattaaaattgtgattactagcagttaattcaggctcataataatttacttgttcccagtgagttctgtgctggg

SEQ ID NO: 623456 - DNA, 598 bp, Homo sapiens
gtgaagtaaaactaattcatatgccagcatctcttaaactacaaggtattgtaaccacctgaggggttcttcctgcccacagcataaagacagaccatggtggcattgtcatagaggaagagtttaatagacacaaggctggccacaccacaggggagataaaatttgtactcaaatcacttcattcaaagctcgtaggggaagggtttttcaaaggcagtttggggaaaggagtggggtggccagctaacaggggcttgctgctgattggttggggcagagatgaactcatarggggctgaagctgtcctcctgtgcgccaaattgcttctgggtggagccacaggagtggggttgtaataagtcctaatacaatgccacttttactaaaacacatttcctaatctgcattataaagctgtataatttctataaagtcacagtatctcacttttaatggtttacagaaagtaaattctagtgtcaatcatgggctctctattaaatttactttagatatctaaaacagtacctcttgtcttccaaactattttgtctaggttatgatgctgagtaaaatataaagaactcaataaaa

SEQ ID NO: 623457 - DNA, 598 bp, Homo sapiens
gtgaagtaaaactaattcatatgccagcatctcttaaactacaaggtattgtaaccacctgaggggttcttcctgcccacagcataaagacagaccatggtggcattgtcatagaggaagagtttaatagacacaaggctggccacaccacaggggagataaaatttgtactcaaatcacttcattcaaagctcgtaggggaagggtttttcaaaggcagtttggggaaaggagtggggtggccagctaacaggggcttgctgctgattggttggggcagagatgaactcatagggggctgaagctgtcctcctgtgcgccaaattgcttctgggtggagccacaggagtggggttgtaataagtcctaatacaatgccacttttactaaaacacatttcctaatctgcattataaagctgtataatttctataaartcacagtatctcacttttaatggtttacagaaagtaaattctagtgtcaatcatgggctctctattaaatttactttagatatctaaaacagtacctcttgtcttccaaactattttgtctaggttatgatgctgagtaaaatataaagaactcaataaaa

SEQ ID NO: 623458 - DNA, 563 bp, Homo sapiens
tgttcaattttacaaagtgaatggcaaaaccagaattcaagctagtctaattccaaagtccaactatataacacctcagttacctatgaattatccaggcattcatatgctcatcactaatattgttgtttttatggagaagtttgtgctgagttataaactgtaggttttaaaaaacttttaatttaaaacacaactcatactcctccattaaagctaaagaaaaagaaaatgaaagaaaattgggcttaaagccccgtggttttcaattcaccctacacattgtcactagccatgatatctacttgctcagaaagttttagtggcttcttactgaccacacaaacagatacacacacacacacacacacacacacacacacacacacayagtcaaaagttcttggtttcacatttaaggtccaccacaattaatgttccttttttattttttcttgagacacagtcttgctctgttgcccaagctggagtgcagtggcacgatcttggctcactgcaacctctgcctccttgattcaagctattctcttgcctcagcctcc

SEQ ID NO: 623459 - DNA, 349 bp, Homo sapiens
cacattgattgactcttcctttcatgaaagatttctctgtagcatgtgatgctgtttgatagcattttacccagagtggaacttgtttcaaaattggagtcaatcttcagctctactactgctttatcaactatgtttatgtaatattctaaatcttttgttgtcacttcaacaawgttcacagcatcttcaccaggagtagattttatcttaagaagccactttctttgctcatccagaagctacaactcctcatcatgagatttcagcagttcagttccatcttcaggccctatttttagttctctttagttctcttgctatttccacgacatctgcaatgacttcc

SEQ ID NO: 623460 - DNA, 511 bp, Homo sapiens
cctactccatcccacgtgcagactccctcgacccccaaccccaggctgtcacctgctcctatattcattttctctgaggttggaggaaagagaaaggagacagcaatggccagacttccctggggttcccaaactggttastgtgctctgctcaagtgctggctccccgcccctctctatgcacacactcagcccatgttcactgattcccatcctaccctccagtcatttgcctaactgacttttttttttccaggaaacctcagagatgcattggacttggtcagcagacttgagttctatgcccatgccagtcactgactggccatgacctgagttggacaaatcatgcccactctagacttaagttgttccttatatggaaaaggaaaggagtgctttgtcagtggttcccagataccaatttataaagatttcactagtctgtggcaaaataatataacaatggctatgaattactgggtatttcctttgtgtgaagtggttttca

SEQ ID NO: 623461 - DNA, 532 bp, Homo sapiens
ctttgttttaagttttattttattataagaaagtctctctacattcaatttgtgatgtgaataatcatagattataaatagtatgatgattgttttttaattacaaggctattattgatatagactataaggtaaaactataaggtacgaccattgctttttaaatatttttagagccttctttttggaattgcctacagatcctttacatatttaaatgagatatgtataggaggtgacaaagctttgctatttgagaatggtttgatatttagaactagagccagatctgaggagtgaggtgctccaagtgagtaatattgtttytggtcaaacccaggtcatgacaataaagaaatgagactggttttcttgtctggctcctgaaatgatgctgaagacagttctgaacttttaggggttctagaaacattctgagcaatggcagtattggtgttatgctccagtacagaaactaatgcctttatcttatttgtctgttgacctctgtgcttctaacttgactgcaggt

SEQ ID NO: 623462 - DNA, 583 bp, Homo sapiens
catagaggagctgggatggggtggacagcagggcctggagaacatgggaacagggattgtgagctggatgggaatccatgctctaggaatgtccatggagtgaaaagtctgcaagtgttatacaaaggggcacctgaagttgctgacattccagctcaggctgtgagtagagttactctccagcagccctgcraggatagcaggggaggccggacacaacacccatggcccagaggccccagctcaacttattcaccaacaggaacttgcagagaataacatcagatatccataaggctctatgaaacccagtaatctatatgcatacctgctttaactaagccctagataggtttgctacttgctgaatattaacaatagctaatacttattaggggcccactgtgtgccaggcactgtttcaggtacttaggacacatcaatgcataaaacaaagattcctgctctcactagctaaaatcctatgggggaaaaatataaataatagatgtcataaataagtaaataatttatgttagaaaaaaatagaactggccgggtgtgatggctcatgcatgtaatc

SEQ ID NO: 623463 - DNA, 638 bp, Homo sapiens
gggtgtgccaatatacatctctgagcactaattaatgttttcaaaggaatgacagggcaggaaatttcttcaggtacaagaatgagaggagaaggattggggagacttcctctccactcccccccaccaagagctaatatagagtaaagaattaaaatgaaactgctcaaacatcctgccaggcatctccaacctcatagcataccatactaggggaatgactgaagaatttcaaaggatcaatgtgggcattctgaacaattcaatgattttatcacttcaaagcaaagtgccccttttgaatatccttattatgaattgtttatagaccatttccagcaattgtgcttcaytgggctcttagctctacagccgtgtacatagtgaacactccagcatgccctgaacatttgtctgtgcaaccccaggctttaacgagatgaacgttgctgacccagagctgctttgttcagtttctttacaagagccagaatcattataaactcacctgaactgagagagtcacttggcagacttctgatgtttgaaccttactaatgaaagcagtgatatatagggacaactaccatttaattgtaggaattcacactgagaaaagtgattgcttgcaactcaca

SEQ ID NO: 623464 - DNA, 641 bp, Homo sapiens
gcaaggtctctcaataatgcaccagtggtcaaggctggctttcagtggycaaggctggctttcagtggcgcctctccaaacagccaaaatcggtgtcaaaccaccagcctgtgcagcctttccaagatgctccagctgtttattcagccactaagtgttctgcccaaagtggactccacccaatggtgagctaagacaaatcaaacattcattcacacagtcgggagtgacatgcccacccagcccggccctctgatgcctgcagagtctagctgcagctggctccatgctcacaggtgccaggcacctggccaagcatggcagtgatctctggggtggggcgggaggagatgtttgcacagggcacaagcacccctgccagaagcaacagtgaaggccactgtttgttgtggaaagaggatagtttttgagccccgctgatcaaggtttggatcctagctcagtctctttccacctgtgcaaccttgagaaagtaccataacagcaatggaactcagcttacccatctatgaagcgaatgtaatgataacacaacctcaaggggttgttgtgagggttagctatcacagaagtaaatagcctgaaaacagagtctggttgtagcaggggtcaaataaatg

SEQ ID NO: 623465 - DNA, 581 bp, Homo sapiens
gggaagtcaaaagatcttggtcaagtctgcgttctataattgactgtgtgacctggacaatttggtaaattgagcttcacgtttcttgtctgaaaattagataactggtctagaatcagtaaccctcaaactgtctattattgtgaaattttattttaagaaaaaaaagattaagtattggaggaaaggaatctccaaatttaaggcagataaaaccagaactgccctgtaagaggtaaaaagaagcctattcaactgccttttttcattctgtggtggcctctgctttctctgaggagacctgttgtttgaaatgcagccaggagaccactggcctagaagatatccatgtttctttcagcttcaaaggttgagattccactcgaactgagctaacagagcttagatatgtrtttacctgtgaaatagaatctgacctcaagaagctcctccacccagctaataggtggtttggaaagaaaagaaatcacataggttaagaaggaaggtattaaaaaaataagttctaatttcaagagaaaaaataattttagataaaagaatataggatcaggaaaaga

SEQ ID NO: 623466 - DNA, 557 bp, Homo sapiens
cattattaataaattgtaaaggcaagtcatcctatatttttttctgccacaaatgacaccatggatgactgacgctacaggttctaactatgttcataaggtcagggctgcctgaactccaagacagcaataaacagaccaagaaaagcttccaggaaagttgagggcaggaaagatacactttcttcttcttgtctgcccttctcccacccagcccctatcaaactygacgcaagattccaaattcaagatgtttccaaatgacaggaaaaaggagatcttctgaatcaatttgaaaatgaaagataatttaaattattcagaaatgctttcaagttattccagaaatatgttagagcactatgtgatgaagcagtcctgatagcccactgcgtatgtctcctaactgagggatattaagcgctatgtcataaaggactgaaagctgcacctcaaacatgatgcagcttcctgttgtgcccatttttgtgatggaaagttatttaaaaagcaattttttatctttatataatatgcatattattatggagcagaat

SEQ ID NO: 623467 - DNA, 557 bp, Homo sapiens
cattattaataaattgtaaaggcaagtcatcctatatttttttctgccacaaatgacaccatggatgactgacgctacaggttctaactatgttcataaggtcagggctgcctgaactccaagacagcaataaacagaccaagaaaagcttccaggaaagttgagggcaggaaagatacactttcttcttcttgtctgcccttctcccacccagcccctatcaaactcgacgcaagattccaaattcaagatgtttccaaatgacaggaaaaaggagatcttctgaatcaatttgaaaatgaaagataatttaaattattcagaaatgctttcaagttattccagaaatatgttagagcactatgtgatgaagcagtcctgatagcccactgcgtatgtctcctaactgagggatattaagygctatgtcataaaggactgaaagctgcacctcaaacatgatgcagcttcctgttgtgcccatttttgtgatggaaagttatttaaaaagcaattttttatctttatataatatgcatattattatggagcagaat

SEQ ID NO: 623468 - DNA, 557 bp, Homo sapiens
cattattaataaattgtaaaggcaagtcatcctatatttttttctgccacaaatgacaccatggatgactgacgctacaggttctaactatgttcataaggtcagggctgcctgaactccaagacagcaataaacagaccaagaaaagcttccaggaaagttgagggcaggaaagatacactttcttcttcttgtctgcccttctcccacccagcccctatcaaactcgacgcaagattccaaattcaagatgtttccaaatgacaggaaaaaggagatcttctgaatcaatttgaaaatgaaagataatttaaattattcagaaatgctttcaagttattccagaaatatgttagagcactatgtgatgaagcagtcctgatagcccactgcgtatgtctcctaactgagggatattaagcgctatgtcataaaggactgaaagctgcacctcaaacatgatgcagcttcctgttgtgcccatttttgtgatggmaagttatttaaaaagcaattttttatctttatataatatgcatattattatggagcagaat

SEQ ID NO: 623469 - DNA, 543 bp, Homo sapiens
acttaaaaagtaacaaaactgattcaaacatatcttatatattgtattttaacttaaaagattgttcgtggctgggcacagtggctcatgcctgtaattgaagcactttgggaggccaaggcaggcagatcatttgaggtcaggagtttgaraccagcctggccaacatggtgaaaccacgtttctactaaaaatacaaaaaaattagctgggcatggtggtgcatgcccctaatcccagctactggggaggctgaggcaggagaatcacttgaacccggtagacagaggttgcagtgagctgagattgcaccactgcactccagcctggacgacagagtctgaatccatctcaaaaaaagaaaaaagattagtcaatgttttgatgttaagactttttttctttcagtgtgggtccttctgattggcatttgtgttttgtttttgtttgataaactacagatacactgtcttatttataatttttttgttttggcttcttcaaagggaaataagaagatatagacactataggactgagtgt

SEQ ID NO: 623470 - DNA, 540 bp, Homo sapiens
gtttgtaattgtgtgtcgtgtgtgtgtccaggcaagtgagtgtgttttgtggctaccagatagtgcaatctgcttctctgaaattggaaaattctgaaggaatttccatttacaggttgaaaaagcccaacatattgagaggaatggaccctgactgtttcagtttggacactcttggggattgtctgttgctgcagaagttgcattgcattttggtgattgtgtgtgtgtgtgcgtgtgtgtgaatataggttatgggaaattagaatttgctaaactgatacttttttgtaatgctttttggccccagtattctttggaatttrgagtttgctgttgaattaaaaagtgagatgaatttctatgtcttcaggcttttatgttgctgttttaagcaaggttgggcctccttattagggtccaagtgatatccttctgtggtgctgtttggctccagtgttctttggagtctggggaagtttggtcatcaaaaattaaactgtcatggaaacggctttaccaaaaagtttagttcacacc

SEQ ID NO: 623471 - DNA, 540 bp, Homo sapiens
gtttgtaattgtgtgtcgtgtgtgtgtccaggcaagtgagtgtgttttgtggctaccagatagtgcaatctgcttctctgaaattggaaaattctgaaggaatttccatttacaggttgaaaaagcccaacatattgagaggaatggaccctgactgtttcagtttggacactcttggggattgtctgttgctgcagaagttgcattgcattttggtgattgtgtgtgtgtgtgcgtgtgtgtgaatataggttatgggaaattagaatttgctaaactgatacttttttgtaatgctttttggccccagtattctttggaatttagagtttgctgttgaattaaaaagtgagatgaatttctatgtcttcaggcttttatgttgctgttttaagcaaggttgggcctccttattagggtccaagtgatatccttctgtggtgctgtttggctccagtgttctttggagtctgggraagtttggtcatcaaaaattaaactgtcatggaaacggctttaccaaaaagtttagttcacacc

SEQ ID NO: 623472 - DNA, 529 bp, Homo sapiens
tccatgtgtctatattcatgcatgtacaaagaaaatagggagtggaaaaagtttaggtaataagatattatctaaagcctgatagaaaattggtgaaatacggttgattaatattgcttatagttaaggctctttgtcttgatgaaggtaaaataagaaatataataaataaatacattggcagtttggcattcttttttaatatcattaaacattcagctargtttagtgtggagccaaatttctcataaatacttgcattgcttcacactatatttgctattctgcatagatagtactagcactaaggtacttactgatcatgtatctaaaatgaattacttaattgcacaaaatatatagtgttattgacggacttacaagtcattaaattatatatcaggaacaaaatatccaccttgtattttatcaggccctgggtgacacttcagcttataaggtaaactgagtagggggaaaaattgggggttcatttcctgtttatttgtttttgcttctagttttcatt

SEQ ID NO: 623473 - DNA, 529 bp, Homo sapiens
tccatgtgtctatattcatgcatgtacaaagaaaatagggagtggaaaaagtttaggtaataagatattatctaaagcctgatagaaaattggtgaaatacggttgattaatattgcttatagttaaggctctttgtcttgatgaaggtaaaataagaaatataataaataaatacattggcagtttggcattcttttttaatatcattaaacattcagctaagtttagtgtggagccaaatttctcataaatacttgcattgcttcacactatatttgctattctgcatagatagtactagcactaaggtacttactgatcatgtatctaaaatgaattacttaattgcacaaaatatatagtgttattgacggacttacaagtcattaaattatatatcaggaacaaaatatccaccttgtattttatyaggccctgggtgacacttcagcttataaggtaaactgagtagggggaaaaattgggggttcatttcctgtttatttgtttttgcttctagttttcatt

SEQ ID NO: 623474 - DNA, 536 bp, Homo sapiens
gcatcagcttctgagttgccttttaagaccataatacaaggtgatggtgggagtggatgctttaggctcaacagttatgcatcaatggcaaggagagggctgcttaagacaatggcaagtggagcatgtaatcataaaattgatccacattttatgctcatgcttctctggtagtgtgtatttttttaattgattaacagtagtaaacctgctgtgtgtatgaatatatatgtgtatatacattatatatgtgtatacacataaataataagagtgggagaaacagagttttttaaaccaaaaatggaaagcaaaccccaattgagcaaattttatgatgtgagtctgaaaatgtatctaaaagagtgtgggaaaacttcaagagttgcatcttcaaatgatgtggtatacgtgtgtgtgtgtgtgtgtgtgtacgtatatatgcatgtgtctattcatatatatttttkcttccctccagttctcttcgttcattctgaattccaattacacagatttcagactctttaataata

SEQ ID NO: 623475 - DNA, 627 bp, Homo sapiens
tttgcttcctccttataatatgtagatatattaagaattcatatctttccttaattatgagcatattgtgatcttatagtagttatatttgctattttaacattaatgtctgctatttacaatatcgaggttatcttgttattggtttcatttttttccttttgagaatgtttcccattttcccagtttttcttatataaagtaattttagatggattcttcaaaattatgaatagaaacttggaaagacagaagattatgtcatttttctccgttgagagttgtttctgtttagcattcaactrtcttcactggacacaaatcaaacctgtttattggccccatccactgtctcattttaggtatataattttttgctgagtttttttcttaaatctgttccacacatgcatagttcaggggtcagagagagctatagtagagataatttcccatctctttttttttttcttttctccaattttcacaactttttcctctttttgcagcaaccactgattccctattttcagttctctaattttccaggcaacaatgacgggatttccactgccgcctgatatactgcaatatgcagaatctccagataaaatccacaaaaaattg

SEQ ID NO: 623476 - DNA, 600 bp, Homo sapiens
ctttgcacaatgtcagacttttattgatgcaatttcaatcctaaaagcaagcctcatggggttgccaaggatgcaattgtccttagtacttcctgttcacagtagtcagagctgtgagcgcacaggctcaaacaattccacaggtcaggtcaatattgcaatccatatacaatagtatacatagttaatataaaaatgttataaattaacccacagcaaacaaagtataataacatttaagatcaagagaaaagggttaggaaaaagggttaatgaatcagttcgtggagagcaacatgcacaaaaacacaatgtcctgccttggccctgtacagcccatcagcatcagcatcttgcaaggaaatgtctttgatgttggcagagccttagcctggggttgccaggtgcttatcacaagtgacagcaagacrttgtctattaaaatgtatgtttttagctgatgaagtcctgctatttttatggccacagaatcctctggtgaggattgatagtggaagaatgtgcttggttatgtccttatctggttggatgcagtctttattgattaggcaaaacatattgtctgtgttggcatggtgc

SEQ ID NO: 623477 - DNA, 628 bp, Homo sapiens
gttacagaagtgtgttaaatttcaatgactgaaactcagcactcctctaataacataactaatcactcagtaataaattcagcaatagtttttcaaacacattcttagagtgactagcttaattctctgaatagtggctaactgaaaatgaatatttatagacccgtttttgaaattattacagtgtaaattgtgcatctttaaccctgtacaaaatcaccatgtgatagaattcacaacttggttgttcatttaagtaaaatactttcaatataccgttaytattcagaaatgtatagaaagcaattgaattctctgtgggaacttggatatacaaggtctgttatttgtcatcacagtattggcttccaagtttaagagccaaatcctcttagctaccagaatacatacttaacgatctcctgatgtgatcaaattatcattgatgtagtaaatcacttcctagattcacttccacttgacaatgtatcaatgtcggaggcacaggatattttttccccagaaatactttatttaccaacatgatgtgattttagtgtatgttttatttaatcttcgatgaaaaatattttttaaaatctctgcatacacttggtggggcacggtg

SEQ ID NO: 623478 - DNA, 489 bp, Homo sapiens
ttgctatggtataaacctaaaaatgccagaatgtcttgaatgagcatggtgagccaaagaccacaaggagatcttacatgggacatttttctgtattacacccattgcaaataactgtgctgggcaaacrcagcaaagttggtaagaataatcataaggtggttcatatttaaataaggggcacagaattaggtttagtcagtcccaagaatcaatgtaaagtagggtcaggtgcagtggcccatgcctgtaatcccaacattttgggaggcctaggcaggtagattgcttgagctcaggagtttgagatcaactgaggaaacatagcaaaaccctgtctctactaaaaatatgaaacctagccgggtgtggtggtgtgagcctgtggtaccacctactcaagaggctgagatgggagaattgcttaaatctcagaggtagaggttgcagtgagctgtgactgtgccactgcactccagcttgggtgac

SEQ ID NO: 623479 - DNA, 489 bp, Homo sapiens
ttgctatggtataaacctaaaaatgccagaatgtcttgaatgagcatggtgagccaaagaccacaaggagatcttacatgggacatttttctgtattacacccattgcaaataactgtgctgggcaaacgcagcaaagttggtaagaataatcataaggtggttcatatttaaataaggggcacagaattaggtttagtcagtcccaagaatcaatgtaaagtagggtcaggtgcagtggcccatgcctgtaatcccaacattttgggaggcctaggcaggtagattgcttgagctcaggagtttgagatcaactgaggmaacatagcaaaaccctgtctctactaaaaatatgaaacctagccgggtgtggtggtgtgagcctgtggtaccacctactcaagaggctgagatgggagaattgcttaaatctcagaggtagaggttgcagtgagctgtgactgtgccactgcactccagcttgggtgac

SEQ ID NO: 623480 - DNA, 613 bp, Homo sapiens
  misc_feature 383: n = A,T,C or G
tatataatatataatatgtcatatataatatatatataagtatatataaatatatattatataatayttattatctctcaccctcatatcttacatgtgaaaaactatataaataaaattgcatcaaattaaaagaattttattgctcatcccatactatggaagcaccataatttaagattcatttagaagattctttgcatgtttacttgtaaaaggaaatgttatatattcaacttatatatatatatttattatatatcatatatctatataaatatatatcatatatttataatatatcatataatatataattataatatatataactaaatctcttgatttatttaaccttataattcaggtataaattaactaantctaatcagaatgattttttaaacaataaggcacagattttatttttatccaaaccactaggaaaccttggattttaaatgagatcacagcaattatgcatagaaagattgttcattgaaaaggcacattgcttctgctggctctattccagcagacatgcctaatgggagtaatgtggctttcacagattcggaaaatcaagattttcttagtttgtataaacactgaa

SEQ ID NO: 623481 - DNA, 579 bp, Homo sapiens
tcataattacagggagatacatgttatttctattttgagttcaatgtttcactgcacaaatagaaacatcaatgcatatgaaagctatcataatagaaactcatttacatataagatggttccagaaagttaaaaatgtcatgaggagaaagatgaggaaaagatcaagcttaaattccttttcactgaatttgagtaagctcatattattcctctgattgtaattatatattattgtctgtaatgtatcacaatttccagtaggattacttttttttccatgttacgtttgtgtgaattatactgtttctgaactttgatttttaccttccttaaattataatcagaaagagtggacttacatcatgaaatattcatatttacattgggcagcatcattggatgagcacatgagctcatatttacttgtctccttcaaacccagttttgttttgtaaacaaaatctaaaagtaactggaaastagcatatcattctggttaaaggtctggtaattggagtcagacaaacttactttccaaagtttgctgtgatccttaatggctatatagaatttttc

SEQ ID NO: 623482 - DNA, 586 bp, Homo sapiens
aaatcccacatcatgataattatctatccattttctagtcacagtttaaaagtatatttctaatayacctcccgtactttttagaagtgtaattagtatttcagataatttaccttaaaatcaaatgtgatttgacctccttgtcctcattttctacctctccaatacctatgtgaagataagtccagcagcattatgccaggtatacagacaaggatctcattatgtttcctagtaagtagcatcatggcttccaaggaacgtaatgcttcagtacagtttctatcacataataaaagtaaatcttggatctaatttctcccattatattatgtctagaagaatagcttgaagtatctatgaaaaacaaaagccagtataattttatataaatcaggaaaatgtttatccttttaattcctcaccccaataccttcaatgacgcagccaggaaattattcttccaactgtcagagacagaacattatttacaacttgacagctctgtctccctacatttggatcagaaataatagttttgaattggaattttttaaaatccttgtttattttataccaagaaaaa

SEQ ID NO: 623483 - DNA, 586 bp, Homo sapiens
aaatcccacatcatgataattatctatccattttctagtcacagtttaaaagtatatttctaatacacctcccgtactttttagaagtgtaattartatttcagataatttaccttaaaatcaaatgtgatttgacctccttgtcctcattttctacctctccaatacctatgtgaagataagtccagcagcattatgccaggtatacagacaaggatctcattatgtttcctagtaagtagcatcatggcttccaaggaacgtaatgcttcagtacagtttctatcacataataaaagtaaatcttggatctaatttctcccattatattatgtctagaagaatagcttgaagtatctatgaaaaacaaaagccagtataattttatataaatcaggaaaatgtttatccttttaattcctcaccccaataccttcaatgacgcagccaggaaattattcttccaactgtcagagacagaacattatttacaacttgacagctctgtctccctacatttggatcagaaataatagttttgaattggaattttttaaaatccttgtttattttataccaagaaaaa

SEQ ID NO: 623484 - DNA, 425 bp, Homo sapiens
tcctgtgaaactagcccctgaccccccagaataaaaattctagaataggtgctattcattttgaagctaaagccagaaaactrtcattcttgatttattccttttttttcactaaccacaacctaggtcttagatttttctctatttctattactgaactcttcatgctcctcatgctggtctctatgaatctactctggtactctccaaaccgttttacacattaataccaaatatatatacatacatatacatatgcatagctatgaaatacatacatatatgtatatatgaaataactatatatgtatatataaaaagcatcacattgtacactgtatacacatatacatgtgtatatataatatattcatatatgtacatatatacacacatatgtacatgtatacacatatgtacacgtg

SEQ ID NO: 623485 - DNA, 555 bp, Homo sapiens
gtggctcaaatctcctctacactctcaaaactcctaaactaatgggtgaattgcttaaatttcaacccactcagggatctaccaatattgaagtctttatatttctccttatgattttctagctccatatacrtagagaagaataagcagatttgtaaagtttaggttgcattgtatctatcagataaatatgtcttgtgtttccctcaaccttgctatccctccaaaaaaaaaaaaaaaaaaaaaaaagaaaaggcatagtttttacttcttaaatgtctattgtctgaggaaggtcagtctttataatctagccatctgaatgcagtaactatcaagaaacagaaaaatcacataatcttttaaaatatcttcatactagactttacgttacactgaatctttcaatttgacttctgcatttttaaaataggtattttatttttgctaaaaaataattcagttttcaggactctaagggcttctccaggtttagagttgacttctctgggttttatgattagacctagatatcttaaaatgaatgttttaatt

SEQ ID NO: 623486 - DNA, 555 bp, Homo sapiens
gtggctcaaatctcctctacactctcaaaactcctaaactaatgggtgaattgcttaaatttcaacccactcagggatctaccaatattgaagtctttatatttctccttatgattttctagctccatatacatagagaagaataagcagatttgtaaagtttaggttgcattgtatctatcagataaatatgtcttgtgtttccctcaaccttgctatccctccaaaaaaaaaaaaaaaaaaaaaaaagaaaaggcatagtttttacttcttaaatgtctattgtctgaggaaggtcagtctttataatctagccatctgaatgcagtaactatcaagaaacagaaaaatcacataatcttttaaaatatcttcatactagactttaygttacactgaatctttcaatttgacttctgcatttttaaaataggtattttatttttgctaaaaaataattcagttttcaggactctaagggcttctccaggtttagagttgacttctctgggttttatgattagacctagatatcttaaaatgaatgttttaatt

SEQ ID NO: 623487 - DNA, 499 bp, Homo sapiens
gatgctttattttcaccaaaaatattcagtatgaatgtgtgcatacatttaaacacataaccaggtgactatgacatggtggggcaggaaaattcggtaggctgaataagaatgtgtgatccaaggaggtggtcatgcagattatctcaaaaagatatctttaaatcacactcagamgaaaaataggaagttgtgtatttattgaaaatatactgaacctagcacatgcaaatactcccttatttgataatataacatcaagctaaaactaagtcccagataatgaaaccaaatatgataagttaaagcaggagaagataatgccatgaattagttggaagacaggatagatatcttacctagtgtaagtcctatttgctatggctagtttttaatacagttcctatagagagcaggaggtatgagttaccttggacccaaatgagttcagaaactaaaaccaaaatcactccaaaaaagcttcataatccaataatag

SEQ ID NO: 623488 - DNA, 573 bp, Homo sapiens
aggctggctgtctttgctcattcctaagcatgagctaagctagctttgtgggaaaaaaaaaatagtttatagtttaaataatagcccttccccaaacctaaactcttcttgtaaaactaatgaaagaccaccaagttaggatgagagggcctggaattttagataattatctaaattattcttgaggtcataagatttttaacttccccaattactcttgaagataacatctattattgtatagataatactatcgtaaaacctaagattagccttttgagatgtcttttcatgtttttgcatttctgacaaccagatggctccatgtggcctgttgtggcccccacccaggaagtgactcagcacaagagaacagcttcgacatcctatgagggtcatttcaaaaccaactaatcagtgctcccaactcactggccccctgcccaccaaattatccttaaaaactccaggccccaaattctcaaggagactgatttgaataataataaaacttgtgtctcctrtgcagccagctctgagtgaattaaactttatctcttgcaaatcaaaatg

SEQ ID NO: 623489 - DNA, 664 bp, Homo sapiens
ctgctctgcccactggacatttatcctaggacaccaatatatccattgttctccagggcttcattggctctatgacaactggaagggtcagaaatgatcatgatctctgactctggtttctttcttcagttatgtttctgggcctctgtgctgtgcagataattttttttccctgttgggttatgaatggcacaagtgtttcccaagttgggtttttttttctcctttactatcactgccaatgtatctgacagttacaaaaggtaccaagggaaggttaccagagttccaattcaattaacacaactaactgactattgtaacttgtagacattaccaatgggaattaacrcttctgaaaaaggtttatttcttctcttgaagaagagattgggaggaaaggtatagcattaactagagtttggagaaatgtcaatattcaggagccaaagtttacaacattagttaattgtggagttggagaaatttgttccagtgacgaaactccttgggcagagatttcatctgttttgctctgtcctgtatctcctgtgcttagcacagggcctggcacatagtagacacgaaataaatattagcttattagacaagtgaatgaaggaataaagtggttatgtgatatcaaagtgctataagacagtcc

SEQ ID NO: 623490 - DNA, 469 bp, Homo sapiens
tgatactacaatagtggatacatgtcattatatatttgttcagacccatagaatgcccaataccaagagcaaaccctaacataaactatgaaattagggtgataatgatgtgtcaatgcaggttcaagagtaccaccacggtgcaggttgtcgatagtggggaagctgtacacgcggagggaccagggcatatgggaactctgtattttctgctcagttttgttgtgaacctacaacttctcttaaaaaattattatttttttaaagcaagatattaaagcaagatattattttttaaagcaagatacatttttagagaaatgccwatgattttttaaactacctgtgatcccttccttttcaagaaaaccacgttaacactttagtttgacactctttagtattgtcatgtctttagtatatgtgtgtgtgcgtaggctttccttataaaatgggaaaatacgagtat

SEQ ID NO: 623491 - DNA, 590 bp, Homo sapiens
aagcttggtgatccctttactgatatgttggagggcaatttccagaatttagtttaactggctggctgaactacatgattttgaagaatccttccaactgtaaggtttttcatttgttctgtttttttaggagatggggttttgccatgttgcgcaactaatgaagtccatctaattttgccactggatgcattatgacactctccctgttttaaaggaatgtattaaatgaatcaagctcattatgaaaccagtaaaattttctcctatgaaactcatcatataacacagacattaaagatgggaatatgtgcgattaaattgtttgggagattctactctaaaataggtgacctgcatttttctccctagaaataactgctttttgtggcaactttagttcttgatttatctttcctaatgcagtctattctctaatgagaaatctgtttttttgaggcagcttaatgatctgaggttaggagtcagrcacaagtttgaattccaattccaaatccttcgtagctgtgtgatggagcaagtcaccaaattcctctgaattggttttctcatctgtcaaagggagatag

SEQ ID NO: 623492 - DNA, 615 bp, Homo sapiens
tgaagaaaagaaggcacaccatgtcaaggagctgaagcarcatgtttagaagttctgtggcgtaagggaggatgatatcagaagggatggagcaaaggctgtgaggttggagctgagggagagggagtgtgatataagctaaagttagagttagaaaggggctggagcaatcaaggctttgaagcattgttgtcttcatcttctgagcatttggaaaccttgaagggtttgtggaaagatcattggtgagacagtgtcaagtgaaaagaagaaaaggccttgggatctattatttatttttattggccaagaagagcttaccctatttcttaaccaccttagttattctttctttttttatttgcccccccccacccccaagaggtagaggagataaaactttaactaggaaggtagatttaactctttgttcactttgatgtctttaagagacctagagcatttctgtctgatatatttcactaaataactaatagcataaacatggtagcattaatcttaatggcatccttgtgaaacatttttatgatgtagattacagtctttttgtttgtttgtttgtttcttgagatggagtcttgcactgtcacccag

SEQ ID NO: 623493 - DNA, 608 bp, Homo sapiens
ggcatatataaatactactgatttttgtaggttgattttgtattctgcaactttactgaattcatttatcaattttaacagtgtttttgatggaatctttagggttttctaaatataataccatgtcatctgtgaacaaagttgatttgaattcttcctttccaatttgaatgccctttatttctttctcttgcctgatttatctagctaggatgtccaagaaaatgacaaaaacatcctacttatgttgtggatgtcatgagtgtggtttaaagcaatgattggataaaaaactgctaccagtaaatcatttcaattagctatacagatcaagaaaaattttttaaaaaataacgtggtatatacktttgccacacacagctgagaaaatcaagttatgtgtactaagatgaaaacaagaaaaactaggcagaatgaactggaggggtgggactaattatgcctggaatgcaggaaaaagagaaaagggtggggagaaatggagggagggagggggaaaagagggaggaagggaatcaggaaacactacaaagctacaaatcagggctttttttcccctagagagccaatttaccagcacaccacag

SEQ ID NO: 623494 - DNA, 489 bp, Homo sapiens
aattctataaactgagatagcctacctagacatgtccctttctgctgcttttttctagctcccatttttcctccagaggagatagatagatgaaagtcacatcaagtacaatgccagaaaggccctggagaaacctgagggtcccaggtacccaggtggagccgagatggagacwcaggggaataataaaggatggataataccacttgggccaaactctgccaaatagcctctgcagggagctggttaagagaaagcttctggagtcaggcacccttagctttgactcctgactctgtcacttaatcttagataatttactttacctttttggacattaatttcctcacctacgcaacaaagataatgatgcctacttcatagggatgtcccagtgtttaaatgagataatgttggtataatgctgggagatcatgaatgctcaataagcagttcacaatttggtttacagctaacccagacagtgaa

SEQ ID NO: 623495 - DNA, 538 bp, Homo sapiens
ataatccaacatttattgagcatttaccaggtactgttgcataaacttcccatgtattcatttattcaatcatttgcaacagtaccaagaggtaggtactgttattacccccattttacagatggcaaaacaaaaacaaaaacaaaaacaaaaactgaggcatggagaaacaaagaaacttgtccaaggtcacacaggttgggtaagtggaggtgggatttgaacccagggctgcccagcatgagagcctgtactcaataagcagtatgccaaccatcttctcaattttgttaggaatactgagtttctttgaaagaattcatatgaataaagagtgatatggattgaaatttttgaaaatcgctgtcttttatggagttttcaagtttcaytggttcaataatcattctctgggttgagacggtcaagaacctctggtgacactttctaccaagataagaccttggcttcagcctctgactgtggacttgaatctttcttttagctttgttaagccagaatttgctaggtttggcca

SEQ ID NO: 623496 - DNA, 383 bp, Homo sapiens
ctgaaattttgcctcaaacatccatacaagtatagggagaagttggtagctaacattagttacctaaaaggcagtcgtatcaaaagcaggggaagattgggtgactctccacttccaggcagtaattgatcctaggtaactgatcaaagtttgctagaaggtagagtatttcacatatgctgcccagagacaaacttctgacctgcttgaaatttctagttgaaaatgtatatatccttgcaaatattttcaaaccttaacacttctgattataaggtactcctatctattagggaagcatgatatgtggattgctgtaaaagatggyggtactatagaaggctactacatatgtaacaaacctgcacgttgtgcacatgtac

SEQ ID NO: 623497 - DNA, 585 bp, Homo sapiens
tctgtgttgaagctttgagaatacttgtgagaatgcaaatatagtgaccactgattgttcccagcaaagagaggttagactagatcacaaggcttttgggttgagagttagtctagttggttatgatgttatgggaagagggaccttggaagagagatccctcagcataaactctggggagggagtgtgaaggtggtgcccaaacacttgatatgagggaattgaggagccaaggtgtgggtgggatggagagaggcagtgatgccacaagccaggctccatttatagctcagcttacattacaacgtgtgtacattgttttggtttctatacaagaattttttggcaaaatttggggcttttcttgtggggaagacaaatcctaaccttttatcaagtgacactgtgagatttataattagataatagtggctgtctcttgagggractgtcagtttgcaagtgattctcaccagattatggtgggatcaataggagccgaataattaaaattcgatactactatgtctctctcaataacactgtggagaatgatgtatgacagatttaattgaatttgtcaga

SEQ ID NO: 623498 - DNA, 550 bp, Homo sapiens
tgtgtgtgtgtgtgtgtgtgtgtttgctttgttttggtgaaggtttcttttgctgggagaatatgactgcagtcacagaacaatggcggatttagttcaatcactctaaacagtggtcaacagcagcagcaccatcctacaacctacttaaccacaatctattgttagttgccattacatttcttaggctagctgaatgtgtaggacaaagcttagcaaaaattatagctttccccaaacaacaacaaaaaaccccactaatttctcaatgagataggaaggtgagatgcagaaggttgggccacccasatattttgagagtagtgcattccaaagcctgtacttttctaaactgctacagtgatattagcaggcatttatttagagaaattggcaagcatgttgtagggagtcttgagttgtctaagaagaaaaatcaaaacaaaaattaaaaataaaagaaacaaaccacatcagaagatggtatatgcattggataaagagcctacggttttctagcagctgtaatgggtctgggagtttcttgctt

SEQ ID NO: 623499 - DNA, 569 bp, Homo sapiens
aacacgattcctggccaggaccacagtctgctggagtttgcactttccccccatttctgagtgggtttttttctgggaagtccagttttctcccacatcccacagctgtgccccttaggtgacctggcatgtctaaatggtgccagtctgagtgaaagtgggtgtgtgtgagtacgtcctagagtgggataatgtcctgtccgaggctggttcccgccatggccctgagcttttgggacaggttcctgctaaccttaactagaataagcagagtggcagatgaatgatttaattaattaatataaactmttttaaaataaaaattcttgaagtatatgacacttataccgatgcacaacaataaacaatatggtatgaaggcattcagtgagcctgccgtatttattcttgtttgtttttgaactacatggtagaagaggctccttccaatttttgctttgcaaacatttattccttgatttaacccaccaccactaccattgccatcactcacagattgaacaaaaatttggtgcattctttcacttgcatttattctaatgtttgat

SEQ ID NO: 623500 - DNA, 577 bp, Homo sapiens
ttgctttgggtattagtcttctttttctagtttcataaagtgaaggtataggttatggatttcagaactttctttttaaatgtggtgtttatactataattttctcttataattttttattactatattttttcttataattttctcaaggactgtctttgttggatccaaaaagttttagtactttgtgtttttgtttttwttatcacaaattttctgattttattgtgatctcttttttgaccccttgcttatttaggtgtgtgttaatttccacattttctcaaattttcgaaattttcttctgttattcacttctaagtttattctattgtggtaggagagcatactctatatgacttcattcctttaaatagattgagacttatttttattggctaatatatactctctccttgagaatgttacatgtgtgcttgagaaccatgtgtattctgttgctgagtgaactattctatagatatttgttaggtctaattggtttatagttttcttaaagtcttctatttccttgattatctttgtcttgttcaatatttatcacaactgggtaatt

SEQ ID NO: 623501 - DNA, 561 bp, Homo sapiens
gtaagcacattagaaaaccatctatatttataaatcgcctcctttatcccgtgtctccttctatttaccacttcatgtatttccttcaaactcatttcttccaagttgtcactcattcaatctcgacttcctcwcttcctatcacttttcaacctatttaacctagttttcactttcattgttccatagaaatggctcttgacaagatcactctcgacttttattctgataaaacaaattgacccagcactttcctcaatctactcattttctctttcttttctttaatttttgtgggtacatagtaggtgtacatacttatggggtacatgagatactttgatagacatgtaatacgtaataatcacatcatagtaaatgatgtgtccattgccacaagcatttatcctttgtgttacaatcaaattatattcttttagttattttaaaatgtacaattaaattattaaccgtagtcaccctgctgtgctatcaaatactagtttttattcattctatgttttgtacccattaaccatctccacttccccctacccaccc

SEQ ID NO: 623502 - DNA, 561 bp, Homo sapiens
gtaagcacattagaaaaccatctatatttataaatcgcctcctttatcccgtgtctccttctatttaccacttcatgtatttccttcaaactcatttcttccaagttgtcactcattcaatctcgacttcctctcttcctatcacttttcaacctatttaacctagttttcactttcattgttccatagaaatggctcttgacaagatcactctcgacttttattctgataaaacaaattgacccagcactttcctcaayctactcattttctctttcttttctttaatttttgtgggtacatagtaggtgtacatacttatggggtacatgagatactttgatagacatgtaatacgtaataatcacatcatagtaaatgatgtgtccattgccacaagcatttatcctttgtgttacaatcaaattatattcttttagttattttaaaatgtacaattaaattattaaccgtagtcaccctgctgtgctatcaaatactagtttttattcattctatgttttgtacccattaaccatctccacttccccctacccaccc

SEQ ID NO: 623503 - DNA, 602 bp, Homo sapiens
tccttccttttgggtttatacccagcaatgtgattgctggattgtatggtagctctatttttagttatctgaggaatctccaaactgtcctycatagtggctggcctaatttacgttcccaccaacagtgtatgagaatttccttttctccacatcctcgtcagcatttgttattgcctgtcttttggatataggccattttaactggagtgagatgatatctcattgtagtttggatttgcatttctctgatgatcaatgatggtgaacatcttttcatatgcctgtttgccatttgtatatcttctctggagaaatgtctaatcaaattttttccccatgttttgatcagattattagatatttccctatagaaaaaaattttccataagaaacttttatcattgatattattcagtatcttcattgtagtggtgataaaattgcttcttatatattttgtgggttgtctcttcactttgttgattgcttcttttgctgtgcagaagctttttaacttgatgtggttccatttgttcatttttgctttggttgcctgtgctctgggtgttactcaagaaatttatgtgcagatcaatgtc

SEQ ID NO: 623504 - DNA, 571 bp, Homo sapiens
gtatggtagctctatttttagttatctgaggaatctccaaactgtccttcatagtggctggcctaatttacrttcccaccaacagtgtatgagaatttccttttctccacatcctcgtcagcatttgttattgcctgtcttttggatataggccattttaactggagtgagatgatatctcattgtagtttggatttgcatttctctgatgatcaatgatggtgaacatcttttcatatgcctgtttgccatttgtatatcttctctggagaaatgtctaatcaaattttttccccatgttttgatcagattattagatatttccctatagaaaaaaattttccataagaaacttttatcattgatattattcagtatcttcattgtagtggtgataaaattgcttcttatatattttgtgggttgtctcttcactttgttgattgcttcttttgctgtgcagaagctttttaacttgatgtggttccatttgttcatttttgctttggttgcctgtgctctgggtgttactcaagaaatttatgtgcagatcaatgtcctggagatttta

SEQ ID NO: 623505 - DNA, 571 bp, Homo sapiens
gtatggtagctctatttttagttatctgaggaatctccaaactgtccttcatagtggctggcctaatttacgttcccaccaacagtgtatgagaatttccttttctccacatcctcgtcagcatttgttattgcctgtcttttggatataggccattttaactggagtgagatgatatctcattgtagtttggatttgcatttctctgatgatcaatgatggtgaacatcttttcatatgcctgtttgccatttgtatatcttctctggagaaatgtctaatcaaattttttccccatgttttgatcagattattagatatttccctatagaaaaaaattttccataagaaacttttatcattgatattattcagtatcttcattgtagtggtgataaaattgcttcttatatattttgtgggttgtctcttcactttgttgattgcttcttttgctgtgcagaagctttttaacttgatgtggttccwtttgttcatttttgctttggttgcctgtgctctgggtgttactcaagaaatttatgtgcagatcaatgtcctggagatttta

SEQ ID NO: 623506 - DNA, 550 bp, Homo sapiens
tagctgggacttccagtagtatgttgaataacagtggtgaaagtgggcatccttgtcttgttccagatcttagataaaaggctttcagtttttccccatttagtatgataatagctgtggttctgttgtagatggcttttttaatgttgaggtatactcttctatacccagttttttgaatttttttgaaagaatgttaaattttatcaagtgctttttcagcatcayttgaaatgatcatatggttcttgtccttcattctgttgatatgatgtattacactgactaatttgcatatgttgaaccatcctttcatccttgagataaattccacttggtcatgatgaatgattttatgaatgtattgatgaattttgtttgctagtattttgttgaggatttttgcatcagtgttcagggatattggcccatagttagttttttttgtttcgttttttttttgacatgtctttatttggttttggtatcaaggtaatactaggccttgtataatgagattgggagtattttatcctcttctattttttgg

SEQ ID NO: 623507 - DNA, 418 bp, Homo sapiens
ttacactgactaatttgcatatgttgaaccatcctttcatccttgagataaattccacttggtcatgatgaatgattttatgaatgtattgatgaattttgtttgctagtattttgttgaggatttttgcatcagtgttcagggatattggcccatagttagttttttttgtttcgttttttttttgacatgtctttatttggttttggtatcaaggtaatactaggccttgtataatgagattgggagtattttatcctcttctattttttggaatagtttgagtaagattgatattagttcttctttaaatgtttgrtggaattcagcaatgaaagcatcaagtcctgggcttttctttacttgaagaccttttattacagctttgatctcattacttgttattgttgtattcagg

SEQ ID NO: 623508 - DNA, 577 bp, Homo sapiens
tgtgacttaacatatgatctatccttgagaatgattcatatactgaggagaaaaatgtgtattctgcaatcattggatgaattgtcccataaatatctattaagtctatttgttctatagtgaagattatatctgatgtttctttgttgattttctgtctgaaagatctgtctaatgttgaaagtgggctgttgaaatctcaaactattatagtattgaaatcgatttctctctttagctctaataatatttgtttygtatatatgagtgctccagtgttaggtacatatatatttacaattgtcatatccttttgctgaattgatccctttatcattacataatgacctcctttgtctcttgagatttatgtcatatgtttgtcttgaaatctattttgtctgatataaatatagctattcctgctcttttttggttttcattggcatggaatatctttttccatccctttatttttggtctatgtgtatcttcataggtaaagtgtgtttctttaaggcagcagatcaatgggtcttattttctcatccattcagccgctctttgtgttttgatt

SEQ ID NO: 623509 - DNA, 452 bp, Homo sapiens
tacattcaatgttagtattgataaataaagacttagtcctgccatttggttatttgttttctggctttctcttccttctttgcttctttcctatcttcctcttggtgaatgtgattttctctggtggtatgatttaatttcctgctttttattttttctgtatgtgttgtaggttttttgatttgaggctagcatgaggcttgcaaatgctgtcatatagttcataattttaaactaatgacagatttacaytgattgcataaacaaaaaaagcaaaaaccaaaaaaatgagtagagactctacacttcaatttcatctctttgctttttaatttttgttttttctctttatgtctgattgttctgtctatgtcttgaaaaggtgtcatagttattatttttgactggtccatcatttagtctttctccttaaataagagtagtttacactg

SEQ ID NO: 623510 - DNA, 536 bp, Homo sapiens
atttatttacttgtattacttatttcctaccatattatgtactttttagttcagagcctaatttttgtctcatgtattatatgcttagtatctcattcagtgtcttgacattgtaagtattcaataaatacttattaaataaatacataagttaaatagattggaaaattgttttgagacatagtgtgtgctagtatcccttagagcagagcaaaataaagaactattacagttgtagagttgtagagtctggaacatggtttatgagctctcaggtttaaatttattaaagcctctatgaacttcaacccatgtacaacatgaagtccataaagaagcagtaaaaagaaaatacaactgaacactgtttatcatcttcacttccctgaatcattcccagagtgattctttatattgttctcaatgcagaaaaaggagtcsaaaacaaatgacagctatccagtcactcaattttgtgaagtgttctccctttgatgtagctgatgggagaattaataatccatagcagtttagaa

SEQ ID NO: 623511 - DNA, 581 bp, Homo sapiens
tagattaacagcacattagacacggcaaaagaaaaatttacagatttagcaatagaaattcttcaaaataaaacacagagaggaaaggaatgaacaaaatgaagataacatcaaagagctgtgggaaaactttatgtagcctaatatatgtaaaatagattctccaaagaaaaaaggaataagaaaaaaagataaaataacaaataagttaaaaagtaaggtggttaaaaatatgccatgctaatagtaatcaaaggaaatctggagcacctatattatgttaggttcagtggatttcagaataaataatattaccagcaataaagagaggttttaaawgacataaagggatgattcattaagaatgcataattccaaatatgtatgcatttaatagcagcacctaaaatacatcaagcaaaaactgaagaactaaaagcacgccaaggagaaatagacaaatccataatgtgtgctgaatatttaaatacccattctgaatattgacaaaccaagtagacagaaaaccagtaaggatatggaagatttgactaatactctcatgtaatttgacctagttg

SEQ ID NO: 623512 - DNA, 479 bp, Homo sapiens
agatacacctttaaaaaataatttagatatgctcaaactaaaaagataggaaaagacgtaacaggaaaatacaaacagaccaggcagggtggttcatgagagcaatgccagcacttcgggaggtggaggcaggaggattgcttgagcccaggagtttgagaccagcctgggcaaaatagcacgatctcaytcctacaaaaataaaaaattagctgggcattgtgatgcatacctgtagttctaactacttgagaggctgagatgggagaatcacttgagcccagaagtttgagactgcagtgagctatgatcacaccactgcactccagcctgattgacagagtaagaccctaactctaaataaataaataataaataaataaatataaaaaggaaatacaaacaaaaaggagaagagttatcttcgtactagagtgaaattagataaaaatagaaagtgtaataatctataaatacct

SEQ ID NO: 623513 - DNA, 562 bp, Homo sapiens
ctgagggcttctggtggcccatttttacagttatttcttgatgatatgctcaacaaggggtgkattattcatgcctcccctttttagaccatacagggtaacttcctgatgtttccatggcatttgtaaattgtcatggtgttggtgggagtgtagcagtgaggacaaccaggggtcactcttgttgccactttggttttcatgggttttggccggctcctttactgcaacgtgttttatcagcaaggtctttatgacctgtattttgtgctgacctcttatctcagcctgtgacttagaatcccttcactgtctaggaatgcagcccaataggtttcagcctcattttactcagctcttattcaagatggagttgttctggttcacatgcctctgacatgtcccccctcccttttgtaagagaacccttaatcctaagagttgcagagagatgaagatccatcttccgtaacttcttcaggctgaataggggcaataatattcctgcctagctattaggggctcttgtgtttagggtagagagaagctcagtcagaaagca

SEQ ID NO: 623514 - DNA, 495 bp, Homo sapiens
taagagctggctctccagcacagctgagggcatgactaactccgcatgtccccagaccttacctagcagtaaagcaggcaagttgtacggtaagagtcatagtggcattttatgaagcatttaggagtccttacaacctttgaattacacaacatttcttgcataaattccttttcacaaatcctttcatcactcacacagaatatctgaggcatttttggactttctgacttgccctaaacctcccttcttttaaacaaccagttattttactttaggacaagaatttaccatacaggatccttttttatataaaatctctttctttataatcttctttgtatagctagggggcatggtaaattccacatrtccccaggccttatctagaatttaatggctttagggtaggtagattgaacaattttcaaaagtcaaagaaacagtttgaccttaaagcatttagcaaatctgatatctgaccttaatttagac

SEQ ID NO: 623515 - DNA, 602 bp, Homo sapiens
gccactgcgccgccttatgtctctttttgatatccatgctcaaatgactaagtactaggttctcctgagggactgcactaggttctccgaggtccttctcttgtaaggaccacacatttaattacccagatttgataccaaaaaaataggaaaggaagtaactgtatccactgggcagagctgtttagagccctgttatctactacttttgcggctcccagggctgaatgtgtaattggtattgataatttacattcttgttctgtaaatgttcatgatgtacaagagagatttttttgattggaagagccatttgtagagagggatagaaggatgcatgcacaactgatcacaacttggctttggttctcttcaagttttttgtttttttttttttaattagaattccagaaggagaaaakgaaaccacaaccttgaccaaggacttaaatacaatgggactaatgaaaaatgtaatatctcaatgtagcagccttgtatggtcagtgaaaaaaaaaactaatgggaatctggaggcttgtgttagatcatgccaactgaatttagttggtattatagtcctggctgttacagacattgtg

SEQ ID NO: 623516 - DNA, 712 bp, Homo sapiens
tatatgactaaattttggaaaatattaaaaataaatttaattattaatgtatgcttcttggcttactattggttagtcagtgatatttggatgaataataaaatacagatatactcatttcttaatttatgaatattcctaccatattaattttcctgtcttccatgttgttaaaattaatatattcatataagacttgtgctattgatagtgtgctacaaaagattaaaatataaaacacaatcattctcaaaatgggcaartcttgaacttatgttcataaaattaaattaataaactatattaaaacagttattttatatatgctttcaaaagttattctcttctataatattaaaaattataacattaaaaggacaaatacaaatattaataaatattaaaatttttgttaaaaatttaaacaaagctagaatttttagaatattttgacaatttaaacaaattttatgaaataatattataaatataaaactacttgcaattgtaccctttaacgtgcatccaattgccaatgcaaagaactagcataatacaatgcttgccacatctacaaatacacaaatttaaaaggaataaaaactgttaatatagcaacatttttctcatctgcattgtgcaatggttacaaaaccatgtagatttgtttgtctttccagaaacaagatttgaagtacaaagagaagcaaga

SEQ ID NO: 623517 - DNA, 474 bp, Homo sapiens
gattagaatatcaactgaagttaattattgttttatgttttatagtggcataggagaaggtctcactaataattttaatagtgtttttcagatattttgtttgttaatttttgtacatatgttgattttttttctttcaaacttattttgtacggtraactctttatttcagacaggcttcttttccttttatttgaataatcttttccaatgagcatattgctattaaaatgcccctccaatcatgtttttcattggtgagctcacagatattagtattgcagggcttggggaaaaacccaaagggatttaacattaaggaaactaaccaactctccaaatgcccagattagattgctttctgcctccctttgacaacttgcttcaaggaactactataaatgtttccctaaatgtttcccagtggattaaagtacgttcctttaattctgtcattattgtagtttattcgaa

SEQ ID NO: 623518 - DNA, 565 bp, Homo sapiens
agtttttatcatagaaagcattaagagaaacaaagtttgatattatgtgttggtaaagaaaaatcaaataaaatatataaaagtcatgaacatttatttacattctcaaaatatttttactaaaggaaagcaaatattgatttaccctcgaggtgaatttgaaaaagtatgcaatatggtaagagacatgagcagatctttcttagaaaccaataattaaatacatcaaataaatttatagrggatttgagtaatcacatgaatgagtacatttaaaataaaacatattcttgatttgaaggtaaggtaaaaaaacatagttggaacacttgcagaaattcacatggatgtcctgacaaattagaaataatcacatcataccaaccatatccacacactacaattcaaaaatttagcaatcatttttaaaaaggtgatccataaattctatacaaaaactaaaagaatgcacttctaaaatactctttcatcaaagataaattgaagaagaatttttaaaatgtatttagaagtaaacaatataaacagtacctgtctgatgtag

SEQ ID NO: 623519 - DNA, 611 bp, Homo sapiens
cagccctagctcttactatttttaacttttattttaagttcaggggtacaagtgcaggtttgttatatargtaaacttgcgtcatgggggtttgtggtacagattattccctcatctaggaattaaacctaatacccattagttattttttctgagcctatctccttccaccctccacactctgaaaagccccagtgagtgctgatccctctatgtatccatgtgttctcatcatttagctcgctcttataagtgagaacatgcagtaattggttttctgttctgtgttagtttgctgaagatgatggcctccagctccattcatgtccctataaaggacatgatctcattttttatgactgtatagtattccatggtgtatatgtaccacattttctttatccagtctaccattgatgggcatttttgttgattccatgtctttgctattgtgaatagtgccacaatgaacatatgcgtgcatgtgtctttatgacagaattatttatattactttgggagcaccaaacacaggggctttttttcatatgcttgttggccacacgtgagtcttctttgcaaaagtgtctgttcacttctttgcccacttt

SEQ ID NO: 623520 - DNA, 580 bp, Homo sapiens
tctaaaggaaatgaattatgtgggaatatgatgtcaaacctcaggcactctctatgtacctaaaagtacccttgccccagaatttttcacttgtgatttaatcttgaacaactggttttaaaattacatgtgaactcatctatcaaatgttatctcatttttgaccttaccatttttgtcacattgtagatgggaacaaaactctgtttgaactcttttgtttgagttgtgtcctgtttcttactccaaagagaggcattttcttcatctttaataagaaatgcyacagtttatacaattgatgactatttaggaaatacttgacctttgctatgatcactattatatatctccaaaggtctcccttaaggtgtcaaagaaattagcattaaattgacgaacatgctttctttttcagcttatatggcatgacctttgaaaacagtgtttgttttagaaatcacttactatttatttcatttattcaaaatatggactgaatgttttgtatttgtcaggtgttatcctaaatccttccacatacatcatttcctaattctcacaaaatccctttttaaga

SEQ ID NO: 623521 - DNA, 426 bp, Homo sapiens
tgtattcttatagtgaccccaagttgataatgatacaatatgtttttaaacactcaggttcattttattaatatttcacttagaatgttttcactagagtgagagtggcctatggttttcacttctatagtattaagatttcactagcctcaaaaaataagttaggtaatatttccttttcttctgttgtattgaagaactscataagcttaaacttattttgtacttattttagtctatgatgaaggcatgatttcaagtcagtggataaaataacaattatttagtagattaagtaaactaactggagagtcacttgtaaaagaaatctaaatccctcattcacatcatacattagcacacattttaaatgttattaataaataaaaaattaaaataaaaccaggaactatttaaatagaattc

SEQ ID NO: 623522 - DNA, 638 bp, Homo sapiens
ccatggcaaaatagagaggaaggtgacgagatttccaatataccctctgcacagcctcccagtgatcaacaccctcaccagagtggcatacatgtcacagtcaatgaacccacccatattcacacatcatcaccacccagagtccatcgttcacattaggttcactcttggtatttggaccaatgtataatgatatcatccactattacggtatcatacagagtagtcgcactgctctaaaaatcctctgtgctccacctattcatccctccctccccctaactcctggcaaccactgatatttttactgtcttcatagttttkccttttccagaatgacacatagttagagtcacagtatggagccttctcagattggcttcttttaactagcagcatgtacttaaggctcctctatgtcttttcatggcttattagctcatttctctttagtgtgaataatattccattgtctggatgtaccacagtttatttatccattcacccactaaagaacatcttggttgattccaagtttgagcaattatgaataaagctgccataaatatctgtgtgcaggtttttgtgtggacataagtttttaactcctttgggtaaataccaagtagcatgattac

SEQ ID NO: 623523 - DNA, 624 bp, Homo sapiens
gaaaactatttagcaatcatctcctaaagctaaacatacacattatctaagattcaatgatccaacatacatgcacacagaaatgcatacaccatgttcagcaaaagacacgtgtatgttcacggtggcaccattttcatagcccccgatgtggaaacaacctaagcgttcttctagagtagaatgaataaatgctgtgatgtgtccacagtgaaaaactgtgcgtcaatgagaatgaacatatgcaacagcctagataaatgccaaaacrtaatctaaagcaaaaggaggtcgacacaaaaaggtacatataacacggttccacttacgtaacattcaaaaacagcacaaatgggacgatggcattaaaagtttgtgtgaaagctaccactggaggtggagtggctggggccgggagggagcttggaggatgctggtcatgcctgtttcttgatcccagtgctgctggcgtaagtgtgcttccttttggaagatccatccctgtgttcaactgtgggttgtgcatgtctagcaatattcacgcaggccagcgttgttcaatgtagagtgtagaccgccaaagaaccatgagatagaccaaagactttgataagagctttccag

SEQ ID NO: 623524 - DNA, 624 bp, Homo sapiens
gaaaactatttagcaatcatctcctaaagctaaacatacacattatctaagattcaatgatccaacatacatgcacacagaaatgcatacaccatgttcagcaaaagacacgtgtatgttcacggtggcaccattttcatagcccccgatgtggaaacaacctaagcgttcttctagagtagaatgaataaatgctgtgatgtgtccacagtgaaaaactgtgcgtcaatgagaatgaacatatgcaacagcctagataaatgccaaaacataatctaaagcaaaaggaggtcgacacaaaaaggtacatataacacggttccacttacrtaacattcaaaaacagcacaaatgggacgatggcattaaaagtttgtgtgaaagctaccactggaggtggagtggctggggccgggagggagcttggaggatgctggtcatgcctgtttcttgatcccagtgctgctggcgtaagtgtgcttccttttggaagatccatccctgtgttcaactgtgggttgtgcatgtctagcaatattcacgcaggccagcgttgttcaatgtagagtgtagaccgccaaagaaccatgagatagaccaaagactttgataagagctttccag

SEQ ID NO: 623525 - DNA, 622 bp, Homo sapiens
ccagctccctgcttctggtagtactgtgatgatgctccatgagttaacrtagcaaagtgaccctgaaattacatcaccaaggttttccaataatctggatgtttatctattcttgatttaatatcttgctaaaattccccaaacaaaaaattccaataggtaatatctcataataaaatactaaaacatccataatcgtcaattgcttctggtttctaaaaattataggctattttcctaataggtgcattcataacccagtcatcataaactccaagatactaattttgttcaaaatctatggtgatctgacccaacttgaaagactccaggactgctctgtcctctttctctgatacttatgtgccctaggataaagtgttgcctactagcgagtctttgcccttcctggtcactgtatgccttgtacagttacgtgttctgcaggctctgtgttgatacatgtccaccttgtaagaaaatccaacttccggggcccaggccaaagatgtgttaatctaaatcatagtaacagtcatgagacatcactctttctctatttccaaatttcccccatttgttctttcaaaggttggctgtgtgcctctgcacaacatgtcag

SEQ ID NO: 623526 - DNA, 599 bp, Homo sapiens
atttaaataaaccttgctaatggaaattttagaggtttccaatcttttattactaccaacaatgctgccatgagttaccttgtagatatatgtcagttttttgcacatgtgcaagtatatctgtaggatagttacagaagtgaattactgggtcaaagggcaatatgcatttgtaattttgttttatttttattttgagacggagtcctgctctgtcactcagactgcagtgctgtggcgtgatctgggctcgctgcaagctccgcctcctgggttcacgccattgtcctgcctcagcctcccaagtagctgggactacaggtgcccgccaccacacccagctaattttttgtgtatttttagtagagacggggtttcaccgtgttagccaggatggtctcaatctcctgacctcgcgatctgcccacctcacctcccaaagtgctgggattacaggcgtgagccacygtgcccagccacatttgtaattttgatagctgttgctaaatagaccttcactggggctgtagcaatttagactctccccacaatgcatgagagtggtttccccacagcttctaccacgagaaagattagca

SEQ ID NO: 623527 - DNA, 599 bp, Homo sapiens
catcgctcacttgaaggggatagcctttttaattattttaagcccatttgttgaacagtttccagtctaaatcattaatatcaaaccagattcctgcgttggctatttgattagtgtacagtgcattatatgtgtattaaactccactttattaatgatttttaaaagcacactagacatsatgaaatagaatgtcagagctggaaagacctctgtcatcttgtctaaaccccttgctttacataagctattaatatgggtttttggtttttactcctctctccttatttttcttcaacttttaaaatgtttttaatacttgtcatcctaacatctggttataagtacccttaacttccatgttgtatagataaagtctttcttgcctaattcttggctactctaaattttagtggtcactagaaaaagttctctatggcagaggtctatttttttaagtggataagcttcagtttccccatgggtcaattaagaaatttttattagaagtcctctaaagttgcttcagctccaaccatctataggcctatgagagaataggatggattcttccactttccctaaggaaagggctgccc

SEQ ID NO: 623528 - DNA, 599 bp, Homo sapiens
catcgctcacttgaaggggatagcctttttaattattttaagcccatttgttgaacagtttccagtctaaatcattaatatcaaaccagattcctgcgttggctatttgattagtgtacagtgcattatatgtgtattaaactccactttattaatgatttttaaaagcacactagacatgatgaaatagaatgtcagagctggaaagacctctgtcatcttgtctaaaccccttgctttacataagctattaatatgggtttttggtttttactcctctctccttatttttcttcaacttttaaaatgtttttaatacttgtcatcctaacatctggttataagtacccttaacttccatgttgtatagataaagtctttcttgcctaattcttggctactctaaattttagtggtcactagaaaaagttctctatggcagaggtctatttttttaagtggataagcttcagtttccccatgggtcaattaagaaatttttattagaagycctctaaagttgcttcagctccaaccatctataggcctatgagagaataggatggattcttccactttccctaaggaaagggctgccc

SEQ ID NO: 623529 - DNA, 520 bp, Homo sapiens
ttactgaaaagcacaaactaccaccactcattcaaaataaatagatcattaaatatccatttaactataaaggaattgaattaataattttaaaacaccccaaagataaaatctcaaggcccaggtggtttcgctgaaaaattacaccaaatgtttaaagaattaacactaactctatgcaatctctttcaaaaaatagaagaaaagggaatacttttcaattcatcttatgaagctagaattattctggtacaaaaaaaaaaacagaaaaaggcagtacaaaaaaagaaaaatacagacccatatagatgcaaaacatcttatcaaaatattagcaaatagaatttggcaatayataaaaatatatgccatgagcaagtaaagtatacttcagtaaagtaaagctgcttaaatatttcaaaatcaatgaatgtaacctaccatactaatatgcttaaaaaaaactattaaatcaattggtgaagaaaatactttctaaaaattcaaaactgaatcataa

SEQ ID NO: 623530 - DNA, 596 bp, Homo sapiens
tgcttgcttatatgaattatcccgtaaggcaggaagatttgatgatgtaggaaaagaggctccttggatgctggactgatgtccttgagtaagcaagagatgggatccagggcccagatggagagtctgactttagacagtgacagggttcagaacatgctacaccaaaatatggcatctcggcgcttgagaaaacagaagcagaaaggccactctccctttcccattcccttcttcgtgaagcacgtcatgagacctaggaaggtcactctgaccttctccttctccctcgctcgtctcctgaagacaggaaggaatgtcacagagggacaccaacaccaagaagactctgaacaaactagccttaagttccccctagttgttaccattagatccggagttcgagaccagcctgaccmacatggtgaagccccatctctactaaaaatacaaaattagctgggcatggtggcaggcgcctgtaattccagttactcaggaggctgaggcgggagaatcacttgaacctggaaggctgaggtggcagcgagccgagatcgcgccactgcactccaacctgggcaacagagctagac

SEQ ID NO: 623531 - DNA, 596 bp, Homo sapiens
tgcttgcttatatgaattatcccgtaaggcaggaagatttgatgatgtaggaaaagaggctccttggatgctggactgatgtccttgagtaagcaagagatgggatccagggcccagatggagagtctgactttagacagtgacagggttcagaacatgctacaccaaaatatggcatctcggcgcttgagaaaacagaagcagaaaggccactctccctttcccattcccttcttcgtgaagcacgtcatgagacctaggaaggtcactctgaccttctccttctccctcgctcgtctcctgaagacaggaaggaatgtcacagagggacaccaacaccaagaagactctgaacaaactagccttaagttccccctagttgttaccattagatccggagttcgagaccagcctgacccacatggtgaagccccatctctactaaaaatacaaaattagctgggcatggtggcaggcgcctgtaattccagttactcaggaggctgaggcgggagaatcacttgaacctggaaggctgaggtggcagcgagccgagatcgcrccactgcactccaacctgggcaacagagctagac

SEQ ID NO: 623532 - DNA, 600 bp, Homo sapiens
aatgcccatcagtgacagattggataaagaaaatgtagtacatagacacatggaaaactatgcagccataaaaaagaatgagatcatgtctcttgtgggaacatggatagagctggaggccattatccttagaaaagcaatacaggaacagaaaaccaaagacctcatgttctcccttataagtggaatctacctgaggatggagagtgggargagggagaggatcggaaaaaaagactattgggtactagtcttagtgcctgggtgatgaaataatctgtacaaaaaacctctgtgacatgagttgacctttataacaaacctgcacatgtattcatgaacctaaaatataagtttaaatattgtttttaataaaacctctttaatacccacaatattcagcacttgcttctggtcaccaaatgtgtgtggtttttcccacaccaagcaagtctccaattctctgtggactccagctgggtatcctaccattcaattcaatgctgacgctgtctgtacgtagaattaatgcagaccctacaggttatgggctcagttctgcaaggctgcccacccccattaattcagacaccagccaca

SEQ ID NO: 623533 - DNA, 600 bp, Homo sapiens
aatgcccatcagtgacagattggataaagaaaatgtagtacatagacacatggaaaactatgcagccataaaaaagaatgagatcatgtctcttgtgggaacatggatagagctggaggccattatccttagaaaagcaatacaggaacagaaaaccaaagacctcatgttctcccttataagtggaatctacctgaggatggagagtgggaagagggagaggatcggaaaaaaagactattgggtactagtcttagtgcctgggtgatgaaataatctgtacaaaaaacctctgtgacatgagttgacctttataacaaacctgcacatgtattcatgaacctaaaatataagtttaaatattgtttttaataaaacctctttaatacccacaatattcagcacttgcttctggtcaccaaatgtgtgtggtttttcccacaccaagcaagtctccaattctctgtggactccagctgggtatcctaccattcaattcaatgctgacgctgtctgtacgtagaattaatgcagaccctayaggttatgggctcagttctgcaaggctgcccacccccattaattcagacaccagccaca

SEQ ID NO: 623534 - DNA, 603 bp, Homo sapiens
atcttcttacatcttttttgtggccagaatatagtttaatgctacractatttcagatattgctgtcaaataaggttttcctttgtttgacattgaaagtcctgaatgggatcaagacaggtgatccaaacctgtgcttctcaaatttgaatgtgcatataaattacattttcagaaacttgttaaacatggattctgattctgtaggggctgattagggctgtggcccaggattctgcatatctagcaagttcccaggtgatgccgacactgctagtctggaccacatttcagcagcacagatctaaagcgatggttctcagcgtgtcgtcttgggacgagcagcccaggcatcacctggaaacttatccaaaaatgcaaattctcagggcacacccctgacattctgaatgagaaactttgggttaaggcccagtaatctgtgtttgcactagacagcctgaggattcagatgcacaaaatgtttgagaaccactgctctgaacaattaacaccctgctctaaagtaaatttcctgccaacatggaccgattttattgtttactattaagacagaaatcaaggctcttttgggtctgagac

SEQ ID NO: 623535 - DNA, 603 bp, Homo sapiens
atcttcttacatcttttttgtggccagaatatagtttaatgctacgactatttcagatattgctgtcaaataaggttttcctttgtttgacattgaaagtcctgaatgggatcaagacaggtgayccaaacctgtgcttctcaaatttgaatgtgcatataaattacattttcagaaacttgttaaacatggattctgattctgtaggggctgattagggctgtggcccaggattctgcatatctagcaagttcccaggtgatgccgacactgctagtctggaccacatttcagcagcacagatctaaagcgatggttctcagcgtgtcgtcttgggacgagcagcccaggcatcacctggaaacttatccaaaaatgcaaattctcagggcacacccctgacattctgaatgagaaactttgggttaaggcccagtaatctgtgtttgcactagacagcctgaggattcagatgcacaaaatgtttgagaaccactgctctgaacaattaacaccctgctctaaagtaaatttcctgccaacatggaccgattttattgtttactattaagacagaaatcaaggctcttttgggtctgagac

SEQ ID NO: 623536 - DNA, 603 bp, Homo sapiens
atcttcttacatcttttttgtggccagaatatagtttaatgctacgactatttcagatattgctgtcaaataaggttttcctttgtttgacattgaaagtcctgaatgggatcaagacaggtgatccaaacctgtgcttctcaaatttgaatgtgcatataaattacattttcagaaacttgttaaacatggattctgattctgtaggggctgattagggctgtggcccaggattctgcatatctagcaagttcccaggtgatgccgacactgctagtctggaccacatttcagcagcacagatctaaagcgatggttctcagcgtgtcgtcttgggacsagcagcccaggcatcacctggaaacttatccaaaaatgcaaattctcagggcacacccctgacattctgaatgagaaactttgggttaaggcccagtaatctgtgtttgcactagacagcctgaggattcagatgcacaaaatgtttgagaaccactgctctgaacaattaacaccctgctctaaagtaaatttcctgccaacatggaccgattttattgtttactattaagacagaaatcaaggctcttttgggtctgagac

SEQ ID NO: 623537 - DNA, 603 bp, Homo sapiens
atcttcttacatcttttttgtggccagaatatagtttaatgctacgactatttcagatattgctgtcaaataaggttttcctttgtttgacattgaaagtcctgaatgggatcaagacaggtgatccaaacctgtgcttctcaaatttgaatgtgcatataaattacattttcagaaacttgttaaacatggattctgattctgtaggggctgattagggctgtggcccaggattctgcatatctagcaagttcccaggtgatgccgacactgctagtctggaccacatttcagcagcacagatctaaagcgatggttctcagcgtgtcgtcttgggacgagcagcccaggcatcacctggaaacttatccaaaaatgcaaattctcagggcacacccctgacattctgaatgagaaactttgggttaaggcccagtaatctgtgtttgcactagacagcctgaggattcagatgcacaaaatgtttgagaaccactgctctgaamaattaacaccctgctctaaagtaaatttcctgccaacatggaccgattttattgtttactattaagacagaaatcaaggctcttttgggtctgagac

SEQ ID NO: 623538 - DNA, 552 bp, Homo sapiens
aatccaaaatgagatgacagaggcagggtgagaggctcacacctataatcccagctacttgggaggctgacgtggtaggatcacttaagcccaggagtttggagttacagcgagctatgactgtgccactgcactccagcctgggagaaaaagactctgtctcaaaaataaattaattaattaaaaagagataatagtgagtaaacctgaagmtctctctgtaggtctgtgacctgcatattttttaaatgttaacactgtaatatgaaagcgtggctgaacagttagccttgctcttttggcaccctgaccagtgcctctcactttagctgagtttaagagcttccttaagaaatgaccagcaaactccatgatctccaagcctaagggtggtcattttagcttggggaattgaggacacagaggcaggtcgacagcagtcagagaaatcctgcagttgagggtcatgtcccaacactacaatctgacttaatctgtatttgtcaatatatgaaagaacaatgcagaatcactggacatgaataaaaccaa

SEQ ID NO: 623539 - DNA, 605 bp, Homo sapiens
cacgaggctgaggccagagaatcacttgagcctgagaggcggaggttgcagtgagccaagattgcgccactgcactccagcctgggcgacagagctgtttcaaaaaaaaaaagcaaattgcagaacagagtatgcagtatgctgccttttgtaagagggaaaatgagactatctagtcatatttgtttatatttacataaagaaacccctggaaagatactcaagaaactaatactattgattaactattgggaaaagcaagaaaaagatgagggtagagactagggaaagttgcttccaattgtgttatcatttttaacattttgattttaaaccatgtgaaacatatactatccatttcaaaataaagataagtagggttttttcaagtatgactactttttaccatttgctcatgtcaaataaaaattgttttactgtttctcctcaaatactgtttttttttaatagaagtagcaggctttgaaagaagcaaggccagaatgatgtgaagccaggttatggaggataatggacagaacagagatgtgagccatgcttggagggagkgggtgatgtgctggaggtcagcaagtgaagggagt

SEQ ID NO: 623540 - DNA, 658 bp, Homo sapiens
ggattatactgtgtctatcttctcatgtaattctcctagtaattctaccatggtcattttacaggtagccaaggtaaaaaactagagagsttcaaggttacattgctagtatataatagggatctgaactcaggacaaccaaaatacaaattaagccagtcttaattcaaactccttggctcattcaacttgctatgccgtgccgctgtcttagggagccaaaaagacctgtgtatgcgtttaaacaaccaaattaatatattacattagaaaaccagaaagcaattaatctgttacattattttcctttcataaaccagaatttatggccagtatgccttattatttgagttgtggttcttaaaatggtctaaccttttttcatcaaaaaacaaaactaatgattatttcagacaaggtataatactgtcattttggttacttaaacagaaattgaggaatatgatttcatagaattagatgttaaaagtacaaaaatttcacctcataatatattacacaagttgtatgtatgcacacacacaaaattctgcagatgtcctaagacactctttaatgtccaaatttatcctatggtggttctctcaacactatgcttttttacttttttcaccagtaataaaaaaaatttcaagta

SEQ ID NO: 623541 - DNA, 512 bp, Homo sapiens
gcatcatgaaggtaatgagcatttgggagcactgaaggaagggatgaagctttgtagagtgttacatacaaaccctacccagtttttatgaagcaagccatgattgtatagtagggtgaagtcctacaccaaaattataggaaggccaaaagtcacagtaattgaatacaggttgacagtaggccagtgcccttcagtattttttaaagctatcacagtaatataacctgttatgaggtgattttagatacatcatctgccccaatattagccaatgtrtgttctgaataataccagtctcttggaatgttaatagttgttgctaaaatgtgttttatgatcaaataattttgggcaacagtagtttaagcagaaatttttttcttgttggaacttctcagagcctatagcatgcaagtgggtatttttccaagggaaaaacaattatacactgtgcccaaaattgtcttctcacagaactcttttttatcaccgtgcatctcatgcactaa

SEQ ID NO: 623542 - DNA, 582 bp, Homo sapiens
ctaaggaaggtttgctcttcttcccctaatttatttgtttattcatttacttatttgtactcattccatactattgtatggaatgaaattacattttatctatctatctatctatmtatatatatatatatagtttgtttggattgtaatccaattttgggttattgggggtggtttcaggttggctcctgtgtcttgtttgttatgccctatacaggaaagaatcaacaaagaagcaaacccaaggctgatatccttagaagaggctgcttaaagattgactctttcctgacatctgggaacctggcttgtgaaaagttccccaaaccaacatgaaaagtctcctgtattgataaggctgttttgcccttgaggcactgaattaccacttccttcagagagtctgatattttgacagtttccaggcagagaatgccttttagcactagcccccaagaaaaaccctaaactctgagtctcaaatgggacacacacacacacacacacacacacacacacacacacacacacattgaattcatattgtcattgccaactttatttagaaccacaggatttatt

SEQ ID NO: 623543 - DNA, 658 bp, Homo sapiens
agtattccattgcatgatataccacaayatgttaatctgcttacctcttgaggatatctcagttacttctagtttttggtaattatgaacaaagctgctatagatattcatttataggtttctataaatgcaagttttcaattcactttgataattacctaggagtggtattgttgggccacatgataagtgtatgtttaactttgtaagaaactgacaaactcattctgccattttgcattaccacaaggaatgaacaagagtgcttgttgcaccatgtcttaaccagcattttgaattatcattttttaaaaagttgccattctaataggtatgttgaggtatcttattgcagttttcatttgcgtttctccaatgactattgtgagcatcttttcatatgcttatttgccacttgtgtatcttctttggaaaagtatctgttcagatctctttttgtctttaatttattattaaattgctttatttgtttttcttgttatgagttctttgtattttggttgtaagtcctttattgatataagatttggaactttttctgtagcttgtatttttattctactaacagcatttttgtgtgtgttggggggggagggcatgtttggtggaaaagccaaagtttttaattttgttgggt

SEQ ID NO: 623544 - DNA, 542 bp, Homo sapiens
ttagttgcataaagtgaggtacatttagactagtagggaaaagaatgcacttttttgccctcaactctaacattgagtagatagtttcattgagtacaagacaggaaaccctgaaggaggcagggaggagacctcatttattagatataaacttggcctggatctcacatgaaggatacagaaaagtcaacaggggtcctgttgttcagcaatgctattgaaagcctcagggcttgaaatcgtctttctccaggaaggcaagttagtcctgtctaatctgtcgttgggttggttttccgttgctgcatgacaaattaccacaaacttaatggcttaaaataacacacatgtactatgtcacagttttcatgggtcaggagtctgggcacggcttagttgggccctgtgctcagggtctcacaaggctgagctcgaggtgttatctaggctgctttctcatctggagacttgacrgcatctgctgccaagctcccttggtttgttggtggaattcatctgtagctatagaattcatgaaagct

SEQ ID NO: 623545 - DNA, 499 bp, Homo sapiens
tgatccccgagacttgcagtgggattgaatacagcaatggatgtaaagtgtagtacagtgcctagcctagagaaagcagacaatgcagggtggctgttgttattgcagccgttataaggcccttgtaaagatgaagtaagcaacagtagcttgttttcattacgtttaaggtgtatgtatgttttattttgaggaatcgttatttaagatctttttttttctgtatctttccatttagtttcttcacccttccctgtttcttcaaaaactttaaataattttgatcaagcacagcctaccatagcttcttatttacttttccatggcataggatgttccaatgaggccatgtctccagtgaaacctttcgtttaagttcctgyagcaaatttaaacctatactagtgttttatcttccaaataacagcaaataggctttcattataatagtgagaagaataaaaacacccctattagaccaattagctttaaatgaaaa

SEQ ID NO: 623546 - DNA, 408 bp, Homo sapiens
aatttgcagacatccattcttactaggtccttattttacacagagttgctaagttttagtctaagagattctccttggtgaagtaaagaggatacattttgtggcagctgcttgtctcacagattttctttttcattgctttctaagtccatgactgtgctttgaatgtttgagattattggaattggtaagkgacatcattttaatagtaagttatcaaaaagattttggattatccaaagttgttgtctataggagtttgtgcaattctctttattcttttacattttttacttgccaattgataaattgtagttgtgtatatttacatggtacagagtgatcttatggcttatgaatacaatgtgcaataattaaatcatgctaatgaacatatctgtcacttcc

SEQ ID NO: 623547 - DNA, 408 bp, Homo sapiens
aatttgcagacatccattcttactaggtccttattttacacagagttgctaagttttagtctaagagattctccttggtgaagtaaagaggatacattttgtggcagctgcttgtctcacagattttctttttcattgctttctaagtccatgactgtgctttgaatgtttgagattattggaattggtaagtgacatcattttaatagtaagttatcaaaaagattttggattatccaaagttgttgtctataggagtttgtgcaattctctttattcttttacattttttacttgccaattgataaattgtagttgtgtatatttacatggtacagagtgatcttayggcttatgaatacaatgtgcaataattaaatcatgctaatgaacatatctgtcacttcc

SEQ ID NO: 623548 - DNA, 562 bp, Homo sapiens
gatgaattcctagatgaggaattactaggttagaaaccacatacattaaaaaatgtacatrttatcaattggcctacagcaagtttctactgattacattctctcctaagatatatgagaatggcaactttggccctacctggctattactatttaaaacatttttgacagtttggtagatatgtccttgttactttaatttgtatttcttttattatcagtggagttgaaaatttttataagcatattggtcattaaacaacatttttatgattcatgtcctattaatagataatgtaatgaactgtgctttggaaaagcatctttgtcattttgaagtctttttctctgttatagtttgtgtttaggtataatatctttacgcagataaagagctgttcatgttaatttttttaaattgccagtagcttaaatattgttgtcaggaatggagaattgtttaattactatctcttaattagaactagcaggtggtaatgtgaaaatgctctcttgtgggaggcaacatggttcaatgggaaaagcactggccttggaacaa

SEQ ID NO: 623549 - DNA, 584 bp, Homo sapiens
atcagaatcagagtggaatcatggtgataaaaggactggctcttaataaaggcataaaatattttctctctttctctctttgccaatttgcttttcttcaggtatattgaaaattgttcatattatatttaagtaaaccacaaacaagtacatcaaattcttataattctagctaaatgtgtttttagcacctctgtccaaattaatataaagaaaccaattatggatgtactttgctgaaattcataaataaaactaacagtttgatgtgaaaagaggaaagataaggcagtcaaaaatgtgtggatgtgtggatgtatttactctgagtcagtagcttaaatgcactttctgaggagctgtttgtttcaagataatggattgagcagtttttctttgrtagtgaacaactagctctcaaccctgcaagctatttatttctgtagcttttctttttgcactaacactactctttaagacaatttttatattgaaccccaaaaggtcagaattaggatgtgtctttggtccattgtcagatctgatcaaagcagttggatctttgtaggtcgattatggaacag

SEQ ID NO: 623550 - DNA, 563 bp, Homo sapiens
acttggtatccctttctctcgaatttccacaaggctcactccttcacttcatttatgtctttgcataaatatcacctcattgaagacttctctcattccttactaaaataacctcccttctccctgcatattttatagccctgacrtaatatgtttggctgttatctatttgtcaccaaaatgtaagatccaacagggcagggctttatatactttaccacagtatcttcagcacctagaacataatgggtgctcaataatatttgttgaatatgttaatgaatgaaccaggattttctcccttgtggcctttttgagaggcagaactgcatgcaaattaaggaaaaaagtaggaggtttgaaatcaaatggacctcttatttccagccatgtcactttttagcaatgtgcctgtaaggaagttatttatgaactctgagccttgggacctttatatctaaaatattgctaaataattcctgtttttcaaggactgtgtaaaaagtaagagattatgtatgccatcacagaaaacagactatgttcctatttgcatatgcttt

SEQ ID NO: 623551 - DNA, 563 bp, Homo sapiens
acttggtatccctttctctcgaatttccacaaggctcactccttcacttcatttatgtctttgcataaatatcacctcattgaagacttctctcattccttactaaaataacctcccttctccctgcatattttatagccctgacgtaatatgtttggctgttatctatttstcaccaaaatgtaagatccaacagggcagggctttatatactttaccacagtatcttcagcacctagaacataatgggtgctcaataatatttgttgaatatgttaatgaatgaaccaggattttctcccttgtggcctttttgagaggcagaactgcatgcaaattaaggaaaaaagtaggaggtttgaaatcaaatggacctcttatttccagccatgtcactttttagcaatgtgcctgtaaggaagttatttatgaactctgagccttgggacctttatatctaaaatattgctaaataattcctgtttttcaaggactgtgtaaaaagtaagagattatgtatgccatcacagaaaacagactatgttcctatttgcatatgcttt

SEQ ID NO: 623552 - DNA, 563 bp, Homo sapiens
acttggtatccctttctctcgaatttccacaaggctcactccttcacttcatttatgtctttgcataaatatcacctcattgaagacttctctcattccttactaaaataacctcccttctccctgcatattttatagccctgacgtaatatgtttggctgttatctatttgtcaccaaaatgtaagatccaacagggcagggctttatatactttaccacagtatcttcagcacctagaacataatgggtgctcaataatatttgttgaatatgttaatgaatgaaccaggattttctcccttgtggcctttttgagaggcagaactgcatgcaaattaaggaaaaaagtaggaggtttgaaatcaaatggacctcttatttccagccatgtcactttttagcaatgtgcctgtaagraagttatttatgaactctgagccttgggacctttatatctaaaatattgctaaataattcctgtttttcaaggactgtgtaaaaagtaagagattatgtatgccatcacagaaaacagactatgttcctatttgcatatgcttt

SEQ ID NO: 623553 - DNA, 568 bp, Homo sapiens
attaaggatattgatattttaaattgtggtaaaatatgcatgacataacatttaccattttgatccttttaaagtatacagttcagtggcattaagtgtgttcacagtattgcacaaccatcaccactatttagctcgtgaacttttcatcactccaaacagaaaccctgaactcgttaagcagtcactccttattccttcttctcctcagcctctggtgaccaaaaatgtgttttctgtgtctataaattttcmtagtgtgtatattttgtataaatggagtcatacaaatgtggccttttgtgtctggtttctttctcttagcgtaatttttcaatttatgttgtaccatgtattagtacttcattcctttttatggctgaataatattctgttgtgtggatataccacattttgtttattcattcatcctctgttaggcatttgtgtttttcctaccttttggctattgtgaataatgttgctgtgaacaagaagctattgatttttttgtatgttaatttaatatattttaaccttactgacttttttttcctgtttgaattct

SEQ ID NO: 623554 - DNA, 520 bp, Homo sapiens
acacaaaaaattttttttaaataacaaaataaaaataacaaaataataaaatcccctaagtctcttctcaaactttactgtgcatattagtcacctgaggatcttgttaaaatgcacattaggtctggagtggagtctgagattatgcatttgtatcacattcccagttgatgacaatgcccttggtccatggaccacacttggagtagcaagattctttttataatttttttaagattcaataaagcctcagcacttttaaatatatgccaatagctgcttatcaataccagtatcttttcttaccactttgaacttccttagtatgaaacctcaatgttgagttgaacacaacctaggcttagtttgcttgaaagggtcgctatgacctctagaaagttaactcaaagtacgcaataaaaaaaagttctgagttgtactagcaggggtatatttgggtcatctatcttctagacaattaagacgtaattacasaggaaatgtgtgacaaaatgtgtta

SEQ ID NO: 623555 - DNA, 634 bp, Homo sapiens
atgatttgctagtgtggaaagctcacaagcaatagagcctttgagctatttatcttatattatattacattatattatattatattatattatattatattatatcatatcatatcatattatattatattatattggattatatagactttgataacctcctgtggcttggatttatcatcacaaaactctgtgaattcataaaaatgaggttcacatcattgtgaagatgaagggaaacaatatgtgtgggatgccagcacagagtagtgtattagtaaatgattgttcaatgaaggaaggaaggaatacgtgaaccaatgaatgaatttcatattctattcattcaatctatgaatatttattgaatatttactatgcactagcacttctggggaatagaatgatgaagaaaatggacaaaatttttatcctcatgaagagtaagtgcttatgggtaaggcagagaacagcaaaataaacaagtaaatatataatgtaaggtagaataagtgctataaagaaaactaaagcagggtaagtaagagaatatcaaatgaaatcatatacgatcaggaaagccctcttgaaaggaacatttgagcaaagacttgacyaaaatgagggtacacgt

SEQ ID NO: 623556 - DNA, 601 bp, Homo sapiens
agagacagaggtcatggattactcctattctggcctgagtaactgaatgaattatggtgcaatttagtagatacgatccagtcggggaaaggtgaatttatggagggtgggaggagagaatatcaagggtyctgttttggctgcattacctacaaggtgcttcacatctgaatgaacgtggaaaataggcagatggaaatgagtctgaaagtcaaaggagctgaagaaataaatttggttatagcacttagatgtgtttaaagccatggaacagaataaaccaccccccaagaggaatgtggaccaagaagagatccaaggttcaccccatttgtctttgtgttttccactgtgacatgcacgggatcaggcatgtagtcaatgttcaataaatgatttttaaattggatgtaaaatctttgtaccagaaggaagaataagatgcagatgcaaacatccaggacataccaattccctcagcatgctggggtctaggcttgcatcttgttaatcatcatggtcatattctgttctggcgtttgaaggttttctgggttctgatctcaaaagaaagaattctatgctttgctggcatttgctt

SEQ ID NO: 623557 - DNA, 495 bp, Homo sapiens
accaattccctcagcatgctggggtctargcttgcatcttgttaatcatcatggtcatattctgttctggcgtttgaaggttttctgggttctgatctcaaaagaaagaattctatgctttgctggcatttgcttcagatgtcctctttgagtacctagatcgcttgatctgtgaggttgagatgttttatttaaaataataatctttacaatagtaataatagtagcttatgtttattgaacacttatgtttcaagagctttctaaatatcatcccaagaaaccagcaagataggtattatgattcccattttgcaatgagaaaatcaagtccatactactaataagtggcagaaatgaaattaacacttaactctatttgacttcaaattctaggctcttttcatattttctagctgcaagacttcaatcctttatcagaaaatggtttaactggatgaagtattcttttttttatatttaggataacaataa

SEQ ID NO: 623558 - DNA, 495 bp, Homo sapiens
accaattccctcagcatgctggggtctaggcttgcatcttgttaatcatcatggtcatattctgttctggcgtttgaaggttttctgggttctgatctcaaaagaaagaattctatgctttgctggcatttgcttcagatgtcctctttgagtacctagatcgcttgatctgtgaggttgagatgttttatttaaaataataatctttacaatagtaataatagtagcttatgtttattgaacacttatgtttcaagagctttctaaatatcatcccaagaaaccagcaagataggtattatgattcccattttgcaatgagaaaatcaagtccatactactaataagtggcagaaatgaaattaacacttaactctatttgacttcaaattctargctcttttcatattttctagctgcaagacttcaatcctttatcagaaaatggtttaactggatgaagtattcttttttttatatttaggataacaataa

SEQ ID NO: 623559 - DNA, 626 bp, Homo sapiens
aataatattaagaaactgattaacgctcatacatgcatttacacttgttactcacttttaaaagctttcatactttggtatatcattactaatttattaacaagttttttcgttgtggtggactgccccaaattatttttaaaagaggcagaaaatacataagttaccaattaattaccttagtttagaagattaaaaattgttaatagtctgcctatcaactgcaacaaagtwgtcaaggaattggtatgactgattatagttgattttaaaatggaagaaagatgtgataatgattttggtaataataatatgtaacattactgaacacttacggtgtgatacacatttttctagacactaaaccagatccaattactcatcccatgaatttttaagagaaagtgatatgaaactttaagatcaacatttatttctccttttaaaacaaaccaataagtaaaacaagcctgttaacttcttttctgtccaacaaatcttttgttttcatgtaaaaataattttaaacttacatgtaaaatgacatattttattgcttttaatgataaatacaggaaaaaagttggaaaactatctttatcataaatgcctattaagcaaaggga

SEQ ID NO: 623560 - DNA, 609 bp, Homo sapiens
atagcttctaaagaggtccataggaaatgtatgtcagggtagaataaaaattacacattctttcttattcagcattgtttaaatcatcatgattgaaacttctgtaacttcagtacaccatgcagccttctatgtggtatggatttctaacattggagttctctgcccaaaattttctgagggactttccctccctacctcaatctgaaagtctgtgggatgggggagccaaggctctgaacagctctttcatccatcttatgtgcaaggataaaaatctctaggaagaaaaaaaaaatcaagtttaagtctgccctgggctttgtatcattaaaaagttaattaaaactcttgctgtagtcattctccgatgcatagaacattatttaccttcttgattggtgtctaaaagrtgttttccttcatagggaagggcatgtgttttctcagctcatttcagaggatgccccgctgttagttactattcttggaagtcgtaacttcaagaacctgaagccagccatgagcccttcagctacttccaatcttgccagccttcctaaaaggtgtccttgctcatctccaaagggctaactttttagatagtct

SEQ ID NO: 623561 - DNA, 590 bp, Homo sapiens
agcaaccagagatatttggtrtataatattaatgactaccatttccctggagtgtattgaaatgtaacaggtgtaatgaaatcagttgatgtggactttctgttgtgcatctcgaactttaatcactgtggtaaaattcctttgtagagatcaaggctgcatcgagccaagatcatggcattactctccagcctgggcaacagagtgagatcctgtctcaaaaaacaaaaaaatcctttgtagaaatttccagactgttctgttaaacaaatgatatctacttaatggtaagagtttttaggtgcttggaatagggcagaatgaacacaggctctgaagtgaaacccagatccactgctttccagctgtgtggctttgagcaagttatctgactttttgaagctttcgtcttaccctctatggaatatcctgcttgcaggagacttagcagcagcgtgagtgcctggcacaacagcaggcagataacaggcatccaacagactgaaattcccttcttcctcctctgcaacaggatccaccccctgggttcatcctgagaccctcagcagggttagggctgatatatcaac

SEQ ID NO: 623562 - DNA, 590 bp, Homo sapiens
agcaaccagagatatttggtatataatattaatgactaccatttccctggagtgtattgaaatgtaacaggtgtaatgaaatcagttgatgtggactttctgttgtgcatctcgaactttaatcactgtrgtaaaattcctttgtagagatcaaggctgcatcgagccaagatcatggcattactctccagcctgggcaacagagtgagatcctgtctcaaaaaacaaaaaaatcctttgtagaaatttccagactgttctgttaaacaaatgatatctacttaatggtaagagtttttaggtgcttggaatagggcagaatgaacacaggctctgaagtgaaacccagatccactgctttccagctgtgtggctttgagcaagttatctgactttttgaagctttcgtcttaccctctatggaatatcctgcttgcaggagacttagcagcagcgtgagtgcctggcacaacagcaggcagataacaggcatccaacagactgaaattcccttcttcctcctctgcaacaggatccaccccctgggttcatcctgagaccctcagcagggttagggctgatatatcaac

SEQ ID NO: 623563 - DNA, 590 bp, Homo sapiens
agcaaccagagatatttggtatataatattaatgactaccatttccctggagtgtattgaaatgtaacaggtgtaatgaaatcagttgatgtggactttctgttgtgcatctcgaactttaatcactgtggtaaaattcctttgtagagatcaaggctgcatcgagccaagatcatggcattactctccagcctgggcaacagagtgagatcctgtctcaaaaaacaaaaaaatcctttgtagaaatttccagactgttctgttaaacaaatgatatctacttaatggtaagagtttttagrtgcttggaatagggcagaatgaacacaggctctgaagtgaaacccagatccactgctttccagctgtgtggctttgagcaagttatctgactttttgaagctttcgtcttaccctctatggaatatcctgcttgcaggagacttagcagcagcgtgagtgcctggcacaacagcaggcagataacaggcatccaacagactgaaattcccttcttcctcctctgcaacaggatccaccccctgggttcatcctgagaccctcagcagggttagggctgatatatcaac

SEQ ID NO: 623564 - DNA, 654 bp, Homo sapiens
ctactgcccaaagcaatttacagattcaatgctattcttatcaaactaccaatgacattcttcatagaactagaaaaaacgatagccctgtggtatagcttgaagacagatagtgttatgactcctgccttgtacttttttgattagaattatcttggctatttgcactcttttttggttccatatcttttgtaattctcaccgtagagatttttcacctccatgattagctatgctcttacggggagagtgggaagagggatagragcagaaaagtaactattgggtaccaggcttagtatctgggtggtgaaataatctgtacaacaaacctctattacatgagcttacctatataaaaaactgcacatgtacccctgaacctaaaaaaggttttttgaaaaatcaagtccatgtataacagtaaaaggacaaagatggaaaatattggaatgggagattggaactggagtgtagatataggtctcttttggacatgtcaaaggctgtattagtctgttttcacacttctataaagatactacccaagactgggtaatttataaagacagaatgtttaattaagtcatagtttcacacggccgagaggcctcaggaaacttacagtcatggcagaaggtggaggggaagcaa

SEQ ID NO: 623565 - DNA, 654 bp, Homo sapiens
ctactgcccaaagcaatttacagattcaatgctattcttatcaaactaccaatgacattcttcatagaactagaaaaaacgatagccctgtggtatagcttgaagacagatagtgttatgactcctgccttgtacttttttgattagaattatcttggctatttgcactcttttttggttccatatcttttgtaattctcaccgtagagatttttcacctccatgattagctatgctcttacggggagagtgggaagagggataggagcagaaaagtaactattgggtacyaggcttagtatctgggtggtgaaataatctgtacaacaaacctctattacatgagcttacctatataaaaaactgcacatgtacccctgaacctaaaaaaggttttttgaaaaatcaagtccatgtataacagtaaaaggacaaagatggaaaatattggaatgggagattggaactggagtgtagatataggtctcttttggacatgtcaaaggctgtattagtctgttttcacacttctataaagatactacccaagactgggtaatttataaagacagaatgtttaattaagtcatagtttcacacggccgagaggcctcaggaaacttacagtcatggcagaaggtggaggggaagcaa

SEQ ID NO: 623566 - DNA, 680 bp, Homo sapiens
ttattaaggtcttctgggctggacctcattctcgttcatgacggaatatatataaataagttgtagtccttcttctttataattcactgtcttttatggagaaaaaatgtctgtcatcaacagttagactacaatattttatgaaaaatgacataatgatgtacaggttgttatggaagtccagagaaaggtagatagatcagagaagacttcatggaagaagtgtaacctgggctgaggtttagtcaggtgaagaactggatagaggcaaaatataatataagctgagggaaaaataaaaaggcatgaaaatktgaaagatatggctgttttgaggatttatttattaagtatttactgagcactgaaattgtgccaagaacagatctaggtattaagaatatagttaaagttgagacagacaagatatttaactcatgaatcttgcagtctattgagagagacagacagctaaatggaaatttaatacagtgtgataagcactttggaatggaaatagcagagtaccaaaagagcacagaaggaggatattttctgaagaatgggggagaaggaaggaggcaaaatgtctaggaaagcaacccttagaatgcaactgagtcttgaaggatgagtatgaattaaccaggaaaaaatttggagaagtaccaacagtggaa

SEQ ID NO: 623567 - DNA, 680 bp, Homo sapiens
ttattaaggtcttctgggctggacctcattctcgttcatgacggaatatatataaataagttgtagtccttcttctttataattcactgtcttttatggagaaaaaatgtctgtcatcaacagttagactacaatattttatgaaaaatgacataatgatgtacaggttgttatggaagtccagagaaaggtagatagatcagagaagacttcatggaagaagtgtaacctgggctgaggtttagtcaggtgaagaactggatagaggcaaaatataatataagctgagggaaaaataaaaaggcatgaaaatttgaaagatatggctgttttgaggatttatttattaagtatttactgagcactgaaattgtgccaagaacagatctaggtattaagaatatagttaaagttgagacagacaagatatttaactcatgaatcttgcagtctattgagagagacagacagctaaatggaaatttaatacagtgtgataagcactttggaatggaaatagcagagtaccaaaagagcacagaaggaggatattttctgaagaatgggggagaaggaaggaggcaaaatgtctaggaaagcaacccttaraatgcaactgagtcttgaaggatgagtatgaattaaccaggaaaaaatttggagaagtaccaacagtggaa

SEQ ID NO: 623568 - DNA, 577 bp, Homo sapiens
tactatgctaggtgagtcttgaactatttcacatgtgggtctgtcttgacagcacaactagattgtaagagtctgagactcttagaggttttcctttattctccttattgccctacatgcaatcaatgcctaggatatcccttttgaatgaatgaaacatgtcaaaaaataactatattaattttgaacctaaactttctatttgataaagaattccaagattgaggaatctaccaaactcagtmctttataaaataatctttgaaaatatttactaagcaaggtccaagttaattattgaattgtgttgggaacaattatttaattttatatcacaaagaaattatagttttacaacaggtaaaaagaatgaaaaaatgtgaagaaaaattataaggttaaactgatgtaaactcatttctcaatatctattagaaataagaatattctctctctgtatgtatgtgtatatatatttcactacaaaaacagagttgtgttactaagctaccacattcaaaaatatgtgggctgtttctgttcattaaatgtataaacgtacccatataaggctaca

SEQ ID NO: 623569 - DNA, 560 bp, Homo sapiens
tggccattcacttatttatccacagactattagaaacagaagagagtttgaagaccattcagtacaattctcttacatggcagtgaaaattatggtccaaaaataaaaattggcttgcccatggtcaaagagcagcttagtgaaaaagcaaacactctcactgtagagatttcaggtaaccattattgcaatgggctgttagtttgcttctaacatctgttctccctttttctatagtaatagaacttttgtctgagcacatggctgctccaattgattgattaaattttccaaactccctaatagttagatgtgataatgtgatgatgttctggacaacagcgagtatataaaaatgtcataytttgtggctgttcttaagaacttcctgtaagaaatggctgaaacacccagtctgtccttgttctttatgtcttcctttttcctgttgcttggaatacaactatcatcttgatctatgaaggtacagaaaggcagagtattgaactggaataaaattgagttcctgtggacctaatggagcacaggtgacaggtcaa

SEQ ID NO: 623570 - DNA, 586 bp, Homo sapiens
taaatatacaagtaaatatagagctatattatattaagccagacattaaagaaatttgcaaaagtgtaaaagaatgcaactgttcccactaattttattttagaaaaaaagagttatttgwcataaattatgcttttatgttagcatataatgggtttattcatgttttagataaaatatatattaaaatactcagtgttatctaatatgttaaatactgatagataatccacataactaaaagttcattgaggcccttaaaatattttaagagtataaagatttctggagtccaaatgttttatagtcattgcctaaaacaatgcacttgcctttataaaatgccacttttatttaactcttttaaatttgccacatatgtggcatatagatacaggtatgtcatatgtttctggccatgaccctgagtgatacactggaaatttacagaagagatataaattgctaataaacctcactaataaagaaaaaattaataaaatgagatggtttttcacctgacaaagttttttgaaagttttagaacacccaatttgtatgaaagtataataaataaaatgtattc

SEQ ID NO: 623571 - DNA, 540 bp, Homo sapiens
tgacataaattatgcttttatgttagcatataatgggtttattcatgttttagataaaatatatattaaaatactcagtgttatctaatatgttaaatactgatagataatccacataactaaaagttcattgaggcccttaaaatattttaagagtataaagatttctggagtccaaatgttttatagtcattgcctaaaacaatgcacttgcctttataaaatgccacttttatttaactcttttaaatttgccacatatgtggcatatagatacaggtatgtcatatgtttctggccatgaccctgagtgatacactggaaatttacagaagagatataaattgctaataaacctcactaataaagaaaaaattaataaaatgagatggtttttcacctgacaaagttttttgaaagttttagaacacccaatttgtatgaaagtataataaataaaatgtattcatcattttgtgattgtraattggttaaaaaaatgaagggtaatcttttagcaactcttaaatgtgaaaatat

SEQ ID NO: 623572 - DNA, 618 bp, Homo sapiens
agattccaaataatttaatgatgcacctcaaggatctagaaaagaaagaagtaaagaaacacaaaattaatcaaaggaaagaaataatgtaaatcaaaacagaaatagataaaatagagactaaaataccaatatgaaaattcaacaaaatggaaaggttttttaaaatttcaactgctattttacataaagagagtacatatacaggctcattacatgggtatacggcaggatgctgaggtttgggattaggatcccattatccagatagtgagtatagtaccaaataggtagtttttttcttacctcttacccctctccctccctactccatctagtactccacgttgtctattgttcccatgtttatgtccatatgtgctcaatgtttagttcccacttwcaagtgagaacatgcagtatttggttttctgttcctgcattaatttgcttaggataatggcctccagttgtatctatgttgctttatgagacataattttatttatttttatatctctgtagtattccatggtgtatatggagcatattttcttcatccaatccaccactgatagacacctaggttgattccatgtctttgctattgtgaatagc

SEQ ID NO: 623573 - DNA, 618 bp, Homo sapiens
agattccaaataatttaatgatgcacctcaaggatctagaaaagaaagaagtaaagaaacacaaaattaatcaaaggaaagaaataatgtaaatcaaaacagaaatagataaaatagagactaaaataccaatatgaaaattcaacaaaatggaaaggttttttaaaatttcaactgctattttacataaagagagtacatatacaggctcattacatgggtatacggcaggatgctgaggtttgggattaggatcccattatccagatagtgagtatagtaccaaataggtagtttttttcttacctcttacccctctccctccctactccatctagtactccacgttgtctattgttcccatgtttatgtccatatgtgctcaatgtttagttcccacttacaagtgagaacatgcagtatttggttttctgttcctgcattaatttgcttaggataatggcctccagttgtatctatgttgctttatgagacataattttattyatttttatatctctgtagtattccatggtgtatatggagcatattttcttcatccaatccaccactgatagacacctaggttgattccatgtctttgctattgtgaatagc

SEQ ID NO: 623574 - DNA, 580 bp, Homo sapiens
aaattttactcataaagtgataaagaaaaaatacattgagaaagtgagagagtattctaaatagaatacccagcaggaaagcatggaggtaaaaagcaggtattatgactggaaaaaggggcagaggtgaggcagacaatggaaggcaggacaagggacccctccacacttgtttacttgctgtgctgactacagcagcacccagctccataaccttgcagccactgaagcttccgctcataaaatcagccaatcagacataaaagaaatagaacactctaacgacaaacatcctcgccatcagcatagggacttccaaaagaccttccccaaatgaacatgtgctatagggactttgattatcctaacctaacttttgcatcatgttaatgataaaattcatacccctgcgtggagatttaagctgccaatgagacctgagacacaggaaaaagcatgacaagrgactgcaaaggtgtatccaacagaccaccccaaacatgccatgatgtcacctagacgaagctcacagaagaataacaaactagactagcttgctttcaaggagccagctgcaagt

SEQ ID NO: 623575 - DNA, 571 bp, Homo sapiens
tagctctctaggcatattcctaaggacttaaagaatgataactatcatttctcttaaatcttccagatttggaaggatatatatattcagcacattgacagrcaatcccagtagtcctaaattaaaagacattaaaaattagtgaaacttttcctacctttagcctgtgtaatcctggatgaccaagcataaaattaaattgagtagagtataccactgtaacatttcctgaaaggtattctaggctctgagtaatttctttggggtctgaagatcagtttgacatatcctcaagtatcatgagttcattataattaagaaaaagggagtaaatctggagaatgagccactttcttactactccttgacctcagttctttttttcagagacagggtctcactttgttgcccaggctgccaggctggagtgtagtggcgcaatcgcatctcattgtaacctccaccttctgggctgaagccatcctcctgcctcagcatcctgagtatctggaaccacagcaggtgcacaccaccatgccaagctaattttttaaaaagttttttgtagaga

SEQ ID NO: 623576 - DNA, 526 bp, Homo sapiens
caaaatcctgtctcaaaaacaaaaacaaaaaacaaattgcctatgctgtggttatctcacaattaataaaaaggaaaaaaaaagtatgcagtctttgtaggtccttggggtttgttggaactcagaaaacaataccccaaaataaagaccgcagaagccaaagtttttctctgatcttctcctgccctcctgtctctgagtcccattctccccggagtctagccatagaaatgagaattcctcttcctcaagttaggtcatagaaatcaaaacaccttttccccagagcccagccataaaacctaaaaatattactctaactttccctctgtttttctgtgtaaaaactggccataaagaaattatctgaactaccttatttgatcatagatcaccagaccgcattccagagaggatccagaaggaaggaatgctgcacagagargccaagaagaatctagacagacaggccttgctgggtttccctactctgtttattagcaatcctatttctacacggcggccc

SEQ ID NO: 623577 - DNA, 526 bp, Homo sapiens
caaaatcctgtctcaaaaacaaaaacaaaaaacaaattgcctatgctgtggttatctcacaattaataaaaaggaaaaaaaaagtatgcagtctttgtaggtccttggggtttgttggaactcagaaaacaataccccaaaataaagaccgcagaagccaaagtttttctctgatcttctcctgccctcctgtctctgagtcccattctccccggagtctagccatagaaatgagaattcctcttcctcaagttaggtcatagaaatcaaaacaccttttccccagagcccagccataaaacctaaaaatattactctaactttccctctgtttttctgtgtaaaaactggccataaagaaattatctgaactaccttatttgatcatagatcaccagaccgcattccagagaggatccagaaggaaggaatgctgcacagagaagcsaagaagaatctagacagacaggccttgctgggtttccctactctgtttattagcaatcctatttctacacggcggccc

SEQ ID NO: 623578 - DNA, 584 bp, Homo sapiens
aagatagctgttaatgacccagtttcctatgtcacttatgcaattataatggcaatttcaaaatgttaggtaaatatattttgcaatatattgttccttttgtaatactctctatgtatttatttatatttttaaattttatatttatgtatttatttttctggacagagtcttgctctgttgcccaggttagagtgaagtgttgtgatcatagctctctgcaacttcaaactgcttggcaaaagtgatcctcctgcctcagcctcatgagtagagtagcgggaactacaggcgcatgccactgcacccagctaatcactatttattatgctcctactgtgtgctttagtatattttctgttgttttctgcaacccattttgagggcgtgttagggaatacagatgcagtaactttsgtctcagcccttgaggtgaggaaatatttagcctcaggtttaatctaattgttggccatttgccttcaaagattgaaatatgagcaaaactgtggctctgggttatatgttaaaaaaaagtttatggggctgaagccaggcaacagacaagagcccctacaatctta

SEQ ID NO: 623579 - DNA, 554 bp, Homo sapiens
gattctgaaatcagaaaacaggctgaataagagagatggtttattaggcactactgtgtgccaggcacatttcatgagcttccrgtatgttaattcatttaatccaacaatctaagagataggttttatccttattccgaattttgagatgagcaaactaagaaacagcttaaagaatttaagttgtaaggccaggaaaacagtacttataacagctgactattctataaccacacctccttaagggattattgtcagaaaaatagaaagagtaaaacatccatacataatgggtaaactttgtccacataccagaatgttactaatggctttctaacctctgaagaatttaagggaaggaggaaaggtaattttccccagggaatctacacgaagaggtaaatcttgacaatgtattaatactgtaaacccagggaaaaaaagccagtacaatttttatttagggtgtggcaaataaaacaaagggacacgtgaaaacatggctcagtaaagagctacaagacttggtgcaactgacttattgtggtgagtga

SEQ ID NO: 623580 - DNA, 554 bp, Homo sapiens
gattctgaaatcagaaaacaggctgaataagagagatggtttattaggcactactgtgtgccaggcacatttcatgagcttccagtatgttaattcatttaatccaacaatctaagagataggttttatccttattccgaattttgagatgagcaaactaagaaacagcttaaagaayttaagttgtaaggccaggaaaacagtacttataacagctgactattctataaccacacctccttaagggattattgtcagaaaaatagaaagagtaaaacatccatacataatgggtaaactttgtccacataccagaatgttactaatggctttctaacctctgaagaatttaagggaaggaggaaaggtaattttccccagggaatctacacgaagaggtaaatcttgacaatgtattaatactgtaaacccagggaaaaaaagccagtacaatttttatttagggtgtggcaaataaaacaaagggacacgtgaaaacatggctcagtaaagagctacaagacttggtgcaactgacttattgtggtgagtga

SEQ ID NO: 623581 - DNA, 554 bp, Homo sapiens
gattctgaaatcagaaaacaggctgaataagagagatggtttattaggcactactgtgtgccaggcacatttcatgagcttccagtatgttaattcatttaatccaacaatctaagagataggttttatccttattccgaattttgagatgagcaaactaagaaacagcttaaagaatttaagttgtaaggccaggaaaacagtacttataacagctgactattctataaccacacctccttaagrgattattgtcagaaaaatagaaagagtaaaacatccatacataatgggtaaactttgtccacataccagaatgttactaatggctttctaacctctgaagaatttaagggaaggaggaaaggtaattttccccagggaatctacacgaagaggtaaatcttgacaatgtattaatactgtaaacccagggaaaaaaagccagtacaatttttatttagggtgtggcaaataaaacaaagggacacgtgaaaacatggctcagtaaagagctacaagacttggtgcaactgacttattgtggtgagtga

SEQ ID NO: 623582 - DNA, 430 bp, Homo sapiens
tgaattctctggcattgaattactgtactcatgttgaagaaatgtcagaacttyattggatgttattatattacagttgtttgtttgagttgtagtttgggcagagtaaaggagccaacatgtcttaggatttagaacttgtgcacattgcctacagttgaaagaagaaagcatgctaaattccagcctctttggtatgtggttgggacgtaaagttttaccacatccttcattgtcttagcctactcaggctgccataacaaaataccagagactggatggcttaaacaacagaatctttttttccatatctaagaggcttggaacagaaattcattttctcacagttttggagcctggaagtttaagatcaaggtgccaacatagtttatggtgagaatctgttcctggctaacagatggctgccatc

SEQ ID NO: 623583 - DNA, 604 bp, Homo sapiens
tgtgtgggatgaggactcatagggctgacatctttagcttctcttttcttcactatgtatataagtaataatctggctgaatctaaaattagttcattatttctttaccagctgaatctgtaagtgttagacttggacggtcctttgtgtttggcacctttcataatctgattcaatcaaagcctttaaccctgatctatttactagtctaaacaactatctcattacaaacttaacatatgatattgtgaaagtctgcttctttatctgactatccattttctgctctatacaaatacagtagtcactagccatacakagctaattaaatgtaattaattaaaaataaataaaacaaaaatctagttcctcagccacactaaccacaatttaattgctcaataatcacatgtaactagtggctactatattgaacaatgtagatacggaacatttctgccattggagaatattctatttgatagcactattccagattgtaaattcctcaaggacagaaattctaccctgttcaacactgtgttcttcagttcttagaatagggcatgacacatatttactaagcaagtggctgcttaataaa

SEQ ID NO: 623584 - DNA, 604 bp, Homo sapiens
tgtgtgggatgaggactcatagggctgacatctttagcttctcttttcttcactatgtatataagtaataatctggctgaatctaaaattagttcattatttctttaccagctgaatctgtaagtgttagacttggacggtcctttgtgtttggcacctttcataatctgattcaatcaaagcctttaaccctgatctatttactagtctaaacaactatctcattacaaacttaacatatgatattgtgaaagtctgcttctttatctgactatccattttctgctctatacaaatacagtagtcactagccatacatagctaattaaatgtaattaattaaaaataaataaaacaaaaatctagttcctcagccacactaaccacaatttaattgctcaataatcacatgtaactagtggctactatattgaacaatgtagatacggaacatttctgccattggagaatattctatttgatagcactattccagattgtaaattcctcaaggacagaaattctaccctgttcaacactgtgttcttcagttcttagaatagggcmtgacacatatttactaagcaagtggctgcttaataaa

SEQ ID NO: 623585 - DNA, 613 bp, Homo sapiens
attccaagatttgctttgttttttccaaaagttttctcattgtggagaaaaatgtcataaaggaggcttggctcagcttcctccctcattgtcagtcatcaaataagcatccttaaattatctatcctacggcaagcactgggagtcacagagagaaaaggaacaatctcttgtcattaaggaactcactgccagatgaagacacaggaggaaaaaaaaaaacacamcagatgattggagcatcataaattctatgatatgagaatgtatgtaggctagactgccaacccagattagcagggaataaaggcaggatcaaagaaaggctctcagaggaaatgggctacaaaacaaatgagtcttcgtattaaaaaatgaaagccaagcctggttaacatagtgagaccctatctctacaaaactaaaaaattagttgaatatggcggtgtgtgcctgtaggcccagctactcaggttgaggtggaaggatcacttgagcccaggagttcaaggctttagtgagctatgattgtgctattgtaccccagcctgggcaatagagtgagaccctgtctcaagaaataaaaattacaagaaagtcaacaagaaggaat

SEQ ID NO: 623586 - DNA, 595 bp, Homo sapiens
atcaccacactgtcttccacaatggttgaactaatttatactcccaccaacagtgtaaaagcattcctatttctccacatcttctccagtatctattgtttcctgatgatactgttcttaatatgagacctcatatcaacttaatataggtttcatataagcaaaactcacaaaaacaagactctgaaatagaatggaagaggtaggcattatgattcagctgcagttgaacttgagagagacagcataatgaaaggttaagagtacaggacagattgcctaggttggaaaccagctgtgctgcctactaggtgtgtggtctaaattttcgtgcctycatttgaaaaactgggttaataatactatagtacctaatgcttcagattatcatgaagattaaatgagactgtgtaacaagtacttagagcagtgtctgactcaacaaaaatagtttcctagaagagtagatagactgtgtatctttcaagactccttccttggtatagtttttctcagtttagtttctaaaaactaatgggcagcagtgaattagagactatttttctagtaagtctccagttagttaaatacagag

SEQ ID NO: 623587 - DNA, 469 bp, Homo sapiens
tttacttagctcaggtcttcttgaccttttgtatcttgtggaacacacagaaaattttaatattttaagaaacagtggagtaaatgaatgaataaagctgatcacagctgtcytgaggaatgtatgagtcaatttactagcacagctgaaacctatttatgtgatgcagttgttgggaggttctaattcagcctatcaactaactcatcagtcaacactttgttggtattaatcacctgaaggtgtgacaaagcaactaggaacttttggggacacaaaaaataaaatgtacggtcacttacagtcactctcctacctggtcttctccaccaaaagcttcattcccatagaaggtttatttggtatctcagactctcatatggatttcttataccccaaatgatatttaaacttgtcacataaaaactgcatgttctgaatctaatcgttaatgcgttctttgtgtcac

SEQ ID NO: 623588 - DNA, 552 bp, Homo sapiens
cacaggctgaacactttgggaggtcagtatcaatccatgaataccacttaatctacccagcatcaatgagaatctgattaatttattgtaaaggccctcacaaaaggcagccttcactttttcccctcaattattcctatatttattccgggggttggggcaatcatgaatcctcagagagttcttagtaatgtctaacttaaaccttagctgtttcaggatactttgacctacaatataatatcacattcatgaaatttgcactaatcatatggaaaaaagcaatttgacttaataactaggatcatatttggaaagaaaaaggttgtgttacacacagtgatgtaagttggaggcacattttaaaaggctactaaatgtccctttggacctgtttttgtgacaaaaattcaatgcaacagtacctcctgatctgttactctacaacagaaccttgcatcataccagggatacaaaaaataattgatatagtccttgccctcaaataastcatagataaggagcaggcatggtggctcacacctgtaatcc

SEQ ID NO: 623589 - DNA, 499 bp, Homo sapiens
agcatagggcggttctaggaggtggcctgccccgaggtgcaccagcatcctcccgctgcttctgccatggctctgcagctggtccacggmctgctcagcgtacgctttgctatccaggcattcgtcactctccccagcaatgaaaagaatccaacccctagccttttcaacaggaagcacactctgctgatggagcccatctcggggagtctcccttacagtggcagaggagcacagctccagagacgtggacctgcaggcgctcctgagctgagctgagctgagctgatgggtgtcacaatcagatccccgtatctgagtggaacttcaaagctggcgttgggcccgttaatgcagacggtggccaccacctgcttcaggtagcaggccatagccaagccaatctcggcacctttgcacacggagatcactccaattcctggcctttggatctgaagcacaaaacaaagggaatctgctacaggtcacaagctgagaa

SEQ ID NO: 623590 - DNA, 498 bp, Homo sapiens
agcatagggcggttctaggaggtggcctgccccgaggtgcaccagcatcctcccgctgcttctgccatggctctgcagctggtccacggcctgctcagcgtacgctttgctatccaggcattcgtcactctccccagcaatgaaaagaatccaacccctagccttttcaacaggaagcacactctgctgatggagcccatctcggggagtctcccttacagtggcrgaggagcacagctccagagacgtggacctgcaggcgctcctgagctgagctgagctgagctgatgggtgtcacaatcagatccccgtatctgagtggaacttcaaagctggcgttgggcccgttaatgcagacggtggccaccacctgcttcaggtagcaggccatagccaagccaatctcggcacctttgcacacggagatcactccaattcctggcctttggatctgaagcacaaaacaaagggaatctgctacaggtcacaagctgaga

SEQ ID NO: 623591 - DNA, 444 bp, Homo sapiens
tgtgatatagcacgtggtaggtgctcaaacaagttaacatcttaatcttactttcatggtgttatgttgtattcctccaaagtacttaaaagaattagttggcaaccaggatcagcaaaatctaataatatcaacaataaatgcaacaactcacaattatatcctgtgctaagtaagacctactgtactccaaaaatggtccgyaacaatggggattggaaagcctcttccacaaatcactaccatgacgagtgaaacacatataaaagagactgcagcatcacataaaaatagcttttcatgtctttggggcattcagaaagtagtaggtttctaactggtgtgtccagctaatcacaatgccagccataggctaattgcatctgcctatattgtattgttaggctcttttagatagtctctggttccagccagttctttagt

SEQ ID NO: 623592 - DNA, 444 bp, Homo sapiens
tgtgatatagcacgtggtaggtgctcaaacaagttaacatcttaatcttactttcatggtgttatgttgtattcctccaaagtacttaaaagaattagttggcaaccaggatcagcaaaatctaataatatcaacaataaatgcaacaactcacaattatatcctgtgctaagtaagacctactgtactccaaaaatggtccgtaacaatggggattggaaagcctcttccacaaatcactaccatgacragtgaaacacatataaaagagactgcagcatcacataaaaatagcttttcatgtctttggggcattcagaaagtagtaggtttctaactggtgtgtccagctaatcacaatgccagccataggctaattgcatctgcctatattgtattgttaggctcttttagatagtctctggttccagccagttctttagt

SEQ ID NO: 623593 - DNA, 523 bp, Homo sapiens
atcctggcatcaagcataatgtccstagcacctaagaaaatgcctgatccataacaaatctcaataaattgctgttgactcaaaaaatttattgatttgaaaccccaaagtggcagacttcagaatggatgtagatacaaagtagagctatccgagggacattcttctagatagacatctatttcacatgatggccatttacgtgtaacttcaaaatagagtactaggatattaattcaaagaattagcatcatgcaataccatgcagcaatatgataattttctttgcagtttgcacctttccaagtatttgtgatctcatttaaatcatagtaatagaaaatagggagagtggaaacaagaaagactcaactacctttcaaaataatcgctagagaatattctaagagactcctttcatctaccaaacagaatttttaaagtgacataaaatgatttgttgagcaaaatcctgctaatatatacttgaatccatttaaaaccgaatgtgttgtcctgtctg

SEQ ID NO: 623594 - DNA, 560 bp, Homo sapiens
tccataacaaatctcaataaattgctgttgactcaaaaaatttattgatttgaaaccccaaagtggcagacttcagaatggatgtagatacaaagtagagctatccgagggacattcttctagatagacatctatttcacatgatggccatttacgtgtaacttcaaaatagagtactaggatattaattcaaagaattagcatcatgcaataccatgcagcaatatgatmattttctttgcagtttgcacctttccaagtatttgtgatctcatttaaatcatagtaatagaaaatagggagagtggaaacaagaaagactcaactacctttcaaaataatcgctagagaatattctaagagactcctttcatctaccaaacagaatttttaaagtgacataaaatgatttgttgagcaaaatcctgctaatatatacttgaatccatttaaaaccgaatgtgttgtcctgtctgctaacgcatatctggtaagatgggtttagtcacaggtaactaaattccagctttctaatgaggtgtgggcttttcctactctgc

SEQ ID NO: 623595 - DNA, 560 bp, Homo sapiens
tccataacaaatctcaataaattgctgttgactcaaaaaatttattgatttgaaaccccaaagtggcagacttcagaatggatgtagatacaaagtagagctatccgagggacattcttctagatagacatctatttcacatgatggccatttacgtgtaacttcaaaatagagtactaggatattaattcaaagaattagcatcatgcaataccatgcagcaatatgataattttctttgcagtttgcacctttccaagtatttgtgatctcatttaaatcatagtaatagaaaatagggagagtggaaacaagaaagactcaactacctytcaaaataatcgctagagaatattctaagagactcctttcatctaccaaacagaatttttaaagtgacataaaatgatttgttgagcaaaatcctgctaatatatacttgaatccatttaaaaccgaatgtgttgtcctgtctgctaacgcatatctggtaagatgggtttagtcacaggtaactaaattccagctttctaatgaggtgtgggcttttcctactctgc

SEQ ID NO: 623596 - DNA, 560 bp, Homo sapiens
tccataacaaatctcaataaattgctgttgactcaaaaaatttattgatttgaaaccccaaagtggcagacttcagaatggatgtagatacaaagtagagctatccgagggacattcttctagatagacatctatttcacatgatggccatttacgtgtaacttcaaaatagagtactaggatattaattcaaagaattagcatcatgcaataccatgcagcaatatgataattttctttgcagtttgcacctttccaagtatttgtgatctcatttaaatcatagtaatagaaaatagggagagtggaaacaagaaagactcaactacctttcaaaataatcrctagagaatattctaagagactcctttcatctaccaaacagaatttttaaagtgacataaaatgatttgttgagcaaaatcctgctaatatatacttgaatccatttaaaaccgaatgtgttgtcctgtctgctaacgcatatctggtaagatgggtttagtcacaggtaactaaattccagctttctaatgaggtgtgggcttttcctactctgc

SEQ ID NO: 623597 - DNA, 417 bp, Homo sapiens
agaattccttcttgctaggggaagtcaatcattttctatgaagcccttcacctaatcagatgaggcccacccacattatgaagtgtaatctgctttattcaaagtccattgatttaaatgttcatctcaaccaaaaaacaacttcacagaataatgtttgaccaaatatatasgcaccatgatctagccagttgacccataaatttaaccatcacacattccaacatgtttccagccaaaaatgtttctcaatacaaaaggatattggatgcaattagttaaatcaaagatcccatcagcaaagtcaataatccaacattctacagatttcatgttccaaatatttctactgaacattattcactttgttcccatttgaagctcttacgttctttaaatatccacttgtttcagact

SEQ ID NO: 623598 - DNA, 417 bp, Homo sapiens
agaattccttcttgctaggggaagtcaatcattttctatgaagcccttcacctaatcagatgaggcccacccacattatgaagtgtaatctgctttattcaaagtccattgatttaaatgttcatctcaaccaaaaaacaacttcacagaataatgtttgaccaaatatataggcaccatgatctagccagttgacccataaatttaaccatcacacattccaacatgtttccagccaaaaatgtttctcaatacaaaaggatattggatgcaattagttaaatcaaagatcccatcagcaaagtcaataatccaacattctacagatttcatgttccaaatatttctrctgaacattattcactttgttcccatttgaagctcttacgttctttaaatatccacttgtttcagact

SEQ ID NO: 623599 - DNA, 417 bp, Homo sapiens
agaattccttcttgctaggggaagtcaatcattttctatgaagcccttcacctaatcagatgaggcccacccacattatgaagtgtaatctgctttattcaaagtccattgatttaaatgttcatctcaaccaaaaaacaacttcacagaataatgtttgaccaaatatataggcaccatgatctagccagttgacccataaatttaaccatcacacattccaacatgtttccagccaaaaatgtttctcaatacaaaaggatattggatgcaattagttaaatcaaagatcccatcagcaaagtcaataatccaacattctacagatttcatgttccaaatatttctactgaacattattcactttgktcccatttgaagctcttacgttctttaaatatccacttgtttcagact

SEQ ID NO: 623600 - DNA, 417 bp, Homo sapiens
agaattccttcttgctaggggaagtcaatcattttctatgaagcccttcacctaatcagatgaggcccacccacattatgaagtgtaatctgctttattcaaagtccattgatttaaatgttcatctcaaccaaaaaacaacttcacagaataatgtttgaccaaatatataggcaccatgatctagccagttgacccataaatttaaccatcacacattccaacatgtttccagccaaaaatgtttctcaatacaaaaggatattggatgcaattagttaaatcaaagatcccatcagcaaagtcaataatccaacattctacagatttcatgttccaaatatttctactgaacattattcactttgttcccatttgargctcttacgttctttaaatatccacttgtttcagact

SEQ ID NO: 623601 - DNA, 551 bp, Homo sapiens
gtataaaacattcttatatacctgtcatttagttcaacgagaatcttaagaagttggaagggcaaattctatcagttttactttacaaataaatgaattgagactcagttacttttatgttcacatgactttaaaatgtcagaacaagaacagaacccagatgctctgtcttctgtcattcaattatacattttccagaatctttctgttttctccaaatggattcaatctaatacatacatttcattttttttacacttccatagtcaaccgacggtattratgacaaaagtaacattcctaaacagcagtgcatggttgactgtagctttgcattagaatattgtacacaaagtacaagatggtgaatgtcctttggaataaactaatgactctttcaagtggcagacagctaatgctatgataatattttattattttacaaaaccttaaagtggaacattttaaataaaataacatttggtaaaaataaagttgattttaaaagtattggtgtttattactaatgtcaaatctttgttctatgctat

SEQ ID NO: 623602 - DNA, 551 bp, Homo sapiens
gtataaaacattcttatatacctgtcatttagttcaacgagaatcttaagaagttggaagggcaaattctatcagttttactttacaaataaatgaattgagactcagttacttttatgttcacatgactttaaaatgtcagaacaagaacagaacccagatgctctgtcttctgtcattcaattatacattttccagaatctttctgttttctccaaatggattcaatctaatacatacatttcattttttttacacttccatagtcaaccgacggtattaatgacaaaagtaacattcctaaacagcagtgcatggttgactgtagctttgcattagaatattgtacacaaagtacaagatggtgaatgtcctttggaataarctaatgactctttcaagtggcagacagctaatgctatgataatattttattattttacaaaaccttaaagtggaacattttaaataaaataacatttggtaaaaataaagttgattttaaaagtattggtgtttattactaatgtcaaatctttgttctatgctat

SEQ ID NO: 623603 - DNA, 551 bp, Homo sapiens
gtataaaacattcttatatacctgtcatttagttcaacgagaatcttaagaagttggaagggcaaattctatcagttttactttacaaataaatgaattgagactcagttacttttatgttcacatgactttaaaatgtcagaacaagaacagaacccagatgctctgtcttctgtcattcaattatacattttccagaatctttctgttttctccaaatggattcaatctaatacatacatttcattttttttacacttccatagtcaaccgacggtattaatgacaaaagtaacattcctaaacagcagtgcatggttgactgtagctttgcattagaatattgtacacaaagtacaagatggtgaatgtcctttggaataaactaatgactctttcaagtggcagacagctaatgctatgataayattttattattttacaaaaccttaaagtggaacattttaaataaaataacatttggtaaaaataaagttgattttaaaagtattggtgtttattactaatgtcaaatctttgttctatgctat

SEQ ID NO: 623604 - DNA, 443 bp, Homo sapiens
gctgccagccagtgcaggcagagcctaactcagccagtcagtgtcccataacaccttaaaatcacttaacaaaaaagtaccacagaccagtcaccttgccatattcagttcctaatataatttctttacagcttctttaacaaattcagttatatttgttaagtgcttaaacaggctgtacattttgctgagtgattgacatacagaagtggacaagagatgtaagaactctgaccttaaaaatcctgtattttaccaaatattttacctaagtaactttaaagtaagaactggcatctcctataagttgctctgtctgtctctctctctctctctctctctctctctctctctctctctctctctctctctmtatatatatatatatatatatatatatatatatacacacacacacacatatatataaaattatatatata

SEQ ID NO: 623605 - DNA, 568 bp, Homo sapiens
ggtgcgatctcaactcactgcaacctctgcctcccaggttcaatcaattctcctgcctcagcctcccaagtaggtggtataacaggcatgtgccaccatatccagctaatttttctatttttggcagagatagtatttcaccatgttggccaggccgattatgaattcctgacctcaagtgatttgcccacctctgcctcccaaagtgctgggattacaggcatgagccaccgtgcccagccaaacatrcttttaaaaggttatattttataaaaactctttttattattttacttatttattttttaatctagggcctgccatggggctagcagacccctcaccctggcaagaggaaataattcttaaataatattatcttaatgtttgatttctttttttcttcttgtttgctgatatatttttgtctaaactttacatttaatctttcctgtcattttgttttgagtgtgacccttataaatagcttatagttgtactttgttttctgatccagtctgagtcttttcaacatgttagaagaatttaactcacttatacttagtga

SEQ ID NO: 623606 - DNA, 328 bp, Homo sapiens
actcactgcaacctctgcctcccaggttcaatcaattctcctgcctcagcctcccaagtaggtggtataacaggcatgtgccaccatatccagctaatttttctatttttggcagagatagtatttcaccatgttggccaggccgattatgaattcctgacctcaagtgatttgcccacctctgcctcccaaagtgctgggattacaggcatgagccaccgtgcccagccaaacatacttttaaaaggttatattttataaaaactctttttrttattttacttatttattttttaatctagggcctgccatggggctagcagacccc

SEQ ID NO: 623607 - DNA, 624 bp, Homo sapiens
aatatcaatatcagttagaaaatacaagttttaaagaaatggttatatttacaatatgaaaataatttgtaactaaacataaatcttaatggtcagaaagatcatgaackcatgaaagaatattttattatatctagcaatctaacatattcatcagttgtaaacccatgcttgctaaaagacaaattttccctaaattgaatctgtacattcaatgctattccaatcaaaattttatcagggtttttcagtaatttttgaaaagcttaatcaaaaatttgtgttttggttaacggatgaaccagaatagccaggaatattttgaagtataatgaaggggaacttgtcctatcagatactagaacttactatatttattttattatagactcatttgatatagtgtcacttgtaacagtgaaacagaaatggttccacaagtacaggggaaattgatttataacaaattttggaaattagtagaagaaagaccaaatagttaatatatggcattgggaaaatcagctatcatatgacataacaatgaattattgctattttcttctcatttccaggaaaactcacccaaagaaacttcaatgtttttatcatccagtattcctt

SEQ ID NO: 623608 - DNA, 593 bp, Homo sapiens
aaatggttatatttacaatatgaaaataatttgtaactaaacataaatcttaatggtcagaaagatcatgaactcatgaaagaatattttattatatctagcaatctaacatattcatcagttgtaaacccatgcttgctaaaagacaaattttccctaaattgaatctgtacattcaatgctattccaatcaaaattttatcagggtttttcagtaatttttgaaaagcttaatcaaaaatttgtgttttggttaacggatgaaccagaatagccaggaatattttgaagtataatgaaggggaacttgtcctatcagatactagaacttactatatttattttattatagactmatttgatatagtgtcacttgtaacagtgaaacagaaatggttccacaagtacaggggaaattgatttataacaaattttggaaattagtagaagaaagaccaaatagttaatatatggcattgggaaaatcagctatcatatgacataacaatgaattattgctattttcttctcatttccaggaaaactcacccaaagaaacttcaatgtttttatcatccagtattcctttaact

SEQ ID NO: 623609 - DNA, 615 bp, Homo sapiens
acatgttttgtctccataccttatttcagggttactctttggcctagagcactatcccatctcctgtttattcacctgggtaacctcttttcaactctggatgtcgttgcctgaatctgcagacagaatgacgtgtttccctgtcttcctgtgttctactcatttccctctgcttgtctagcagagcactgacattagaaggctcaaaattctactctcagggctagaatgactctagcatgttcctgctccttgagagcagaagcattctacatctttcyagccttagcacctatcacaatgccaaggagagaaggcggttacaaagattttttttttaacctttgcattgaatgtacaggttaaattggctgactttaaaaggtttctgaagagcagtagttctcagacgttaagacccttgaatgtccttaaggtctttacaagtaatgtgaaaagccaaaactattttcataataatatcaagacattgtttgctttattcattacattgaaattttcactaatggtgcaagagcaatggtcagaaaaattgctggctttaaggcaagaatcaaggtggtggccctgagctatactgttagccattgcatt

SEQ ID NO: 623610 - DNA, 540 bp, Homo sapiens
cttatgtgattgtgtaaattgcaagctgaaataatctcttttcatagagcaccattttaatttgaaagaatgacaaataggcaaactatagctattcatacttggatatttggcacacattttctcaaaaatgaacaaagacagcctgacatytcaaggacaactgacagtattgttgccagtaataaaatttgaactttcaagtgaaagagttttggaaaacttacatctgcttctgtgagcttgacagcttcccaagacagactttcctgatgagatcagtggcaatattaataaatatgatgtttattgcataatgaaatatgtcaacattggaagatctgtataaatgagtaaactaatatttttaaatgaacatgcatgacagtacaaaattatacatgaataaaagattcattcaaaattcaagagaagccaatggattttgttgtaacagaatacagaaaatccagtgatatggtttgattgtatattgcaactacctcttataaagtaccacatgtcaagttttagagtact

SEQ ID NO: 623611 - DNA, 503 bp, Homo sapiens
cacaaggttcgctgccatgactgatgtgaagcgacctgacgcacaagcggagacttttctccttggcagccaacaacctgcagcaggcaaggcgggcgggggaggaaaccccgaggaggcgctcccggccgcctctttgctgagatagcaggagcagcagcctgaggagccacgagctcagcgtcactgagctagtgcgggtgcaggggcgctcaggcaggcgcacaggccgggagccgcttctgccgctcaggcggccgcgctgcagraagccgcgccgcgctgcccgagcgcccggggctggcccgcgagcgggaggagccggcagccgcgctccgccccgcgctgagattcgtgccacctgcctcgaacaccacggaggcgagaggaacccagagagctcggcctctcgtcccgttctcgaaaagcagcctatcgtgacggagccgggagaaggctagcgtttcaatcctgtgcaggactgggatttttcttctcataat

SEQ ID NO: 623612 - DNA, 503 bp, Homo sapiens
cacaaggttcgctgccatgactgatgtgaagcgacctgacgcacaagcggagacttttctccttggcagccaacaacctgcagcaggcaaggcgggcgggggaggaaaccccgaggaggcgctcccggccgcctctttgctgagatagcaggagcagcagcctgaggagccacgagctcagcgtcactgagctagtgcgggtgcaggggcgctcaggcaggcgcacaggccgggagccgcttctgccgctcaggcggccgcgctgcagaaagccgcgccgcgctgcccgagcgcccggggctggcccgcgagcgggaggagccggcagccgcgctccgcccsgcgctgagattcgtgccacctgcctcgaacaccacggaggcgagaggaacccagagagctcggcctctcgtcccgttctcgaaaagcagcctatcgtgacggagccgggagaaggctagcgtttcaatcctgtgcaggactgggatttttcttctcataat

SEQ ID NO: 623613 - DNA, 590 bp, Homo sapiens
gacaaggaggggaaggaaggaatgacaggaacagggaagcggatgggcaggtaagtgtaaggaaccatgatgggcttcttccacctggtacattcaggagactatgagtagtccaggttttctggagtgaggtataaagtgacagggcagggggaatgctgagagatttgaccaaatagartcatggtattttaaaagctaaaagccaaaaacatcaccgcctgctgaaaaatacacaaatgttttcctccaaacttagggaagaaaatccaaatccagcccctgcctccctctctgccctcagctgcctcttcctgcttcctctctcattctgctccagtcacaaaggcttccctgcttgccagctggatttctaaaaccaagagaacctcctctggtctctagcaggctccaccatggactcagactagatctttctatgaccttcagagtcttcttccccaatacccgctatcctttcttgaagctctcctataccatgtttgtctcaggccatatgagctactactctttttactatttttccagataaacccagatgactggcagcacactagtaatttcaccct

SEQ ID NO: 623614 - DNA, 504 bp, Homo sapiens
caatcaacagcctcaagtttccagcccctcaccctccataatccccttaaaaccctagccaaggactcctcatggagatggatttcagagtctccttccacctccttgtgcagtgccctgagatcgttaaactctttttctactgcaaatcctgctgtctcagcgtatttaatctgttactgcacagggggcatatgaaactgttggtcctataacatcaacagtaaagcaactatagagtactgacctagaacacttacttccttyttcctattatccctttatatcttacatgattatattctaagaataccctctattattgaggaataaaaccatacacaggcatattggacacacctggctcaacatttcttaaactgtttactctaataaaaatgttatcaagatggaaaagattttagttcaatttattctgaagtggagcagaaaaacatggtaaccatgttaccatgccctgacagctcagcttttttttttttt

SEQ ID NO: 623615 - DNA, 555 bp, Homo sapiens
gctgataaacttatggtaatgtatatagcagcatagtagtttgctagggttgccataccaagttaccacaaaattggtggcttaaacaacaggaatgtattgtctcatggttctatccaaaatcagagtgtcagcagggcggtcctttctgagggctgtgagagaaggatctgttccaggcccctctcctgggctggcagatggccatcttttccctgagtcttcagatcatcttccctctgtatgtacctctgcacctgaatctcccctttcaccagaattattagattaggacccaccttaatgaccacattttacttgattacctctgtaaataccctatctccaaataaggttatattctgaaataataggggttagggaattcactatatataatttaatttatatacatacatgtacatatgacatacaatacatattatatataatatgtattgtatatacatatatacacatttccccccaaccacgtcaactgaaaaaaatygaaaagcaataatattcctgcagcagtgagcacagctagcaccc

SEQ ID NO: 623616 - DNA, 586 bp, Homo sapiens
atattctaggcctatccactcacatagctaatgacactccttctttacaagatgaaggattaggagatgattttaaatcttttagctggaagggcctttaagagatacctgtgtctgtcttgggccttagagtgagtaaagggacagcaggtggtcaggccctgccaacagcaggaccattttctgcaggtgcccaacagcagccctggagttgcctcagatcctcccactggaggcttcattgctgtatctgccattccatccctggcagggataggccaaggtcttagataccctggcacccaacactccatacaggcttgtctctgagcagactctcggtgaaggctattgtgctagtctgagcagaacgggaggtgcagggattgcagctgttccttcactgcagtgtcagtttggaaattttcccagaagacttagctggtgcctcttctttgatattcatgagtgtgtgaacacaacgaccctcctcatctttgtcgaacccattcctcttggaccacaccawgtatagtccaaaaagaaggtgatttaggagaagtgtgaaggcaccctcagttctggc

SEQ ID NO: 623617 - DNA, 616 bp, Homo sapiens
gaaaacctcagctccaaagaggcttgagttttcacattagatatttagtcatctaaattctggataggaaacacttaacatctatattgtgactcaaccctcccatacccattacagacattgctaattgatcacagagcttkttcctatggtactaagagttgtccctcaaagacttttcagattatattggcttcatatgctttaaatttgcattgtatggttaatttgaacgtgatgatactttcaatatattcctgctggcaagctgggttttttaataattttaatttgctaagatcttcagatctgaaattttggaaagggctccacttgttgaataacatgcttgaatacttctatgtttacagtagatgggagagaatctcagcatatttttcttctggttttcatgtggtcaatgatatcattatggcacccatggtggatggggcaaatgtttacaaacagccataaaagctgcgttgctttacaaatattacaaaagtttattaatttgagagcttcacagatagcataagtctatgaatgaatgctcaaagaaaacttaagaaacaaagatttttcagcactgtgctcagactgccactcccaa

SEQ ID NO: 623618 - DNA, 586 bp, Homo sapiens
cctataattccagcactttgggaggccaaggtgggcagatcacgaggtcagagattgagaccatcctggccaacatggtgaaaccctgtctctattaaaaatacaaaaattagctgggtgtggtggcgtgcacctgtaatctcagctactcgggaggctgaggcaggagaatcccttgaacctgggaggcagagattgcagtgagctgagatcatgccatggcactccaccctggtgacagagtatgactgtgtctcaaaaaaacaaacaatatactatcctaactgtaatagacaggtgaaaacatagtactctgtgataaaaatatgcaactyaatatgtatatattcacacataaacagaccagaggacataattgggtcacatgcttgcacctacttaaaataatagtttgaattaaaaaaataataataacaccatacctgtaatcccagaactttaggaggctgagacaggaggaccatttgaacctaggagttttgaaccaaggctggacagcaaagtggggccccatctctaccaaaaaaaaaaaaaaaaattacccggatgtggtggcgcgcgcctg

SEQ ID NO: 623619 - DNA, 468 bp, Homo sapiens
ttctgtccttttgaaattataataaggtcaatggttttccattgggtgagtatggaaactgcaggataattttggtccttgtgacaacaaggactaaggagtgctactagcatttagtgtgtggcagttgggtacacaaaacgtctggcaatgcccaggacagttctcagcaacactgttgtcctattaaaatgccaacagtactcccactgagaaactaatgggggcttcaagaagtcccctgaattcaaaaagctatgttataattayattaccatcaaagcaatatttttcaactggcccacaatatagccttccttatttgaaggtatccataaagtataaaataaatcaagtaaacattcctactagtgaatacaaattatattgctctgtaattattaggcagcagggaaagattataatgcttccacccttatattctgttactcctttatgaaagaaaat

SEQ ID NO: 623620 - DNA, 568 bp, Homo sapiens
tgtgatatttcctcaaccatccataaatgtctttttctgtgtgtgtgtgtgtgtrtgtgtatgtgtaatatttcacaaatgtgttattttcccgaatagggtatatgagtttctagctaccagttaccaaatcctacattcccttgttttctcaggaatgtcaagtataaataatcaacatactgtgagtattaaggacaaggtcaggatggataagaattgtttaacagagcaaatcacagttttatttttgggttaaagcagggatgcattttcatgactccactccacatccttaaattcttcagatctgttttggcttttgcggaatgacattgtatcttcctattaaagaaaacaaactttctaccataggcatatgagaaactttaaaaacacaacctaaaagtggcgtaaagtaggctacaggcctgctagcttaagaaagagaaaagttacttttagcagctatttccccatcttttcactaggttataaataacaacacctaaaataactcagagctataatccacaaataatttatcatagtgtgtccaccagaaaat

SEQ ID NO: 623621 - DNA, 505 bp, Homo sapiens
attttttttcacagtgacagttgtgcagcaggtcacagctgacaaatctctattgcatgcaaaggctcatttgaaattcacaagtgtgggtatcaaatacacataggtgctcttaactcaaggataattraagcatgagctcaggctcagagaggctaagagatttgtccaagatcacatagcagcagaaagaatactggaacctgcaaatttagaccacaatttttttataacataaaacactgcatagtttactcttgggggaccggtaaggatatcataaaggcaaactacaaagctttgccaaagggttcttgttatttaatagctatttagtattcctaaggatgcctgaaacatggcctaaccttaattccatttgatcaggtaagaatatcatatctgtggttgcaaaactagatttaacagataattagagatattacctcacgcctggccacatcctggtagcaagacacagacgagaaacagcaaaagtgaccag

SEQ ID NO: 623622 - DNA, 578 bp, Homo sapiens
atgcatagcctagtaggagacagacatactgcataaacgacatatatcattataaaaatataattattatattttaaatatatttaatgtataaagggaaaggagattctaagatctcaggagtcaggggaagtttatacagtacgtactatctgagtatagatttgaattataaatgagagtttgatggatagacaagaaagggtactatgcaaagaagaacgtaattgtgcacaggcatggagatatgagtgagtaaaggcattttatgagaactggaaaataaaatgtttagggargtatgggagagaggttaaggctggcaggagaggaggcaagaagccagatcaaaaaatgtcttgtcagccatgcaaagaagtttagattatgttctagagtgatggtgagccataaagaaactttgaaaatgatagtgatgtgatcgaatgtatgaattagaaagataaaattccatgattgtatgaaccatctcactgggaaggagacatggctggaagaaaagcaactattagtgaagctattataaattatccagatgagatgtggtagggcataca

SEQ ID NO: 623623 - DNA, 570 bp, Homo sapiens
atttggttcttttgtctgattgctctggctaggacttccagtactatgtgaatgggagtggtgaaagtggcacatggaacattctccaaaacagaccatatgtaaggccacaaaacaagtctcaataaatttttaaaaattgaaattatatcaaatatcttctcaggccgtagtgtaataaaactagaaatcaataccaagagaaactcttgaaactatgcaaacacatggaaattaaacaacattctcctgaatgaccttttggtcaaaaatgaaattaaaataaaaattaaaaaaattttttgaartgagtgaagtggagacacaacataccaaaacctgtgggatacagcaaaagcaatgttaagagaaaagtttataaaattaaatgtctacataaacaaatagatcacaaattaacataacatcacaggaactagaaaaaaacaagaacaaaccaaatccaaagtagcataagggacataataaagattagagcagcattaaatgaaattgaaaccaaaacaaatcacaaaaggtcaacaaaatgaaaagttggttattaaaaag

SEQ ID NO: 623624 - DNA, 464 bp, Homo sapiens
aagagaaggaatggtaggtaactataacatgagctccccaaagtaggcagagagataatgaaagcagccataagaggactatgagctgaatgggaagaagagaatatggtgctgaagctcaatgtactcacatggaaaagatgagaacaagtggattctgaacagactgcagtatggcataaacctgcccattgtaccaaaatgatttccaattgccatagctcctggctatttattaaaatatatttaaacaatgcctaccatgtaccaagcactggggataaagccacgaaaaagactggcwtgtctctgcacttctggccccaataattattagctgtgtgaccttagcaaagttattcaaccactctatgcagcaatcagttcatttgtaaaataaaggtaataatatctacgtcacaaatattaaatggtgagaattaaattgtatagtgcatgtaaag

SEQ ID NO: 623625 - DNA, 607 bp, Homo sapiens
ctactctcatttaatactttagttaaaataaatatcttcaacttcttaaagcagaggagagaatgttttaaaaatccttaaaattaaaataaatccttaaagcaacatagtgctttatggtttacaaaatcctttcccaggaaatacaaaactcatttgaccccaaaacaacttttgaggaggcaagttataatattaaaagttaagaaaatgagcagacttcactgttagatgyctgaggccacattcatcttctttatatccagcactgaactaagcaaatgagaagtttgcctagccaggaacacacttttcattaagctatcagaataatcatgtggtcattctgtgagggatacaacagagagggagaatttccacctttctgatgtagaaaagcagcatagagcacataagctttcacacagactactcttgggattatatgcatagccacctgatcactccatgacctttgcaagttacttaagtcttctaagccttagtcttctcgtctgtaaaacaagaataataacgctcacatctatattgctataataaagattaaataagatgagatatgtaatatgcacttggtgccacatga

SEQ ID NO: 623626 - DNA, 607 bp, Homo sapiens
ctactctcatttaatactttagttaaaataaatatcttcaacttcttaaagcagaggagagaatgttttaaaaatccttaaaattaaaataaatccttaaagcaacatagtgctttatggtttacaaaatcctttcccaggaaatacaaaactcatttgaccccaaaacaacttttgaggaggcaagttataatattaaaagttaagaaaatgagcagacttcactgttagatgtctgaggccacattcatcttctttatatccagcactgaactaagcaaatgagaagtttgcctagccaggawcacacttttcattaagctatcagaataatcatgtggtcattctgtgagggatacaacagagagggagaatttccacctttctgatgtagaaaagcagcatagagcacataagctttcacacagactactcttgggattatatgcatagccacctgatcactccatgacctttgcaagttacttaagtcttctaagccttagtcttctcgtctgtaaaacaagaataataacgctcacatctatattgctataataaagattaaataagatgagatatgtaatatgcacttggtgccacatga

SEQ ID NO: 623627 - DNA, 607 bp, Homo sapiens
ctactctcatttaatactttagttaaaataaatatcttcaacttcttaaagcagaggagagaatgttttaaaaatccttaaaattaaaataaatccttaaagcaacatagtgctttatggtttacaaaatcctttcccaggaaatacaaaactcatttgaccccaaaacaacttttgaggaggcaagttataatattaaaagttaagaaaatgagcagacttcactgttagatgtctgaggccacattcatcttctttatatccagcactgaactaagcaaatgagaagtttgcctagccaggaacacacttttcattaagctatcagaataatcatgtggtcattctgtgagggatacaacagagagggagaatttccacctttctgatgtagaaaagcagcatagagcacrtaagctttcacacagactactcttgggattatatgcatagccacctgatcactccatgacctttgcaagttacttaagtcttctaagccttagtcttctcgtctgtaaaacaagaataataacgctcacatctatattgctataataaagattaaataagatgagatatgtaatatgcacttggtgccacatga

SEQ ID NO: 623628 - DNA, 485 bp, Homo sapiens
caaggggtgattaatagctcaaaagaaccaatcatttaatggccaaatgccactaaatcagagtacctgtggtcagcatggctggttaaagccctctggtgccttgtcctggttcattcaaactgaaatgattctaaatcataagattaaatgtgataaagttcagcaatattctcattttrtccttcatgatcatgtttttcttttcatttgagagatctaatattaaatgataaacatctactttttctcatttattttgtggttgtccttgctggtgccctgagcataagtttggtctacatgttggattatcaagtactgaaaaaaataattatttttcaaagacttcaattgtactaactgtgttctagggaaacaaatttttatgatttataaacaatttgttgtgtttttttctcttatttgttcttcacatctcagagcattgaataatagtgctgtgaacttacattaaatatttt

SEQ ID NO: 623629 - DNA, 538 bp, Homo sapiens
tgctaatgctacaaaaagtgttggcaactatttctataataaaatattttaataaagacatttgtaggccatataatctctgttgcaactactctgcttttatagcaatatataaaagaaataaatatggctatgtttcagtaaaaattatttacaaataaattttttagaagcagatgtaccatactttattagtagttctcatattttcctttgtcatgcacttggagtaagaaagaataccatttcactcaaaaatrtctttgatgaagccataaaaagcaataatttaataaatattggtgcttgaatttacttctttttaatgtcctgtgtgatggaattggaaatatatccatgatgcatttctgctgcatataaaatatatctcaaaaaattgtctggacaactgtttgagttttaagttgaactagtcactttttaatgcaatatcatttccttttcaacaacaaaagaccgatggacaaactataattattcagcagacattttgcaagaatgaataaagtgagtgaac

SEQ ID NO: 623630 - DNA, 549 bp, Homo sapiens
aaaaaatgtacactgtatttattcttgcttttcctgtaatacataagcttggttacctcaatcacatgtaagaataatcctcctgattgtttttagcttatcaagtaatcataattattatggggaattaatactgacagaagcctttgcttacagaattaaatggaagaaaaaactcattcctgatggtatatgctgctgaaattcagttgtgttgttgccctaaattatagcttagcaatcactttttcctctgctgggaaagccattcttgacatgcttccaaaaactcaggtagaggagagcatacaagagcttttgtgggaaagcatatgaaattattattctttgtctctggattctggattatgatcttgctactaaaatctaagccctttaaaattgctattagatacctratagctctccattatgaagcagtgtagtatgtaataacaattttataacttaaaatatttctgtatcaagagccatcaggttaacataacaagaactatatgtcagattctgtggaattgtttgtattct

SEQ ID NO: 623631 - DNA, 490 bp, Homo sapiens
gaaaatgctcaacatcactaatgatcagaaaaatgcacatcaaaactataatgtgatgccacctgactcttgcaagaatgrccataataaaataaataaataaataaataaataattaaaaaacaatagatgttgacgtggatttggtgaaaagggaacacttttacactgctggtgggaatgtaaactactataaccgctacagaaaacagtgtggagattccttaaagaactaaaagtggaactaccatttgatccagcaatcccactactggatatctacccgaaggaaaagaggtcattctatgacataagacgcttaagacactgcatgtgcatgtttatagcagcacaattcacagttgcaaaaacatagaaccagcctaaatgcccataacagcaagtggctaaagaaaatgtgattaatatatataaatatacaccatggaataccactcagccataaaaaaggaatgaaataatggcattt

SEQ ID NO: 623632 - DNA, 635 bp, Homo sapiens
actataaccgctacagaaaacagtgtggagattccttaaagaactaaaagtggaactaccatttgatccagcaatcccactactggatatctacccgaaggaaaagaggtcattctatgacataagacgcttaagacactgcatgtgcatgtttatagcagcacaattcacagttgcaaaaacatagaaccagcctaaatgcccataacagcaagtggmtaaagaaaatgtgattaatatatataaatatacaccatggaataccactcagccataaaaaaggaatgaaataatggcatttgcagcaacctggatggagttggagactattattctaagtgaagtaactcaggaatggaaaaccgaacattgtatattctcactcctaagtgggaggtaagatatgaggatgcaaaggcataagcatgatacagtgaactttggggacttgggaaaagggtagaagaagggtgagggataaaagactacacactgggtacagtgtacactacttggatgatgggtgcaccaaaatttcagaaatcaccactaaagaacttatgtaaccaaacaccacttgtaccccaaaaacctgttgaaataaaataagtaaataaataaaagaaaggaaacaa

SEQ ID NO: 623633 - DNA, 635 bp, Homo sapiens
actataaccgctacagaaaacagtgtggagattccttaaagaactaaaagtggaactaccatttgatccagcaatcccactactggatatctacccgaaggaaaagaggtcattctatgacataagacgcttaagacactgcatgtgcatgtttatagcagcacaattcacagttgcaaaaacatagaaccagcctaaatgcccataacagcaagtggctaaagaaaatgtgattaatatatataaatatacaccatggaataccactcagccataaaaaaggaatgaaataatggcatttgcagcaacctggatggagttggagactattattctaagtgaagtaactcaggaatggaaaaccgaacattgtatattctcactcmtaagtgggaggtaagatatgaggatgcaaaggcataagcatgatacagtgaactttggggacttgggaaaagggtagaagaagggtgagggataaaagactacacactgggtacagtgtacactacttggatgatgggtgcaccaaaatttcagaaatcaccactaaagaacttatgtaaccaaacaccacttgtaccccaaaaacctgttgaaataaaataagtaaataaataaaagaaaggaaacaa

SEQ ID NO: 623634 - DNA, 635 bp, Homo sapiens
actataaccgctacagaaaacagtgtggagattccttaaagaactaaaagtggaactaccatttgatccagcaatcccactactggatatctacccgaaggaaaagaggtcattctatgacataagacgcttaagacactgcatgtgcatgtttatagcagcacaattcacagttgcaaaaacatagaaccagcctaaatgcccataacagcaagtggctaaagaaaatgtgattaatatatataaatatacaccatggaataccactcagccataaaaaaggaatgaaataatggcatttgcagcaacctggatggagttggagactattattctaagtgaagtaactcaggaatggaaaaccgaacattgtatattctcactcctaagtgggagstaagatatgaggatgcaaaggcataagcatgatacagtgaactttggggacttgggaaaagggtagaagaagggtgagggataaaagactacacactgggtacagtgtacactacttggatgatgggtgcaccaaaatttcagaaatcaccactaaagaacttatgtaaccaaacaccacttgtaccccaaaaacctgttgaaataaaataagtaaataaataaaagaaaggaaacaa

SEQ ID NO: 623635 - DNA, 563 bp, Homo sapiens
gttggattttttgctagtattttgttgaggcttttcatctgtttatcagggatgttgtcctgtagttttcttttttaaaattgcatccttgttggattttgttatcagagaaatgccggctttatagaacaaattagaaagaatttcttctcttcgactgttytgaatattttgagaagaattgctgttcattcttctttgaaagtttggtagaattcagcagtgaagccatctggtcctgggcttttctttgttgtgacagtatttatcacgtattcaatcttgctactcgttattggtctgttcaggatttctatttcttcctgattcaatcttggtaggttgtatgtgtccaggaatttattcattttttctaagttttctactttgttagtgtatagttgttcataatagccttggatgagcttttgtatgtctgtggtatcggttgtaatgtctcttttttcatttctcatgttacttatttggggcctttctcatttttctttgttagtctagcaagtgactcatcagttttgtttataagttcaaaaggaccaagt

SEQ ID NO: 623636 - DNA, 565 bp, Homo sapiens
gtgagaaattggatgctttccccctacaagtgggaacaagacaggatgtttcctcccaccattcttatttaaattgcgctggaagtgctaactagaataataagacaacaaaaagaaagaaaaatatacatattgggaaggaaaaaataaaattctcttttattacagaagacatgattgcctgcgtagaaagcccaaggaaacaaacaaaasccggaaaaattaagtgagattagcaaggccacaggttacaaggttaatatgcaaaaggttatttttttaacttttaagttcaggggtacaaatgcaggtttgttatataggtaaacttgagttaagtgtgatttttgtacagattatttcatcacccagttattaagcctagtacccattggttatgtttcctgatcctctccctcctttcacccttcacactccaaaaggcactagtgtgtgttgttcccttgtatgtgtccttgtgttctcaacagttagctcccacttataagtgaaaacatacagcatttcattttctgttcctgtgttagtttgttaaggataatgg

SEQ ID NO: 623637 - DNA, 506 bp, Homo sapiens
acaaattaccagaaagttcatggcttaaaacaacacacatttattatcttacaaactctggaggtcagaagtcctaaaattgaggtgttttcagggctgtgttccttctggatgctccagaggaaaatccattatcttcttccrcccagctgctaggggccatttacatgccttagctcatggcctcttcttccatcttcaaagccagcactgtagcatcttcaaatctctctatgactctgaccctcccccatccctcttatagtggcttgtagttacattgggcacctcctaagataatcccagataacatctcatctcaaagttctcaatttaatttcatctgaaaagtcccttttgtcattgaaggtaacatattcacaggttctgggggttaggaaattgacatctttagacagccattactctgcttacaagacacattggtcttgatttgacttggaacatacaccatgacagcaaggaaggtaatgagagtaaacaaa

SEQ ID NO: 623638 - DNA, 571 bp, Homo sapiens
tgtttaaatggctgggtgataagatggctgatgaaggcggtaagtgctatctttagataagcactgagctaattggtatttctggaggttactggaaaagaaaagcaattagttctgcggtgacacagaaccggtcttccaaaaatatggggaaatttttagtttttaaaatagtgtgggtgggagatttattggcaataagtgggtagagaccagagatgctaaacttgcaatgcacaggacagacctacacaaggaagaattggcttgccacaaatctaaaattccaaaagttgcatgtccctaatcttctgccccaaggatgggtataccagctggagagaaagcaatattttgggtttatagctgtacatgaaattattaaaggaaagcctttattctggacatcttgaagtcaaaatcctatggttccttcagcatctttctcactgaaacaaaagttggtgtttatcaaagctattttttcttttaggtaacaggaattttcttaagaagacaactaaaaatctcttttagcagggcaggtrgtaaaagaggaagtccttcccag

SEQ ID NO: 623639 - DNA, 560 bp, Homo sapiens
agagcacaagtgctcaagcttataaaaatgcaaataaatttgtttgggatgcaatatgacgaaacacatacttctcaatcatttaactagtcaattttttttagcatattgccaaaatgtagatttcatatgttgactttacattgctaattacacacatcctatttcttttctcgttatttttctttctttctttmtttttactttttgcgactccctctggtacccaggctggagttcagtggtgcaatttcagctcacttcaacctctgcctcccaggctcaattgatcctcccaggctcaactgatcctcccattttcagcctcccagggcgtgctaccatgcccggctaatttttgtgctcattgcagaggtggagtttccccatgttgctcagactggtcttgaattcctgggctcaagcgatatgccagccttggcctctcaacctgctgggtttacaagcgtgagccactgagcccagcaacagatatattttcaagtggatggtatcccatcagttgtgatatatgatgtaaacactctactaataattaa

SEQ ID NO: 623640 - DNA, 539 bp, Homo sapiens
gtcactttccattgttagtttttcgttatggaagcaccccacttctggtactgaaatctgttctagttgtccactgctgtgtaacaatattactacaagtttcatggcttaacacaacatgtatttattgtttaatagtttctgtkggtccaggcacggcttagctgggtcgtcagcttcagggtctcataaagctacaataggcatcagctagaactacaggttcaactgagagaggatctgcttccaagctcttgtggttgttgacagcattcagttctctgtgggctgttggactgagggtcacagtatctttctagctggaggctgaagaatgcttccaaacagtagcttgttttcttgaagccagcaagggagaaagactctgtgcaagatggatattacatgcttatgtaatataatcccatatatataatcccatacatcctgtcacctttgccataatctattggttagaagcaaatcacaggtcccacatacactcaagaggaggggattcgataaaggcatggaaatca

SEQ ID NO: 623641 - DNA, 539 bp, Homo sapiens
gtcactttccattgttagtttttcgttatggaagcaccccacttctggtactgaaatctgttctagttgtccactgctgtgtaacaatattactacaagtttcatggcttaacacaacatgtatttattgtttaatagtttctgtgggtccaggcayggcttagctgggtcgtcagcttcagggtctcataaagctacaataggcatcagctagaactacaggttcaactgagagaggatctgcttccaagctcttgtggttgttgacagcattcagttctctgtgggctgttggactgagggtcacagtatctttctagctggaggctgaagaatgcttccaaacagtagcttgttttcttgaagccagcaagggagaaagactctgtgcaagatggatattacatgcttatgtaatataatcccatatatataatcccatacatcctgtcacctttgccataatctattggttagaagcaaatcacaggtcccacatacactcaagaggaggggattcgataaaggcatggaaatca

SEQ ID NO: 623642 - DNA, 539 bp, Homo sapiens
gtcactttccattgttagtttttcgttatggaagcaccccacttctggtactgaaatctgttctagttgtccactgctgtgtaacaatattactacaagtttcatggcttaacacaacatgtatttattgtttaatagtttctgtgggtccaggcacggcttagctgggtcgtcagcttcagggtctcataaagctacaataggcatcagctagaactacaggttcaactgagagaggatctgcttccaagctcttgtggttgttgacagcattcagttctctgtgggctgttggactgagggtcacaktatctttctagctggaggctgaagaatgcttccaaacagtagcttgttttcttgaagccagcaagggagaaagactctgtgcaagatggatattacatgcttatgtaatataatcccatatatataatcccatacatcctgtcacctttgccataatctattggttagaagcaaatcacaggtcccacatacactcaagaggaggggattcgataaaggcatggaaatca

SEQ ID NO: 623643 - DNA, 539 bp, Homo sapiens
gtcactttccattgttagtttttcgttatggaagcaccccacttctggtactgaaatctgttctagttgtccactgctgtgtaacaatattactacaagtttcatggcttaacacaacatgtatttattgtttaatagtttctgtgggtccaggcacggcttagctgggtcgtcagcttcagggtctcataaagctacaataggcatcagctagaactacaggttcaactgagagaggatctgcttccaagctcttgtggttgttgacagcattcagttctctgtgggctgttggactgagggtcacagtatctttctagctggaggctgaagaatgcttccaaacagtagcttgttttcttgaagccagcaagggagaaagactctgtgcaagatggatattacatgcttatgtaatataatcccatatatayaatcccatacatcctgtcacctttgccataatctattggttagaagcaaatcacaggtcccacatacactcaagaggaggggattcgataaaggcatggaaatca

SEQ ID NO: 623644 - DNA, 434 bp, Homo sapiens
gtctgaaatggctccagatgtaaagactttattacccattttcctgaataccagtcagcaggagccctggggaagaactcttggwggaggaaatcccagcttgattccctccggtgtggagttggcaggaacattggaaatgcccagcttctctgtttttattgcatatgttaatcagagttttccccatatgtaggggaaagctatagctgtacctgactgtgggctgttccttacttagaattgttctctggtctgggacagcaatgcagagaatatggtgtattacagagagctgtttcattctaaatgaatgcttgcatctctgtgtgtaggcagccatttatttgggtccctgaaaatagtagcagtatggtgaacttaaattaaagaatatttattttgctgtctgtgtagtacaagctgcttcccca

SEQ ID NO: 623645 - DNA, 617 bp, Homo sapiens
ttctcagaagaagtactagaatagaaaataagcaaaatatagaaacagaatacagaaagacaaagttcaaaatacagaaagacaaagtagggaatgattagttctaactaggtggcacagggaaaggtagagaggtgggtctacctctcacggatagcataagcaaaaacatggaggtatgaatggcatatttagtgaagggcaagtagtgcagtatggccagtatggggcagtgaccagcatggggcataaggaaggcatagggtaggttgggactgaatcctasagcgttgtaaagtcccagcctggaactgaaccacgtatcttggagagcaaggagccactgatgattctgaggaggtaaaactatctgaactggatcagagagaaagataactcatgcaacaatgaagaaaagtcgaagttggaaatttgatatgtcatgaagctactgaaataatccataagagtcaaaaagtacttaaattatagcagaatcaaggtattggactgggaagaaagttcaaaggaagaaaggacagaacttggcaattgatgatttggatgtcaagagaccctggagtttaaagagaatggagaacaagaaatggaagacg

SEQ ID NO: 623646 - DNA, 568 bp, Homo sapiens
ttatactgtttgcctatttatgactcttgtcttctgcccctacctgggctaatcaaataagattatgtagtagcaatgcagcttccataaacactgaatccctaggctatagggacctcaagaaatcatcttggctatcccctcactatcaggcagtctctgaaacagaggacatcccaaaccacatctgcacactgaccagcacaggtgacagtgtctctactctcagagaagcagcctaaaaaaatatatatatatatmtatatctatagatatctatctatctatctatctatatatataattgggcagagcaatcatttacctatattctttggggtgtatgccaaggtaaggtctctaggtagcccagttgctttgtctaaaacagaagactcttaaaagaagctcctgtattctccctgagctgacctttcctgtcttgtccctcgatattaagcttatgctatcgagcctcatctcagttagatatctgtggcttcctttgccagctgacctagctggagctgctaatggagtaatcaagtatgaattcctgtataaatca

SEQ ID NO: 623647 - DNA, 568 bp, Homo sapiens
ttatactgtttgcctatttatgactcttgtcttctgcccctacctgggctaatcaaataagattatgtagtagcaatgcagcttccataaacactgaatccctaggctatagggacctcaagaaatcatcttggctatcccctcactatcaggcagtctctgaaacagaggacatcccaaaccacatctgcacactgaccagcacaggtgacagtgtctctactctcagagaagcagcctaaaaaaatatatatatatatctatatmtatagatatctatctatctatctatctatatatataattgggcagagcaatcatttacctatattctttggggtgtatgccaaggtaaggtctctaggtagcccagttgctttgtctaaaacagaagactcttaaaagaagctcctgtattctccctgagctgacctttcctgtcttgtccctcgatattaagcttatgctatcgagcctcatctcagttagatatctgtggcttcctttgccagctgacctagctggagctgctaatggagtaatcaagtatgaattcctgtataaatca

SEQ ID NO: 623648 - DNA, 613 bp, Homo sapiens
ggcctatatttccacatctgtctgttctgggctgaattgtgtctgcccccaaaaaagatatgttgaggtcctaacccccagcaactcagatgggatgttatttgaaaataagcacttcacagattaagtgaagttaaggtgaggtcattagggcaggccctaatccaataggactgatgtcctcataagaagaggggaatctggacgtagacgcagcgaggagagcatcaagagaagacagagacaygcagggagaactccatgccgtgacagaggagggctgcagctgcagccaagggtgccatcaaacaccaggagctagaagaagtgaggaaggctcctcccctgcaggttttagaggaagcaggaccctgctgacaccttgacttcagacttcagactgcaagagaataagcttatgttgtttcaaaccatccaacatatagtagtttgttacagcatcactgagaaacaaacggactgtccctttcatcaaggttaacgtgtctgaagtttcattttctaatgttactgcactcaactgaattgacttagcaaattaattactgtgaagggatttacagcggctgatggcataacaggggtgtgggga

SEQ ID NO: 623649 - DNA, 613 bp, Homo sapiens
ggcctatatttccacatctgtctgttctgggctgaattgtgtctgcccccaaaaaagatatgttgaggtcctaacccccagcaactcagatgggatgttatttgaaaataagcacttcacagattaagtgaagttaaggtgaggtcattagggcaggccctaatccaataggactgatgtcctcataagaagaggggaatctggacgtagacgcagcgaggagagcatcaagagaagacagagacatgcagggagaactccatgccgtgacagaggagggctgcagctgcagccaagggtgccakcaaacaccaggagctagaagaagtgaggaaggctcctcccctgcaggttttagaggaagcaggaccctgctgacaccttgacttcagacttcagactgcaagagaataagcttatgttgtttcaaaccatccaacatatagtagtttgttacagcatcactgagaaacaaacggactgtccctttcatcaaggttaacgtgtctgaagtttcattttctaatgttactgcactcaactgaattgacttagcaaattaattactgtgaagggatttacagcggctgatggcataacaggggtgtgggga

SEQ ID NO: 623650 - DNA, 613 bp, Homo sapiens
ggcctatatttccacatctgtctgttctgggctgaattgtgtctgcccccaaaaaagatatgttgaggtcctaacccccagcaactcagatgggatgttatttgaaaataagcacttcacagattaagtgaagttaaggtgaggtcattagggcaggccctaatccaataggactgatgtcctcataagaagaggggaatctggacgtagacgcagcgaggagagcatcaagagaagacagagacatgcagggagaactccatgccgtgacagaggagggctgcagctgcagccaagggtgccatcaaacaccaggagctagaagaagtgaggaaggctcctcccctgcaggttttagagraagcaggaccctgctgacaccttgacttcagacttcagactgcaagagaataagcttatgttgtttcaaaccatccaacatatagtagtttgttacagcatcactgagaaacaaacggactgtccctttcatcaaggttaacgtgtctgaagtttcattttctaatgttactgcactcaactgaattgacttagcaaattaattactgtgaagggatttacagcggctgatggcataacaggggtgtgggga

SEQ ID NO: 623651 - DNA, 538 bp, Homo sapiens
ataaacaccctggttagctaaagccarggcattaaaaggacacaatgaagaaaatgcctctaagggagatagaaccgaagggagatcatagctggttgtggagccaaaggtaaattattctttaagatgtactagatacttattggcagctgctaatagcaaaataaaaaaggtcctgttgttcacaactgaggcacaaaagtacttaggaatgtagggagcagacaccccctccacatttcacttggagccatgcggtctgtgtcaagatggcctgtgtgaagagccaccagttatagttcatgtgggtttccattattctttgggccttcactttgcccaaggcacacagttaatataaccacaagaatgtgaacacttttatttgttctgaaatatgcttttaacctttacagtgggaaaggcccttaatttatctattccttattattttccagccctcatattttctatttcctttctgtgctcctgaaaaacaagatgccatgtctaaaatcctgtgtgcctttgtgcaggg

SEQ ID NO: 623652 - DNA, 544 bp, Homo sapiens
ttatcatcagttttctaaatttcagcatgattcttacatatgtcactttaggttctgagtatgactgtgacgtgcacggcaagtcatgggtctagcgacaaaaaagtctatttatctgtcagttaataagatgtgtttgagctcccaggatatgcagtaaagaactggagatgccaaatgtatgtgtgtttctacataaaaggtccggcactactttccatttctgagctttgtggggtttctttttgagggatcaaattttctttgtttgtttgtttttaagacagagtcttgctctgtcacccaggctggaatgcggcggcgcgatctcggctcactgcaacctccrcctccctaggttcaagtgattctcctgcctcagcctcccgcatagctgggattataggcgcgtgccaccatgcccggctaatttttgtatttttagtagagatggggtttcaccatgttggccaggctggtctcgaacttctgacctcaggtgatctgcctgcctcggcctcccaaagtgctaggattacaggca

SEQ ID NO: 623653 - DNA, 621 bp, Homo sapiens
aataggaaacaaagatttaatttctttaatttagttctcaaaagatgatcctttctttatgacagtctcttgaacgtgtcctttcacagggcgatgtctatattctctcttgagataaattttcctcactcatgtcacattttattcacttcatcctgagtttctttgttgtttctggttgtttctgtggctctgagagaacatcttaggttttgcaaataggcaactcgccctcctgtttttcataatttacagtagggggcgccatagctgcagtgttatagacaagtcacagggggatttttttttttttccagattaggatgttttgagcctgagaatctaattaaaccagcagtatcctgatagaatttgaacctcctctacaagaatgtaggaggagaaagagaaaaatgatgtaaagtccaaggtagaaagatgattgtsgctagatagccagggagtctgacttgacatataggacgatgttcatctcagatggagagggaccccctgaaccagaggctgcaggggaaggtgtcaagacttatgcactttgggaaaaatagctttccaaggtgattaagatgaaaagtacactcctagggaaataaacttgct

SEQ ID NO: 623654 - DNA, 487 bp, Homo sapiens
gttctccccagttgctcaatgtgacctatcagctgtcagcagttgttgatcagtaaggcaggaagaattttatacactattataatcatcttgattgtagttcctaaaatacagggtctcataaacatgcttcagatggcataaaacagcttacaactggcagggaaggatgagcaccagagtcacatgggacaattattgaatacattgcttctccttgggttttgtggaccaggcctrtctgcaaggggcagacctaagcaggtgcccctctacagggtgcttaggagaggcgtggtccagagaaggtggaaccaagaggaccaggaatctggtccctagtgccgaaagttgttctccattcacatccactggctaattctgtacctagcacagcacctggaagacccttgctaaactgtagatgggatgtctcatagcttggtatttgatttggccttttctaaaggaaagtaatctgtaccta

SEQ ID NO: 623655 - DNA, 588 bp, Homo sapiens
tgctgtgtgcaaagtgctgctgtgggtaccggtgacttctccgtcatcttacacctcaccagcacaacatcacggtgctagtatctagattttgccttttgtcttctggtatcacttttatgtgggggaagaataaatttggctgtaccataggaattttcaagactgttcagggcggtgatctgatgctctgaagactctgaataaaataaatgaggtcagctccacaaaacatcaaagagtgcactgccrtttgccaggaaacactgcagagcaagtatgtagtggaaaggaatgaatatttttccaggacataaagtccactgatagattcagatgttctagttataatgctcaaatcagaggtgacacaaagtaacagtacaggtgggaggtgagtaaataaacacatagctgcccctagattttgcaggcttttaaataggctttcctgactgcccagctctaaagttctgggagaaagagagaggctgggatttgggacacatacgtgttgaagaaagagtaaaggaacagctgattactggagaaagtcacacttcccagcctcctcactggcccaccatt

SEQ ID NO: 623656 - DNA, 632 bp, Homo sapiens
  misc_feature 315, 316, 317, 318, 319, 320, 321, 322, 323, 324, 325, 326,327, 328, 329, 330, 331, 332, 333, 334, 335, 336, 337, 338,339, 340, 341, 342, 343, 344, 345, 346, 347, 348, 349, 350,351, 352, 353, 354, 355, 356, 357, 358, 359, 360, 361: n = A,T,C or G
  misc_feature 362, 363, 364, 365, 366, 367, 368, 369, 370, 371, 372, 373,374, 375, 376, 377, 378, 379, 380, 381, 382, 383, 384, 385,386, 387, 388, 389, 390, 391, 392, 393, 394, 395, 396, 397,398, 399, 400, 401, 402, 403, 404, 405, 406, 407, 408: n = A,T,C or G
  misc_feature 409, 410, 411, 412, 413, 414: n = A,T,C or G
tactagattctggtgataacagtgacaaataatatgtccttgaggcacacacagtctacaggagagcagggttgggagagacaaatgttctaaatagggggccatgccacagtagagtgaatatgaggagcatgaaggtatgagttggcacccttggggtgggctgggggacaactgaaatcacaaatgagatgatgcctgagttctcgagaacaaggcacaggcagaagattccaggtaaaaagtagtgtcctgagacgacratgttccatcgagaggtcgcctccagattgatatggctgcatttgtgttacnnnnnnnnnnnnnnnnnnnnnnnnnnnnnnnnnnnnnnnnnnnnnnnnnnnnnnnnnnnnnnnnnnnnnnnnnnnnnnnnnnnnnnnnnnnnnnnnnnnngtaaaaaaaagatggccactccataggcagagcaaacctgagggctgctgattggctatttttatggttactttttgatgatatgctaaacaaggggtagattattgatgagttttctgggaaaagagcagggatttcccagaaatgagagttcctctcccttttagaccacataagctaacttccgggcattgccatttaatttgtaaatggtcatg

SEQ ID NO: 623657 - DNA, 335 bp, Homo sapiens
gtgaggcattactgtagtctgtgaatagatcacttagaagagatacgtttgaaaagaaacggaaatgaaatagtgttgtaaatgactgacctctagtgtttcataaattatgttggaaaaagatcaactggatgtccttgggattatttctgctaatgcgaaacaattttgaatgaaatcagtacrttttctttcattaagtaccaaaatccaaagagtgtggtagcagaaggctagcacaggatctgtgctcaataaatcaatactgaaatctagctctgagcaggaagaacatcaggaactcatctgcagataatggaagaacatagtttgtt

SEQ ID NO: 623658 - DNA, 532 bp, Homo sapiens
tctctcagctacgtgagagcagggacctcatctgtctcgttccttgctctggtcttgtgctcggaagagttcctggcacatagagagtgctcagtaaaaacttgtaaaatggattttgtggaattttaaaattttctttctaaggatatgctkccttttacatagtttgtattcttcatttcacattttaggttaataatagtaaacacacagaagttgttctatgcatttcacgtgtatttatcccagtcagtcctcaaaacaacccaatgagctgtccccagattagagttgtggagaccgaagcactgagaggttaagtcagttggccaaggtggcacagccagtaaatggcagcgccggcacatgaatatgggcagtctggccccagagtctaggtttttaaccacacactatgctatatttttcctaccatttctaaccctctttttcttgttaagcaagcagtttacttctttccccagaatttctttttttaagatggagtcttgcttggtcacccaggctggaa

SEQ ID NO: 623659 - DNA, 450 bp, Homo sapiens
tttctcctttccttgtctcctttctttgcttctttcctttccttcctttcctcctctcttttccttttccttccttccttccttttttctttccttctttacttccttctttctttccttctttctgtctttccttctttctttcttttgcaggatcttgctctatcacccaggatagaatgccgtggctcactgcagcctygacctcctgggatcaggcaatcctcctgcctcagcctcccatgtagctgggacaacagccatgtgctgccacacctggttaattttcgatatttagtagagatgggagcctcactttgtcgtgagcaagtctctctccttgacttccctaattacaggcatgagccactgagtccagcctactttgtctttcttaagttgccatttttctcatgtcaagtaattccaactccatttaacatcctttta

SEQ ID NO: 623660 - DNA, 653 bp, Homo sapiens
accctcttgaatgtcccccaacataagccccctttcctatggaatattcccaaggagtgatattctggaagatctgacaagtgatcaggcgcggaagcttttttctgtgtggctccgtggtgtcctcttgtttgaatttgcagttcatgtcaatcttaatatttgttttgagtcacatatgccggcttctactttgcaatttacatggatgatggggccctattcaaagtcctgctcctgctgcctttgtgccgttcacctctcttcacgcagtcattaggctgaacaccatataattaggtaacccatgtaaagcttagatttctgaaaggttgtggttcttttcaaaaagtaagggtttccatttttaccctcattcttttctaaacaaaaagacatttcccccctgcrgttttcatatgaatgtagtaacttagaaacagttagtcttgtaggtgggtgataatttgggtttgttttcacctgagagccagtttttgtttacacagcttgtatttaactcagggtaggatgagattgatttaccatcatttgtggataagcatgttgctttttgaagccaatggaattggcctgcttaaaaaaaaatccctaaagatttaaaatccacccaacaaaataactcagtttcg

SEQ ID NO: 623661 - DNA, 510 bp, Homo sapiens
ataaatataatacatacacctactgtgtacccacagagattaaaaataaaaaaaattaataaaaaaargtgataaatattgggaccactaggcacactagtcataatgtaaataaagccagtcatatggagtaacttcatttgtttccagaataattatgtaggtataaggagtaacattgtgtcttaaaaccatggcaaagtcactccaatacctgttcctccctttctcaaatgatcttaaaactgaaagggttatgccttgttccatggttggataacaagttatagtcaaggaaaagcatttcctggatctctcagaagatgcaaacctgcatgaggaggtagacacacagatgtatgaactctagattgaaaatacaatagaatgttgagtgtgtctgtgtagttggtgagtgaacaagtccgaaggtgagtgatgtgactcactgcaaccatttggtgatcttagttcattttacctgcattccttacagaaagagcgaggtta

SEQ ID NO: 623662 - DNA, 510 bp, Homo sapiens
ataaatataatacatacacctactgtgtacccacagagattaaaaataaaaaaaattaataaaaaaaagtgataaatattgggaccactaggcacactagtcataatgtaaataaagccagtcatatggagtaacttcatttgtttccagaataattatgtaggtataaggagtaacattgtgtcttaaaaccatggcaaagtcactccaatacctgttcctccctttctcaaatgatcttaaaactgaaagggttatgccttgttccatggttggataacaagttatagtcaaggaaaagcatttcctggatctctcagaagatgcaaacctgcatgaggaggtagacacacagatgtatgaactctagattgaaaatacaatagaatgttgagtgtgtctgtgtagttggygagtgaacaagtccgaaggtgagtgatgtgactcactgcaaccatttggtgatcttagttcattttacctgcattccttacagaaagagcgaggtta

SEQ ID NO: 623663 - DNA, 622 bp, Homo sapiens
tacatatgttagtagtgagcatttatcatttgcctcctcagattcctgagccctacttttgttacagccctacgtttgtttgtttaattacatcttccatatttaagttcacatgatctgatggggcttcacttcagatttctataggctaaagtcttttgaaatcacaaaaaatattgtgcactagcattatttatattctgatgttttgtttgcttgttgataccttattggagaaatttcaggcaaaatgttttgctcataaatatgtgagcaagcaagaaaagcaaagtgttagtggcaactgtaaaaatatctaattcaatttttaacctttctacaaatcccctcatttctgccaaatagctgttgatttatttgcagcttgctattctgatgacatatgagatcattaggacaataaaccccaatgttctcttgttttctcaaattgaagtgttgaagacttaactttaattatgcccttaaattccaatgtagacacagaaataagcagcaagcatcyttctaggtctattttatatcaatcctcttttgtaatactttttcttatttctagtgttcaacatcatatcctgtttaaactagacttgccataaat

SEQ ID NO: 623664 - DNA, 622 bp, Homo sapiens
tacatatgttagtagtgagcatttatcatttgcctcctcagattcctgagccctacttttgttacagccctacgtttgtttgtttaattacatcttccatatttaagttcacatgatctgatggggcttcacttcagatttctataggctaaagtcttttgaaatcacaaaaaatattgtgcactagcattatttatattctgatgttttgtttgcttgttgataccttattggagaaatttcaggcaaaatgttttgctcataaatatgtgagcaagcaagaaaagcaaagtgttagtggcaactgtaaaaatatctaattcaatttttaacctttctacaaatcccctcatttctgccaaatagctgttgatttatttgcagcttgctattctgatgacatatgagatcattaggacaataaaccccaatgttctcttgttttctcaaattgaagtgttgaagacttaactttaattatgcccttaaattccaatgtagacacagaaataagcagcaagcatccttctaggtctattttatatcaatcctcttttgtaatactttttcttatttctagtgytcaacatcatatcctgtttaaactagacttgccataaat

SEQ ID NO: 623665 - DNA, 592 bp, Homo sapiens
acttggcaaaattattccatagactaggctcctgaattggtagtggttacttatagacattaaaatatacatggactttttttctttttaatatttacagagattgatackatctatattaagaattaagatagtcaaaggagttgtcaataaaaaaattattcttctgggcaagaggtagtaacagggttgaaacctactttactgtctggaaaaaaaagtaaaaataatacatcaagacttagaagatgttttctgtaaaggggcaaatataacatatttcagctttgagggatattcactttctgttgcaactatttgactatttgactctgctattatatctcaaaatcagtcacagactatatgtaagtgaataggcattaccaaatttggcctgtgagccatagtttgatggcacatggaatataggaaacaatgtttttcttttcaaaatattggaaacaaataataaaggaaagtcattcctttgacatgggaaacaaatgaactgagtttttaaaaattgttatttcctcagcttattatcttttccagaccataatgaaagggtggagaatccatgttgaaa

SEQ ID NO: 623666 - DNA, 568 bp, Homo sapiens
taggctcctgaattggtagtggttacttatagacattaaaatatacatggactttttttctttttaatatttacagagattgatactatctatattaagaattaagatagtcaaaggagttgtcaataaaaaaattattcttctgggcaagaggtagtaacagggttgaaacctactttactgtctggaaaaaaaastaaaaataatacatcaagacttagaagatgttttctgtaaaggggcaaatataacatatttcagctttgagggatattcactttctgttgcaactatttgactatttgactctgctattatatctcaaaatcagtcacagactatatgtaagtgaataggcattaccaaatttggcctgtgagccatagtttgatggcacatggaatataggaaacaatgtttttcttttcaaaatattggaaacaaataataaaggaaagtcattcctttgacatgggaaacaaatgaactgagtttttaaaaattgttatttcctcagcttattatcttttccagaccataatgaaagggtggagaatccatgttgaaa

SEQ ID NO: 623667 - DNA, 568 bp, Homo sapiens
taggctcctgaattggtagtggttacttatagacattaaaatatacatggactttttttctttttaatatttacagagattgatactatctatattaagaattaagatagtcaaaggagttgtcaataaaaaaattattcttctgggcaagaggtagtaacagggttgaaacctactttactgtctggaaaaaaaagtaaaaataatacatcaagacttagaagatgttttctgtaaaggggcaaatataacatatttcagctttgagggatattcactttctgttgcaactatttgactatttgactctgctattatatctcaaaatcagtcacagactatatgtaagtgaataggcattaccaaatttggcctgtgagccatagtttgatggcacatggaatataggaaacaatgtttttcwtttcaaaatattggaaacaaataataaaggaaagtcattcctttgacatgggaaacaaatgaactgagtttttaaaaattgttatttcctcagcttattatcttttccagaccataatgaaagggtggagaatccatgttgaaa

SEQ ID NO: 623668 - DNA, 568 bp, Homo sapiens
taggctcctgaattggtagtggttacttatagacattaaaatatacatggactttttttctttttaatatttacagagattgatactatctatattaagaattaagatagtcaaaggagttgtcaataaaaaaattattcttctgggcaagaggtagtaacagggttgaaacctactttactgtctggaaaaaaaagtaaaaataatacatcaagacttagaagatgttttctgtaaaggggcaaatataacatatttcagctttgagggatattcactttctgttgcaactatttgactatttgactctgctattatatctcaaaatcagtcacagactatatgtaagtgaataggcattaccaaatttggcctgtgagccatagtttgatggcacatggaatataggaaacaatgtttttcttttcaaaatattggaaacaaataataaagraaagtcattcctttgacatgggaaacaaatgaactgagtttttaaaaattgttatttcctcagcttattatcttttccagaccataatgaaagggtggagaatccatgttgaaa

SEQ ID NO: 623669 - DNA, 373 bp, Homo sapiens
ttgcagcctgactatgaagtaggaaaaaaaaaacaaaacatttttctgggaaaaaaattaaagsaggctgcagaaatttgtgtaaccaggagctgaatgttaattactgagaaaatgggaaaaatgtctccaagacatgtcagagaccttcacagcagcccctcccatcacaggctcagaggcctagaagaaacaaatggtttcctggaccaggcccaggtccccactgctctgtgcagcctcaggacattgtgccctgtgttcagctccttcagcttcaacagtgactaaaatgggtcaatgcacagctcaggccactgcttcagagggtgcaagccccaacccttggcagcttatatttgatgttgggcct

SEQ ID NO: 623670 - DNA, 492 bp, Homo sapiens
tcatttttttgaaatatatayactcatgagactgatgagtcagtaaggggaaggtaattttgtagcctaaaaggaatcataacctcttccagtttattcaatttcttgtggataaatattttttcataatttatctctggacttttaaattttttttctaggttcaaataaaatttgtataagctcaggtccttatgagagagacatttgctactgcacactattttttccaatcttcactcaatgagctgaattgctttatctattagtaccttgagtacctggggtatccttcagttcatctgcagataggtgttcacatacagataactcacagtatcttctctcacatgatcattttctacccatagaccccattctgactctgtatcacctcaagttttcaaaggcagtgttgatgatctgaaagaagtcacctcctctatgtgaaccaaattattgcttctcaagtaatagacaaggaaacagcag

SEQ ID NO: 623671 - DNA, 492 bp, Homo sapiens
tcatttttttgaaatatatatactcatgagactgatgagtcagtaaggggaaggtaattttgtagcctaaaaggaatcataacctcttccagtttattcaatttcttgtggataaatattttttcataatttatctctggacttttaaattttttttctaggttcaaataaaatttgtataagctcaggtccttatgagagagacatttgctactgcacactattttttycaatcttcactcaatgagctgaattgctttatctattagtaccttgagtacctggggtatccttcagttcatctgcagataggtgttcacatacagataactcacagtatcttctctcacatgatcattttctacccatagaccccattctgactctgtatcacctcaagttttcaaaggcagtgttgatgatctgaaagaagtcacctcctctatgtgaaccaaattattgcttctcaagtaatagacaaggaaacagcag

SEQ ID NO: 623672 - DNA, 506 bp, Homo sapiens
ggaaggtaattttgtagcctaaaaggaatcataacctcttccagtttattcaatttcttgtggataaatattttttcataatttatctctggacttttaaattttttttctaggttcaaataaaatttgtataagctcaggtccttatgagagagacatttgctactgcacactattttttccaatcttcactcaatgagctgaattgctttatctattagtaccttgagtacctggrgtatccttcagttcatctgcagataggtgttcacatacagataactcacagtatcttctctcacatgatcattttctacccatagaccccattctgactctgtatcacctcaagttttcaaaggcagtgttgatgatctgaaagaagtcacctcctctatgtgaaccaaattattgcttctcaagtaatagacaaggaaacagcagtattagaccctagataattaaacagagaacattggaattacatgactgtaaattaattatac

SEQ ID NO: 623673 - DNA, 506 bp, Homo sapiens
ggaaggtaattttgtagcctaaaaggaatcataacctcttccagtttattcaatttcttgtggataaatattttttcataatttatctctggacttttaaattttttttctaggttcaaataaaatttgtataagctcaggtccttatgagagagacatttgctactgcacactattttttccaatcttcactcaatgagctgaattgctttatctattagtaccttgagtacctggggtatccttcagttcatctgcagataggtgttcacatacagrtaactcacagtatcttctctcacatgatcattttctacccatagaccccattctgactctgtatcacctcaagttttcaaaggcagtgttgatgatctgaaagaagtcacctcctctatgtgaaccaaattattgcttctcaagtaatagacaaggaaacagcagtattagaccctagataattaaacagagaacattggaattacatgactgtaaattaattatac

SEQ ID NO: 623674 - DNA, 573 bp, Homo sapiens
agcttcaggtttaaaatagacctttctatttgaagcaaatagggtttcaaacactcatactggattttcttttctttttatttttgcatcaggtggcattttaaaattataaagatataccacaaatctagaattgtctttttaatattatttttatctcattcagaaaaacaaaacaaaacmagcaatacatattaccccgtgaaatgttagcctcaggaggcttcaaaaaagtcacacattgtttaaatgtaatctgtaatctgtcgagaattttcctagttgaggtcagaggttagaaatccaaatagttaagcagtaagcagtagtgaattttctaagatcttgtttaaatatattgtaatatatggtagtttaaaaatgtatttgaaagcaataaaaataacattctaatattattatactgaacagattattattctattttgtgtgtgtatatgtgtgggtattttactgtcctgaaaaagcccttagcttgtttagacccaaattaatccttttagatttgaattatgttgttaggaaaatatgtcttctgaatttagtctgtaa

SEQ ID NO: 623675 - DNA, 572 bp, Homo sapiens
agttacaaaccatagctcagtttcctcatctgtaaaaaatattagtattaaaataaataataaaacctaaattgactgggcatgatggtgcacacctgtagtcccagctatttgggaggctgaggtaggattgcttgatcccagggattcaagtctgttctgtgccatgatcacacctgtgaatagctactgtacttcagcctgagcaacatagtaagactctgtctctaaaaaaataagtaaatgactcagctacagctagcatataagccctcagtctatgttagctattatmatatttaatactattattaaaaatattattgaggaacatgaagtttatcagcctttattatctttcatctctggagtgttagctgagaataattaatgattcaggtttgttcccaagagatgcttttcctcttcttggtagatttacaagtggtttaaatcaaagtcatactccagcttcatttttcttctagtaaaatttaaaatcctcttgttctgatgaaatatttcatgttaaagcgatatcttatatttcagctaaatagttctctaaatgt

SEQ ID NO: 623676 - DNA, 589 bp, Homo sapiens
ggggcactgctataaagataacccgaaagtatggaagtgactttggaaytgagtaacagacagaggttggaacaatttgaagggctcagaaaaagacagaaagttgtaggaaattttggagcttcctagagacttgttaaatggtttgaccaaaatgctgatagtgatatgaacaatgaagtctaggttaaggtggtgtcagatggaaatgagaaacatattgggaactgaagcaaaagtcactcttactatgctttagcaaagagacaggtgacattttgcctctgccctagagatccggtggaattttgaacttgaaatagatgatttagggtatctagcagaagaagtttctaagcatcaaagcattcaagaggtaatttggctgattcggaaagtgttcagtcatatgcattcacaaagagatgatttgaaattggaacttgtgtttaaaagggaagaagaacataaatgtgtggaaaattttcagcctaagcatgtggtagaaaagaaaaccaattttctggggaagaattcaaaccagctgcagaaatttgcataagcaacaaggagccaagccaaatattaa

SEQ ID NO: 623677 - DNA, 589 bp, Homo sapiens
ggggcactgctataaagataacccgaaagtatggaagtgactttggaattgagtaacagacagaggttggaacaatttgaagggctcagaaaaagacagaaagttgtaggaaattttggagcttcctagagacttgttaaatggtttgaccaaaatgctgatagtgatatgaacaatgaagtctaggttaaggtggtgtcagatggaaatgagaaacatattgggaactgaagcaaaagtcactcttactatgctttagcaaagagacaggtgacattttgccyctgccctagagatccggtggaattttgaacttgaaatagatgatttagggtatctagcagaagaagtttctaagcatcaaagcattcaagaggtaatttggctgattcggaaagtgttcagtcatatgcattcacaaagagatgatttgaaattggaacttgtgtttaaaagggaagaagaacataaatgtgtggaaaattttcagcctaagcatgtggtagaaaagaaaaccaattttctggggaagaattcaaaccagctgcagaaatttgcataagcaacaaggagccaagccaaatattaa

SEQ ID NO: 623678 - DNA, 589 bp, Homo sapiens
ggggcactgctataaagataacccgaaagtatggaagtgactttggaattgagtaacagacagaggttggaacaatttgaagggctcagaaaaagacagaaagttgtaggaaattttggagcttcctagagacttgttaaatggtttgaccaaaatgctgatagtgatatgaacaatgaagtctaggttaaggtggtgtcagatggaaatgagaaacatattgggaactgaagcaaaagtcactcttactatgctttagcaaagagacaggtgacattttgcctctgccctagagatccggtggaattttgaacttgaaatagatgatttagggtatctagcagaagaagtttctaagcatcaaagcattcaagaggtaatttggctgattcggaaagtgttcagtcatatgcattcacaaagagatgatttgaaattggaacttgtgtttaaaagggaagaagaacataaatgtgtggaaaattttcagcctaagcatgtggtagaaaagaaaaccmattttctggggaagaattcaaaccagctgcagaaatttgcataagcaacaaggagccaagccaaatattaa

SEQ ID NO: 623679 - DNA, 553 bp, Homo sapiens
atataatctatattgttattgttgttaatattttaaagacaatttgaatttgaagcaatcagtgtatttctaccaaaaaatagtaaaaacttgcattgctttgcaaagtttatggaaatggtccaccatcaaatgatttagatcttgtcctaagttcattaaataacaaagtataatgaaaaatagggccatgcttgtaaccccagcactttggaaggctgaggtagaaggaytgcttgagaccagccagggcaaacatgtaactgggcaaacacgtcaagaccctatctctacaaaaataaaataaagattggctgggcatggtggggtgcacctgtggtaccagctactcaggagactgaggtagaaggattgcttgagtacaggaggttgaggttgcagttcatatcactgcactccagctggggcaacagagtgacaccttgtgtcaaaagacagatggaaggaaggaaagaagaaaggaaggaaggacaaaaggaaggaaggaaggaggaaggaaggaaggaaaaaaggaaggaaggaaaaaaggaaa

SEQ ID NO: 623680 - DNA, 564 bp, Homo sapiens
gtaattttacaatcctctagtgatagaattaattaaatatgccaccaaattgattaattcctacagtgttaaaagagaagcactaacaatgccagtgaccatgtaacatggatttaagctacaagtcatagaaatgtgatgagaagcctcagcactgtaaaaccgagggtggaggaaagctttttctctctcaaatgagctttgcgaggtatacttcttgaaggataggaagttgaagtgttcaggacttttatgtctattctactttggcttagtttacatgattcttagtttattagcctagaaatggccaagaaaacttaaggctcaatatttagttataaatatgaaatatccccaatttttaagataraaacaacttataaatgtatttgtctgtaaaaattgtgtatatttttacagaacatctatttctttcctttattttttaattttttttatactttaaattctagggtacacatgaacaatgtgcaggtttgttgcatatgtatacgtgtgccatgttggtgtgctgcacccattaactcatcatttatgtta

SEQ ID NO: 623681 - DNA, 471 bp, Homo sapiens
ttaaattgctgataagattttaatttgctccaagttgaaaataactatatygcttgtgttttaaggtacataatgagcaattatatcacacatgatagattcagcagtaaaatattatctgttaacagctggaactcataaaagcatagcacaatgtgaagatggaatttgctaaaataaaccatctgctggaaaaatactattctgcaaatttagaaataaagtttaaatgttatttgtcttatttaataggtctgtgaaaaaatgcgatatttgaaaagtaggtgctaccttaattagttctttatactagacagctggttacagtaatgcacagtaaggtgctacatacaaatattgctaaattttctgcatatactatgtatttagcttaaattatttgaaattttacagttaaagtaacaaatgtatatttaaatgttttgacacaaattgcaaatatacctttaa

SEQ ID NO: 623682 - DNA, 477 bp, Homo sapiens
aagttgaaaataactatattgcttgtgttttaaggtacataatgagcaattatatcacacatgatagattcagcagtaaaatattatctgttaacagctggaactcataaaagcatagcacaatgtgaagatggaatttgctaaaataaaccatctgctggaaaaatactattctgcaaatttagaaataaagtttaaatgttatttgtcttatttaataggtctgtgaaaaaatgcgatatttgaaaagtaggtgctaccttaattagttctttataytagacagctggttacagtaatgcacagtaaggtgctacatacaaatattgctaaattttctgcatatactatgtatttagcttaaattatttgaaattttacagttaaagtaacaaatgtatatttaaatgttttgacacaaattgcaaatatacctttaaaaagcgtcttacactctaaatattatttttcacatat

SEQ ID NO: 623683 - DNA, 622 bp, Homo sapiens
agttgaagcttgtcatctgttcttaatttttttaataaaaatataatatttagattcagagtaaatctaaagtgagacctgaagctgctcccaggtgatactgatgctgcttatttttgcccagatttttagtcacaaggttctaaattatcgttttgaagtcctacatgagtaatcacttggggagctcaattaacacccagcaacagactaattattaataaaccagaatcttcagtattaggcttcaatcattggcaattttttttttttgacacacagtctcccactgtcgcccaggctgaagtcctgaggccagaatgagactaggacatggttcctttgcctaagtaaactgaggcagaaaatggaatacttcagacttcaaattagtatggtaagtsctatgaagagtatgattagagttcattatttacccagaaaagggtcactcagcccagcctgggagttagagaaggtttcctgaagtcttgacatgtgagtcgtgaaaggacataaggagttaaccacgtgacaaaataagctaagagaattctcaacaaaagacaaaatattggcaaaggcttttaggcatatactagcttagtattattgggagaat

SEQ ID NO: 623684 - DNA, 553 bp, Homo sapiens
gatttcagaaatagtaaggaaatgtattagcaggacttgattagtgattgacttggggaaggaggggaagatagagttcaggatgactccgagactgtctggtgtcggtggctaataactgaagctattatatagaggtaggaaatgcagaccaaaagcaggcccggggtgagagatgataaatttgaattttaacatgttgagtttggacatccaggatgaaataatcacaaaacatttaaatatacgaatctgaaaaggtaagcatcataagcatatgagctattggtaaaattctgatacttaatgaagtctcrcagggaggcagtacagaggcaagcaatgggctggggataaaacatagggaaatattatttaaataaagatgaaagaaaaggagcccacaaaggaagctgaaaaggcatagtcaaaaaaagaggcttgccaaatgccacctttgaagctctgctgttacactttataaggaaacttttggttacctgggattgcatgcatttataaaagtttctattattaggaagacaataataat

SEQ ID NO: 623685 - DNA, 446 bp, Homo sapiens
gacagcatgagaggaaacagggacaaaagaactgcaagatagacagaaaaattgcaatagtatagtccttcactattactatttgttttaaatgtaaatggattaaactctataattaaaagacatagggttgctgaatggataaaacacaagatccaactacatgctgcctgcaagactctcactttagccttaaggagacgcaatgactaaaagtgaggggatggaaaagatagcccataaaataataaccaaaatagagmagaggtggctgtatttatagcagacaaaatagactttaagtcaaaaattgtcccaaaagaccaaaaagaacactgtataatgataaaggtgtcaattcaccaggaaggtatgacagttatatatgccctcatcatcaaagcacctaaatatataaagcaagtattgaagaactaaaggaagaa

SEQ ID NO: 623686 - DNA, 326 bp, Homo sapiens
gcatggaccctgagtcttctggtgcatgaggcaacaggagctagcctggcataggcagacctagagactgtatccacaggtgtccgtcaggtgttcgaggccacgggtgccaatctggtgctggtgtggtcctgaagcctaaagctggatggggctggcttggtgcygggtgggcctgaatcctgtatctgcagaggctggcctgatgactgggcagtcagcttggtgatgtgtgcagtctggagtctggggtcaccaaatctgacatggcttttggccaaacctggatcctgattcaatgggggttggctttgcactagggcagg

SEQ ID NO: 623687 - DNA, 566 bp, Homo sapiens
gggttctttgttaagaatgattgtagagctcctggagattcagcatacataaggctcaattacactaaaatgtgcacacacacatacacacagatacacatacacttgcagaaacacacaattcttcctgagctcctacaatgtgtgaaaccctctgattctgtgggtgatttataaataaaaacatacaggatccccctttccttaaatagcttatactgtagtcctttggaaaggtatatatttaaataaatttaacataagattgactatgtaaatctttatacggggcggggagggggggggcggtaaaatttaggtgctgtgggatcgtaagagaaagagagagaaatttccactgaggtctctgaagatagctatgtgacttaggtgggattctaggaatgcttaaaggatgagtrtgcttttgaaacataaatgtctttgaagggagggaggattatgtgggacagaccaagcagaaagaataacttgaacatataaaaatccatggtgaagtttagattcactttggaaatactaaggaggataatattgccaagttt

SEQ ID NO: 623688 - DNA, 555 bp, Homo sapiens
ttagatccactggaattgactccaaaatgtcatttaattttcctttcactcagttttattggtagctgtcaaatccagagaagtcctgtgcattgaaaagagagttcaagcactgcctatgatgtcacagctagttctgctttggccctttcctttgttaggggtgctagggaaacttatatggaaggatcactaaagccagagatatagtccttagctctcatggtatgaaacagactgggaagtgaatcaagagttgtgcatcgtgaccttgtcctgaggtaggcaccatctgttatggacaatggaacctcagcctactcaaaatgattaaagattctttttatgttttcttagcaaaaattacatcagcaaaytacatcctgtctgtctggactgcatatagttgcttggattgggaaactgcacttttcttgtctgactcatggtatttaaacttcctactatcagccataaaaggccatggactggtagggttagatcacgatttaactcttaggtcagtctcttactattaggccttgagcaagttgc

SEQ ID NO: 623689 - DNA, 410 bp, Homo sapiens
tgaaattgagatatttccctactgattccctaagattctctgggataatatacgtttttacttaaaatcttaattcagcaggttcaacctaattttatgactaaaagtcatgtttattgcacttaaaatttgctgtgagcacataaagaaatttaattataataataaagtaagctacatttgtattcccacacattgaaataaatacattattcactgatakctatgaatctataatttataaattattatttgaaatacatacatttggatctaagtattgtatatgaacaaatatatatgaaatgccttttaaataaaatgtatttgtatttcataatgaagttattttattgtacataagtataattcctagtgtacatcttttattcatttaagttgtaattact

SEQ ID NO: 623690 - DNA, 420 bp, Homo sapiens
atcaaaaacctctagtggttttcttctctatgaatcatttctcaatttttatgattaactctcaaggccctacctcttatgaccaaacatttttatccagtgttcctcactttggtgaaattggtgagcttactttgtatatctcagaagttctgaaacctggatcaccaagagtcractatagatcttttaaaaaagtaggccccaactccagaaattaggactcagagggtaggttaggagagagctgtcgggaagatgagaatttcaaaattataaaatatccacatctaattttgtggtatcaggtttgtaattctaaactctgtatctacctgccagaccttcagtgcttcctatctcaagtaggagttaggagaaaaacaatcaggttaaactgattcattcgtgtgatgaatc

SEQ ID NO: 623691 - DNA, 575 bp, Homo sapiens
cgttcatcatctttgtcatattccattgattagaagcatgtcacaggttccacatgttctcaaggggaggagcaatgcaagagtgtgaatttcaggaggtgggggttattggagaccattttagagactgtctaccacatacactgtgattgctttttcttttgaaatggttttagacacatgaaaaagtgkcaaaaatagcacagagtccacatgtgcccttcccttactgttaaattgtacgtacttttcctttgtgacacagctttgtgttttctttgaagtgaaaccaagcttgatatttcattttctttgttttctatatacgtgttgctaataaaactctcaattctttcatctaaatctcttcttaagacatgtagggacttcaggtgttctagcaatttcatctccctgaagaggtctcccctggagccttctgacctgttccgtctgggcgagctgaactccatgccctctgcacagctgtcatcttgggatttctcctttttgccatcttggggctcctcactgtctcctgtttcttactcttgctgttttcctctttcttaatt

SEQ ID NO: 623692 - DNA, 479 bp, Homo sapiens
tgatgtgtttcagtccactaaagtcattattctttgggatgctcaaattgtctcattgttggccagtagaagcctgggcccttttgccatgacctcagttgtctttaatagctgtccggcttgtatgacaagacattcttggatccccttgtacagctcctgacaccaatytggttcagctatttcttcaagaaggcctggttccttgtacattcttattcacctgtggtttcaattccctagtctctaaaagaaacactacaaatagaaattctgttctgatttttctcctgtacagcggacctgtatacctaacagatgactgggcattgccatctctgcccacaacacacatcctgaatttgacttgtttgcacatgaagtcatcatccctccccaagatgggctctctattatgccttccttggggatcagtacttggagtcgggtcagggcaagatactgttagtgacatgtgg

SEQ ID NO: 623693 - DNA, 504 bp, Homo sapiens
ctagaaataagaaaggttaatgcatacatagagtagaatagaatatagtaaatgataagtgctgttaagaaagatatgaatcaacatcaatagaagatcacaagagaaagtgattcttttcatgaagtaaaatcaagaaagacttcctagagagagtaggatttgaacaagtcttgaagaacagatataatttagttatggaaactgaattaaaaaaaagaccatccacaaatagaaaaaaatgtggcatgrataaattttaaaaatgacttgtacactaaagaattttatattaattctgtagaatataattttcaaaactattttctggaacatcagtacctgttgagatgtaaatggatattccattagaaataaagattctttagaagaataaaatttgtgaaagaatgagtatcctataaatcaagagatccatagggttagtactcatgaagtagagactgttattacaattatgaatattactactacgactactac

SEQ ID NO: 623694 - DNA, 596 bp, Homo sapiens
gaaccaaactcaaatctagataccaaggtttgaatctgggctacagccattactagtcatgtgaatttggtttttctgtttaaatgctttctgccatggtttattctgttgtaaataaggatgatgataatacataccttataggtgagtattatattaataagaaaaaatcagttaggacagtcatggcctattttaagtgacaaataaatgttggcaaatgtcaaaaatgtgaatgtttagtatacacagatagctgtgaaactacatattccttagactgaaattgccaacagcataaagygttctcttaatattcatagttttatttattgtaaacacatcctagtaatattatctttagttagttttacctgtttatagatgaattagaaactcctatgtacgtttctgaaaaatcaatgaatacttaccaagttgttttaagtgtgtgccattttaaggtctaattatatgaattatactgactagtataaatgtgggcgtctgttcctgtcttctcataacatattaagcacttttaatttaaatctagcagtttgcaattaatttagctgttatcttttcatttagaa

SEQ ID NO: 623695 - DNA, 604 bp, Homo sapiens
aaaagctctgtttgggtcaaactgtgtctaaatttctcatccatgacgagtggggtctgaaacggaatatcctctaagggctttccaactccaacaatacatgagttttgaaagaatcctacatgtttactgagtggcatttgaaccacacactcaaggtatgagttctgctttgrgtctgcacttggatcctgctttaggtcaagaatgactctctcagagaggatgctgtggtgtgcccctcagatacccacttccaacccctttcgggactgggtcacttatttcctcattcgctcagagtgttgacaactcacagctggtagctgaggccctctctggagattgccctcagctgttgaacacaactagtaaagacagggtgtataaatatctagcccccttgccccagtgtgggatggctatgagccatctcagctccacaggaccagtgggattggttcaggcttttgatgtgactacatcacagcttaacttctcctgttgccccatcatgctcccttcccttcccctgggagttaattttaaaagcactccccgataaacctcttttttgttgttgttgttgttgttgttttttttt

SEQ ID NO: 623696 - DNA, 643 bp, Homo sapiens
ttaatgttcaatgttattagtaaccttaagaattgccaattaaaataacacactattttaacccatcgcagagtaagcactttcatacactgcttgcagggctgttcattgatataaattctctcccctcccccattattatgtattttccaaaattttactgaaaacatcctttcaagaaatctctattgwactcctgaatcaccaagccaaacttgttatctagctccctagcacccactactcatgccccctccccacccacaaacatagattagctctgcattcctgccttggtgtgttgcggggtgaagaagagtcaggaagccttacgctggcataatctgtgtctcagacaatatgaccacatgccaatttagtgtggagtagaagaaatggccaggatttaaagcctggagaccagaactgggtgggcttgggaaagtcacttaacctctctagatcctcaattctttattttttttcaattcaatttagaaatctttgtaattttcagacatacacaaaagagaataatagcaaaatgaatctccaggcacctcacctagcttcaactgttaccattttgccagtttctcctcatctaatcccctatacttttttctttgctagaatgttttaa

SEQ ID NO: 623697 - DNA, 404 bp, Homo sapiens
gttattgctaaaatgaggattcctaggccccaccctcaacctattgaaaccgaaactcaggagtctgcattttaacaaacccaagtggttatttagtatattctagtggttgaaatgaactgaaaatcttaatttagatcagaaattttatctagtycttccctagaatgaattaatttttaagatttgttaacccagtttaacaaaataattcttctctgttcccctttctaggtgaagcagactgtggtgaatttagcaacacttatgaagtttcttaaagtggctcatacacacttaaaaggcttaatgtttctctggaaagcgtcccagaatattagccagttttctgtcacatgctggtttgtttgcttgcttgtttacttgcttgtttaccaatagag

SEQ ID NO: 623698 - DNA, 574 bp, Homo sapiens
tcacatcttgcttgtgggagtggaacttggtttagcctttctgggaatcaatttggaagtcttaagagcattaaaaatgttcatactctttgacccagaaatattccttctgggaatttttcccacaaaattagaaaaattttccctataaaaatagaaaatcagacaaatatgtatgtacaaaaacacatttgttaaaactttatctagacagtgaaaacatatcatcaacttatatattcaacaataggagaatggttaaaatgtaagaatttttatgtaagttcatgtatgtaagaataacgatatgagacaatacttgtatgtgtgatgtattagttttataactatatgtgcacagaaaaaaatagaagaaacacatcaaaaggttaatasagattttctctgaataagagacaagaattactgagattttgattttcttcatgtaatttttttttttttttttgagacagggtctcactgtgtggcccaggctggagtgcagtggagcaatcttggctcactgcaatctccaccccctgggctcaagtgatcctcccacctcagcctc

SEQ ID NO: 623699 - DNA, 559 bp, Homo sapiens
aagtgctgggattaaaggcatgagcctgtaaagcccagccaaatccaggacttctgattccatgtctaatgcaggtaccaccacaactccatcaatgaaagattgatttattcacaagcatctactgaacaccatctatagttataataaaaataaataaggagaaaaataatttcagtaygccactatttttatacaggttgcacctgttatccacaaatactagaaaaccctggagaatatatgttgttactctcatcttacaggtgaggaaactaagattcattcagaactaatctgtctctctcctgcacccattacaacatattgccttagccatgaactatacttagtgtgataataacatagaacaaccaccacccctgccctcaggaaacctcaatagagttgtgaaggtggctaagatataacagcaaattgataattagcaatatgaggtaatatgtcatcagcaccagataagtggtataaaaaaaaatgagttggctgggcatggtggctcatgcctgtaatcccagcactctgggaggccaaggta

SEQ ID NO: 623700 - DNA, 422 bp, Homo sapiens
caatataaggagaacttttctaaagaagaattttccttttccaagcagaaaagtaaaggagtggtattttggcagaagggagagtttytgacagtgagtactcctgaagaacttcaggaacggtaggggatgggacataggtaggtgatgaagctagaaagagctctgaatactatgctatggggtatggacttgattttttaagatcaaagattttgagccaagggattaacgtaattagatctgagatttagaaagatcactctaacaatggtgtagagaatggactggaaggagaagagataggaggcaggaaggctggttagaagatctttgcagtagtacaggtcagactaaataagaatctgagctagagtggtaacaacaggcatagagtaagaacagattcattgaggtattta

SEQ ID NO: 623701 - DNA, 620 bp, Homo sapiens
ttgagcaatgtctttgagcatcttactctccacctcaatcagcttatcaaagtattccttctgaccacatacagcagttctccctatgagttctggaagatgttgtctcagctcatgagtgagtgggaggataaatgaatagatgaatggataaatgagtgaatgaataaatgasgttctgaacatttaacactggaaatcttagacattattgagagaaatctgccatatccacatcaaagctctgtgtgtttgtgactaagaaacattgacacagtatttgatccactcctcctatgcccttgcctctgcttcctgagctcctcagagccaactccaaagaatagacctcccactgatctgtaggttcagtccctaaatcctgtcctgcaggatttggaattaagccactcttcctggtctagaagcccaggcaggatttctgagcgcctgcactgccatcaggcctgagctctcctcagtctccctaaactatgccctgttattctgtgagagtgtcgagtcttccatctctgcctggagcctagccctgtgcccaagctctccaagagtcttgtcacccaactgaatcccaactaattagaaattctggtatatac

SEQ ID NO: 623702 - DNA, 620 bp, Homo sapiens
ttgagcaatgtctttgagcatcttactctccacctcaatcagcttatcaaagtattccttctgaccacatacagcagttctccctatgagttctggaagatgttgtctcagctcatgagtgagtgggaggataaatgaatagatgaatggataaatgagtgaatgaataaatgaggttctgaacatttaacactggaaatcttagacattattgagagaaatctgccatatccacatcaaagctctgtgtgtttgtgactaagaaacattgacrcagtatttgatccactcctcctatgcccttgcctctgcttcctgagctcctcagagccaactccaaagaatagacctcccactgatctgtaggttcagtccctaaatcctgtcctgcaggatttggaattaagccactcttcctggtctagaagcccaggcaggatttctgagcgcctgcactgccatcaggcctgagctctcctcagtctccctaaactatgccctgttattctgtgagagtgtcgagtcttccatctctgcctggagcctagccctgtgcccaagctctccaagagtcttgtcacccaactgaatcccaactaattagaaattctggtatatac

SEQ ID NO: 623703 - DNA, 620 bp, Homo sapiens
ttgagcaatgtctttgagcatcttactctccacctcaatcagcttatcaaagtattccttctgaccacatacagcagttctccctatgagttctggaagatgttgtctcagctcatgagtgagtgggaggataaatgaatagatgaatggataaatgagtgaatgaataaatgaggttctgaacatttaacactggaaatcttagacattattgagagaaatctgccatatccacatcaaagctctgtgtgtttgtgactaagaaacattgacacagtatttgatccactcctcctatgcccttgcctctgcttcctgagctcctcagagccaactccaaagaatagacctcccactgatctgtagsttcagtccctaaatcctgtcctgcaggatttggaattaagccactcttcctggtctagaagcccaggcaggatttctgagcgcctgcactgccatcaggcctgagctctcctcagtctccctaaactatgccctgttattctgtgagagtgtcgagtcttccatctctgcctggagcctagccctgtgcccaagctctccaagagtcttgtcacccaactgaatcccaactaattagaaattctggtatatac

SEQ ID NO: 623704 - DNA, 549 bp, Homo sapiens
agcctggtcaacatggcgaaatcctgtctctactaaaaatacaaaaattagccaggcatggtggcagatgcctataatcccagttactcaggaggctgaggcaggagaatcacttgaacccaggaggcggaggctgcagtgagtcaagatcacaccactgcactccagcctgggtgacagagcaagactccatctcaaaataataacaacaacaacaacaacaacaacaacaacamcacaatggcctctaagtgttcaagtgaaaggatgagttacacatctcttgctttaaatcaaaagctagaaataattaagcttagtgaggaaggcatgccaagaactgagatgggccgaaagctaggcctcttgtaccaaacgttagccaaattgtaaatgcaaatgtaaatttattgaaggaaattaagagtgctactcttgcgaacacataagtgataagaaagcaaaacaaccttattggcaatatgtagaaagttttagtggtttctggatagaagatcaaactagccacaatctttccttaagccaaag

SEQ ID NO: 623705 - DNA, 570 bp, Homo sapiens
ttactggctttcctctcagcaccactgtggacaccagtccagtctgatcatctgatacatatgagatctcatttgatcacaagaggaggtcttgtcatcctcattatacacttgaggaaactgaggcccagagggtaaagrgttgtactttattaaagttgacaaatggactaagtgggccctgaatgcaggcttttgggactcattcccttgcctgggatcttcctactggaccctacttctgcatataaaaagtgacacctaacctcagtcaacaattaaatgctgtactagagccatcccaggacatcccagcctcctctgtgcctggctgaacccttcaggttcttcagctagaacatggggaggaagagataaggaaggtaagagagaagagaaagggaagatagagaaaattggtggcaattctgaggttggaccctgtgttcaggctgccacgaggtgccattttgtgaggagagaatatgtcctctcaggataccggcctcccccaccggtgtgttgccgtgtcaactgattgagcccaaaggctggcttggaaatttacca

SEQ ID NO: 623706 - DNA, 573 bp, Homo sapiens
ttccaatttccatttctggtagtatgtcagttttgttcccctttgtactaaagctttgcgaaaaaaaaagtctcctctttctctatactgcctttaatttctcttcttcttctcttgagccatcagaattagactttcaggccaagtgtgatggctcatacctataatctaagcactttgggaggccaaggtgggcagattacttgaggttaggagtttgaggccagcctggctaacacagtgaaagcccatctctacaaaaaaacacaaaaattagctaggcatggtggcgtatgcctattcctagctacttgggaggctgaggcaggagaatctcttgaacccaggaggcgaaggttgcagtgagccaagatygcaccattgcacttcagcctgggtgacaaagcaagactctgtctcaaaaaaaaaaaaaaaaattagtcattcagccccatcatgccaaccaaactgccatctctaatgtagagttcaggaagcagagcaacatccagaaaaagaagctgaaaagggcatgccaatgtgataggaggaaaaccagaataatgtgctgcc

SEQ ID NO: 623707 - DNA, 563 bp, Homo sapiens
gtggttctcaaaatctagttgggggatggagctgactgggatcaggagacaaagccagagcttacacacatacaatgcgatccacacagggctatgcccagagcaaagataaatggtggggaggtgggaagctgcctttactgcctatcctccacaaattccccaatgcttcacaccacatggatcagtaagaaaagtggataatctgagaccttagcattgggtgagtcacagcttgttcctttcataagtctgcaacctaattacyattacctgtatggtctgaaaagcctcaagctaagaacttggcttaaggctgcatttttggggttagattagctttactaaataaaccctggaggccaggagtttgagaccagactgagcaacatagtgagaacctatctctaaaaacaagcaaacaaacagccagatgcagtggtatactcctgtagtcccagctacttgggatgctgaagcaggaatattgcttgagccccaaaatttgaggttgcagcaatctatgattgggccactgcactccagcctgggtcacagagtga

SEQ ID NO: 623708 - DNA, 563 bp, Homo sapiens
gtggttctcaaaatctagttgggggatggagctgactgggatcaggagacaaagccagagcttacacacatacaatgcgatccacacagggctatgcccagagcaaagataaatggtggggaggtgggaagctgcctttactgcctatcctccacaaattccccaatgcttcacaccacatggatcagtaagaaaagtggataatctgagaccttagcattgggtgagtcacagcttgttcctttcataagtctgcaacctaattaccattacctgtatggtctgaaaagcctcaagctaagaacttggcttaaggctgcatttttggggttagattagctttactaaataaaccctggaggccaggagtttgagaccagactgagcaacatagtgagaacctatctctaaaaacaarcaaacaaacagccagatgcagtggtatactcctgtagtcccagctacttgggatgctgaagcaggaatattgcttgagccccaaaatttgaggttgcagcaatctatgattgggccactgcactccagcctgggtcacagagtga

SEQ ID NO: 623709 - DNA, 354 bp, Homo sapiens
atgagggtcttttgactcacaatcagattagagtcctgccttgggcaggtgaaagaaagtcaggagaaggccagagtgagagattctgtttcctgaggcctaaagtgcctcaagagtatagaaagtactgtagaagttaggagccaggaactgtggataaaaaccaacatatatatcatgacaccacacaaatttaattcagttaaacaattcaattaaaaaatgcaaaaaattacttatcagattatcaatgattaraaagactaaaaataactactgttgatatggattctgagtgttgggttcttcttcactcctggaagtgtaaattggggtaacttttggaaattcagt

SEQ ID NO: 623710 - DNA, 606 bp, Homo sapiens
attgaatttgttgatgccttgatcttggacttctcagccttcagaactgtgaaaagtaaatttctgttgtttataagctacccagtttatgacattttgttrtagaagtccaaacgagctaggaccaccacattttgatggcaggatagtcaaacttacattttaagaagaacatgtgagatgagagatcttgttatagtcaatttgaaactacaatctgtcacatctttctaatatacatttgtaaaatcagatcatcatgaatgacctcatatgaacatctattcctagattatttgtagtctcaaggcctgtggagagacagacttatccaataacagagagcgcccaaatcaatgcttttggtctgtttcgtgtctacagtttctaaatgtcttgtctatatatcatactctttctgagtaaaaaattacacatgcatgctccaaatcactgcaggtatccttggataacacaagccttctaggatagtggtgcgagaccagatggagtcagtgtcttaattgggagtgctcttgaaagcagagcctgagacagggcttcggtacaagtagtttatcgggaagttctctcaaagatcaggag

SEQ ID NO: 623711 - DNA, 394 bp, Homo sapiens
tatatatgtcaagtttgtactgggatggttatccccttctgttaccagacatgtgacatgctaccaccctgcagcttggggccatgcatgcatgtctctggctccttttgcaggctgcttggaaatacagtacatgtcggtaataatgttaaatgacagcttcaaactatttcccttaggcctgtttgacccgtgsgttcaaggtaaaacaggaatggttccgcttaccttcaagacctgagcatcctcaccactggcaaatttaacttggaagcttggtgaggttccctggagatccaattacccttgttaggggacctattgaaacattaatgacatgtaaccacttcattcataaagttgggctcagctcatgcctagcattacctcccac

SEQ ID NO: 623712 - DNA, 597 bp, Homo sapiens
gcctttttaaactgctgttgctttaaagtttctcttgtctgatataagaatagctacccctgctcacttttggtgtccatttgcatggaatttctttttccacccctttaccttaagtttctgtgagttcttatgtgttagatgagtatcttcaaggcagcagatacttgggtggtgaattcttatcaattctgtatctttagagtggagcatttaggatatttacattcaatattcatattgagatatgagttactattccattcattgtgctatctgttgtctgaatacctttatttattgtatttttgttttgtaggtcctgtgagattcatggtttaaagaggytctgttttgatatttcttttcaggatttgtttcaagatttagagctccttttagcagttcttacagtgctggcttggtattggtgaattctcccagcatatgtttgtctgaaaaaaaattgtatctttccttcatttatgaagcttagtttcactggatacaaaattcttggatgataattgttttgtttaagaagtctgaaaacagggctgtgaggcaaaagcatgaggtaatccatcaaggaaaagc

SEQ ID NO: 623713 - DNA, 504 bp, Homo sapiens
caggcacggtggctcacacctgtaatcccagcactttgggaggctgaggcaggtggatcatgaggtcaggagatcgagaccatcctagccaacatggtgaaaccctgtctctgctaaaaatacaaaaattagccaggcatggtggcgtgtgcctgtagtcccagctactcaggaggctgaggcacaagaatcacttgaacccaggaggcggaggttgcagtgagccragatcatgccactgcactccagcctgggtgacagagcaacaccctgtctcaaaaaaaaaaaaaaatttgaagagaaaggaacattcccaaactcattttatgatgtcagcactacactataccaaagccagataagtatactgttggaaaagaaaacaatagacaagtatttctgatgaatattgatgcaaaaatctcaaaccaaattcaccagaaattcaacagacattaaaaaggattatacaccacaaacaagtgggattcatttctagaattc

SEQ ID NO: 623714 - DNA, 504 bp, Homo sapiens
caggcacggtggctcacacctgtaatcccagcactttgggaggctgaggcaggtggatcatgaggtcaggagatcgagaccatcctagccaacatggtgaaaccctgtctctgctaaaaatacaaaaattagccaggcatggtggcgtgtgcctgtagtcccagctactcaggaggctgaggcacaagaatcacttgaacccaggaggcggaggttgcagtgagccgagatcatgccactgcactccagcctgggtgacagagcaacaccctgtctcaaaaaaaaaaaaaaatttgaagagaaaggaacattcccaaactcattttatgatgtcagcactacactataccaaagccagataagtatactsttggaaaagaaaacaatagacaagtatttctgatgaatattgatgcaaaaatctcaaaccaaattcaccagaaattcaacagacattaaaaaggattatacaccacaaacaagtgggattcatttctagaattc

SEQ ID NO: 623715 - DNA, 504 bp, Homo sapiens
caggcacggtggctcacacctgtaatcccagcactttgggaggctgaggcaggtggatcatgaggtcaggagatcgagaccatcctagccaacatggtgaaaccctgtctctgctaaaaatacaaaaattagccaggcatggtggcgtgtgcctgtagtcccagctactcaggaggctgaggcacaagaatcacttgaacccaggaggcggaggttgcagtgagccgagatcatgccactgcactccagcctgggtgacagagcaacaccctgtctcaaaaaaaaaaaaaaatttgaagagaaaggaacattcccaaactcattttatgatgtcagcactacactataccaaagccagataagtatactgttggaaaagaaaacaatagacaagtattyctgatgaatattgatgcaaaaatctcaaaccaaattcaccagaaattcaacagacattaaaaaggattatacaccacaaacaagtgggattcatttctagaattc

SEQ ID NO: 623716 - DNA, 531 bp, Homo sapiens
aagcagcctgtcaggtttctaacaatgatttaaaaaaaaaacttgcctatcattgttatgtagtttttccagtgttgattagaaagcaatttcatttgcattttaagccattcagtttatatgaaatatgrttacatttatacaaaggacaaaacaagcacaattaatagatgctcttagaaatcagaatagttgttacctttctaaagggataagttggtgattgaaagagcaaaattgaatttcgctcgtatcattctctgttcccatctgaatgctggttagacaagttaagtttgtgcactattctgcatttattttggacatcaataagagttttaaaaaaataaccaggaaccactatgagatactacttcacacctactaggatggttaaacaataaaaggcaaacaagtgttggcaaggatacagagaaactggaatgcttatacattgtggtgggattgaaaatggtgcagttattttggaacagtttagtagtcactgtaaatgttaaacacagagttact

SEQ ID NO: 623717 - DNA, 531 bp, Homo sapiens
aagcagcctgtcaggtttctaacaatgatttaaaaaaaaaacttgcctatcattgttatgtagtttttccagtgttgattagaaagcaatttcatttgcattttaagccattcagtttatatgaaatatgattacatttatacaaaggacaaaacaagcacaattaatagatgctcttagaaatcagaatagttgttacctttctaaagggataagttggtgattgaaagagcaaaattgaatttygctcgtatcattctctgttcccatctgaatgctggttagacaagttaagtttgtgcactattctgcatttattttggacatcaataagagttttaaaaaaataaccaggaaccactatgagatactacttcacacctactaggatggttaaacaataaaaggcaaacaagtgttggcaaggatacagagaaactggaatgcttatacattgtggtgggattgaaaatggtgcagttattttggaacagtttagtagtcactgtaaatgttaaacacagagttact

SEQ ID NO: 623718 - DNA, 564 bp, Homo sapiens
aaccaataatcttcctttagttgaaagagttttaataaacttagagagccttaaaaaattgagagttggaatcttggctttagtttgtcagtgaaaagcaacaggttatcatctttgctacagtaaacacctattagaaaatgcctcttgaaaataccttattgctttagtgaaatataataatctctcgttatttacaaagtagaacaaaattaaagaacacaatgaaaaaggtaaaagatcaaagtcattatcatccagaaatagtcattgtgtacatttaattatatgacccagatgagtagatacatatagaaataaaaatagatgaaatatataatgcgtgtgtgtgtgtgtgtgtgtgtgtctgtgtgtgtagagagaagagaaagaaatggatggatggtggattaagctrtgagattttataaaagatactaattgtgatctttatcagtttaacaaaacccagatattactaattttgtcactttttaatttttttttattatactttaagttctagggtacatgtgcacagtgtgtaggtttgttacgtatata

SEQ ID NO: 623719 - DNA, 620 bp, Homo sapiens
ttttcaaatatacaatacttagttaattaatgatgtgtgttaacaccatgtagtacaatggatctcctgaacttattcctcctgtytagctgaaattttgtattctttgaccagaatctctccaattcaccctgtccttgcccctggccactggtaatcaccattctactctctgcttctgtgaatttgacacttttagattgtgtattgtttaaattttttttgatgattatgaggttgaaacctttctatgtttattaaccattgtaatgttctgtttaagacttttgctccatttcacattggcatgtctatctttttcttattcagacggaagagttcttttatattgtagctatagaccttgtttaatttgagatactttttcctgttctatagcttgacattttactttataaattgtctattgatcaaaagtttttaattttaatgtatttctttacatttaataataccccaaatcatgaagtttttcttctttgttatatgttagaaacttaattgctttctactccatatttcatctataatcaaaaccagaatttatttttatatgtgctgggaagtaggggaaaattttatatttctacatagggcta

SEQ ID NO: 623720 - DNA, 620 bp, Homo sapiens
ttttcaaatatacaatacttagttaattaatgatgtgtgttaacaccatgtagtacaatggatctcctgaacttattcctcctgtttagctgaaattttgtattctttgaccagaatctctccaattcaccctgtccttgcccctggccactggtaatcaccattctactctctgcttctgtgaatttgacacttttagattgtgtattgtttaaattttttttgatgattatgaggttgaaacctttctatgtttattaaccattgtaatgttctgtttaagacttttgctccatttcacattggcatgtctatctttttcttattcagacggaagagttcttttatattgtagctatagaccttgtttaatttgagatactttttcctgttctatagcttgacattttactttataaattgtctattgatcaaaagtttttaattttaatgtatttctttayatttaataataccccaaatcatgaagtttttcttctttgttatatgttagaaacttaattgctttctactccatatttcatctataatcaaaaccagaatttatttttatatgtgctgggaagtaggggaaaattttatatttctacatagggcta

SEQ ID NO: 623721 - DNA, 520 bp, Homo sapiens
tcttgataatagtctttcaacccataaacatgagaatatccttccattcatattttctttaatttatctcagtaaggtggggtttttgtttgtctctttgacctcttcatttatcaccttatatatttcaaagtcacatatttagatacagaacaatttgggttgtgacaccttcctgctggattggcattttcatttcttcagatgtcccttttaaactctggtaatggtttttgccttaagatctactttgtttgatattaatatagttgcacaaactctcttctgtatatgtttgcagggaatgctctttggatatatgccaatgccccatacatatactgtcagatttttcagtgattgtaataaacaggctggatttccaattgcctgagggctgccsctgttgcctggatcatggaaacttcaagtgccagagaattaatatttttgagaatagctttcaaccttactcagatgtggtgtctctgaagttcatcttttaagctgacttttagaa

SEQ ID NO: 623722 - DNA, 409 bp, Homo sapiens
agattttaggatgtgtttttctgtttctacaaaactattgctgggattttgatcaagtttgcatttaatctgtagattgctttgggtagtattgacatcttaacagtattaagtgttctaatcaataaacacaaaatatctttctacttatatgtgtctttcatttyacttagtaatgtttttagttttcagtatatgagccttttgcctccttggttaaatttattcctaagtattacgatatatcactttttataaataggttttatgatttgtattgtcctttagttaaatggattatctcacatattatcttccatagtcccaatgaatatcaagtctatgatttttcttttgtacttagcaattgatgttcctccttcgtgctttctatttcctgtgatttatg

SEQ ID NO: 623723 - DNA, 409 bp, Homo sapiens
agattttaggatgtgtttttctgtttctacaaaactattgctgggattttgatcaagtttgcatttaatctgtagattgctttgggtagtattgacatcttaacagtattaagtgttctaatcaataaacacaaaatatctttctacttatatgtgtctttcatttcrcttagtaatgtttttagttttcagtatatgagccttttgcctccttggttaaatttattcctaagtattacgatatatcactttttataaataggttttatgatttgtattgtcctttagttaaatggattatctcacatattatcttccatagtcccaatgaatatcaagtctatgatttttcttttgtacttagcaattgatgttcctccttcgtgctttctatttcctgtgatttatg

SEQ ID NO: 623724 - DNA, 596 bp, Homo sapiens
ttgaaaactcagtaaagaccagcagtatttataaaagtttatatgaaggatttgcagccctcctatttttcaagatccaggagaaaaaawagatttcatgcatagaacctgcttagagtcctaagaatggttctgaggatgattctgaatgaaatgggaaagagaaccatgtgtgtctaccatagtcatgtagcagtaacatgtgggctgcacactggccaaccgtgatctagacactctaaaagtacctgcattaacatcagccaagaacagtgtatcaggaccacattatgacacccccacagaattgatttgcctgtgctgtatttaagtattcaaacatcagcacacatttggggaaattaacagaaatagagccatgaaaataattattgtattccatgtaagaatgctcatcattcactacattttacactattgtctacataaagatccacaggagaaatttcttccaagacttggtgccaggaatatttgaatttcatctcagtgactgggtggtttttatcttatggctactatgacttattttttttttcctcccatttgcactgctactagaaaactccaggaaa

SEQ ID NO: 623725 - DNA, 596 bp, Homo sapiens
ttgaaaactcagtaaagaccagcagtatttataaaagtttatatgaaggatttgcagccctcctatttttcaagatccaggagaaaaaaaagatttcatgcatagaacctgcttagagtcctaagaatggttctgaggatgattctgaatgaaatgggaaagagaaccatgtgtgtctaccayagtcatgtagcagtaacatgtgggctgcacactggccaaccgtgatctagacactctaaaagtacctgcattaacatcagccaagaacagtgtatcaggaccacattatgacacccccacagaattgatttgcctgtgctgtatttaagtattcaaacatcagcacacatttggggaaattaacagaaatagagccatgaaaataattattgtattccatgtaagaatgctcatcattcactacattttacactattgtctacataaagatccacaggagaaatttcttccaagacttggtgccaggaatatttgaatttcatctcagtgactgggtggtttttatcttatggctactatgacttattttttttttcctcccatttgcactgctactagaaaactccaggaaa

SEQ ID NO: 623726 - DNA, 596 bp, Homo sapiens
ttgaaaactcagtaaagaccagcagtatttataaaagtttatatgaaggatttgcagccctcctatttttcaagatccaggagaaaaaaaagatttcatgcatagaacctgcttagagtcctaagaatggttctgaggatgattctgaatgaaatgggaaagagaaccatgtgtgtctaccatagtcatgtagcagtaacatgtgggctgcacactggccaaccgtgatctagacactctaaaagtacctgcattaacatcagccaagaacagtgtatcaggaccamattatgacacccccacagaattgatttgcctgtgctgtatttaagtattcaaacatcagcacacatttggggaaattaacagaaatagagccatgaaaataattattgtattccatgtaagaatgctcatcattcactacattttacactattgtctacataaagatccacaggagaaatttcttccaagacttggtgccaggaatatttgaatttcatctcagtgactgggtggtttttatcttatggctactatgacttattttttttttcctcccatttgcactgctactagaaaactccaggaaa

SEQ ID NO: 623727 - DNA, 505 bp, Homo sapiens
gagaggtttccataactttctcattttgaggatggggatggaagctgaaacttcctagaaaagccagtaatatcaataagtaggtaaataaactgagttttgtttgcacactaagtaatcactcctgaaaaggacaaaaagccacatataaataaaygcacagtaaatggtttttgaagattatcagcacagaaatatctgcgattgcatgtgtacctatgaatgaatacttaatggagcttgggtacctacttcaaagaggcacagctatgtttcccaacctctcattctttcaaactactttaaatatcatacttggcccccaatgtgggaagcatacatgaattgtgaattttataaagcggtccaaaattatgttacaaaagacaaacacctagtgaagactaagtgtaaggtattttacatggattatttcattaactcttttaaataatcccagaaggtaagtattaataatatgtaaactcctttaaaaatctgtaat

SEQ ID NO: 623728 - DNA, 505 bp, Homo sapiens
gagaggtttccataactttctcattttgaggatggggatggaagctgaaacttcctagaaaagccagtaatatcaataagtaggtaaataaactgagttttgtttgcacactaagtaatcactcctgaaaaggacaaaaagccacatataaataaacgcacagtaaatggtttttgaagattatcagcacagaaatatctgcgattgcatgtgtacctatgaatgaatacttaatggagcttgggtacctacttcaaagaggcacagctatgtttcccaacctctcattctttcaaactactttaaatrtcatacttggcccccaatgtgggaagcatacatgaattgtgaattttataaagcggtccaaaattatgttacaaaagacaaacacctagtgaagactaagtgtaaggtattttacatggattatttcattaactcttttaaataatcccagaaggtaagtattaataatatgtaaactcctttaaaaatctgtaat

SEQ ID NO: 623729 - DNA, 580 bp, Homo sapiens
aagtattaataatatgtaaactcctttaaaaatytgtaatagatttattgagatataatacacatactttaatattcacctttttaaagtatataatccagtagtttttagcatattgtcagagtagtgcaactattaccataatctaattttgtaacatttttgtctttccaaaaagaaaccctgaactcattagtggtaactccccattcttccttcctggtagtacctggtaaccactaatctacttgtctctatgaatttgcctattctgagcatttcatttaaatgaaatgatacaatatgtggtcttttgtaactgttttacttagcagttttcaaggtccatccatgtcctatgaacatttgtatgcatatttctttgtagacatatgttttcagttcttctggatatatactgggagtggaattgctggatcatatcatacttcaatttttaactttttgagggactgccaaactgttttccaaaagggctgtaccatttacatttccaacaggaatgaatgagagtgtccaattctccacatccacaacacttgctaccatcttttctatt

SEQ ID NO: 623730 - DNA, 580 bp, Homo sapiens
aagtattaataatatgtaaactcctttaaaaatctgtaatagatttattgagatataatacacatactttaatattcacctttttaaagtatataatccagtagtttttagcatattgtcagagtagtgcaactattaccataatctaattttgtaacatttttgtctttccaaaaagaaaccctgaactcattagtggtaactccccattcttccttcctggtagtacctggtaaccactaatctacttgtctstatgaatttgcctattctgagcatttcatttaaatgaaatgatacaatatgtggtcttttgtaactgttttacttagcagttttcaaggtccatccatgtcctatgaacatttgtatgcatatttctttgtagacatatgttttcagttcttctggatatatactgggagtggaattgctggatcatatcatacttcaatttttaactttttgagggactgccaaactgttttccaaaagggctgtaccatttacatttccaacaggaatgaatgagagtgtccaattctccacatccacaacacttgctaccatcttttctatt

SEQ ID NO: 623731 - DNA, 580 bp, Homo sapiens
aagtattaataatatgtaaactcctttaaaaatctgtaatagatttattgagatataatacacatactttaatattcacctttttaaagtatataatccagtagtttttagcatattgtcagagtagtgcaactattaccataatctaattttgtaacatttttgtctttccaaaaagaaaccctgaactcattagtggtaactccccattcttccttcctggtagtacctggtaaccactaatctacttgtctctatgaatttgcctattctgagcatttcatttaaatgaaatgatacaatatgtggtcttttgtaactgttttacttagcagttttcaaggtccatccatgtcctatgaacatttgtatgcatatttctttgtagacatatgttttcagttcttctggatatatactgggagtggaattgctggatcatatcatacttcaatttttaactttttgagggactgccaaactgttttccaaaagggctgtaccatttacatttccaacaggaatgaatgagagtgtccaattctccacatccrcaacacttgctaccatcttttctatt

SEQ ID NO: 623732 - DNA, 393 bp, Homo sapiens
tggataaatcacggcgttcccagtagctcctcttcacttccccgctgacacctgctgccagccctgcaattctttggagccccctaagttgaccattctgtcctcagccttcacawcacaacttaccgctgtaaaagagatggaggaggggctcccagtaatctctagatttgtgcggcattgatttgtaggaataggaggtttttggttttgcactccaccccttccctttagagtgttgatttttggcgccctcttcaatatttctatcagaagaatcgagaggtgtggacaacagtttccgacacatttcccccagcatgttctagagagcgtgagggagaaaggcagagacacacccctcagcacaggctctcacatcccctacaaagc

SEQ ID NO: 623733 - DNA, 556 bp, Homo sapiens
ctttgaaaaataatacaagaaaggctacttgctatcacaagtactttattatttcgtcttctgaaaatctgcagagcatatgtgtgaaattttctctctatttagggtgttgtttcttccaaaggctcagctgctctcctttagctggtggggaggcagggaggaggagggaatccacccagccctaactgtgctgtgatttatttctcttctaatcaccttcccccatggcctcaggctgygtgtgttgcatgaaatcagcctcataagaggtcccaattttaggttcccttcacccaggggggatgtaaatatttgattaattttactgtcccattccatctgggcttaattcctctaagcacccagtttcctgtgtggccataggcacagaggggactggagttgccctatggtgtggagagcacaaatattaccgcataaatgccttaaggcccatctacctattgaaatggtctcacctggtaagttgacataagacaaaacacaaaatcttcacaaaaaataaacttagaggaattctgggaagggaaag

SEQ ID NO: 623734 - DNA, 621 bp, Homo sapiens
atcatagaattgttttaatcatttagatttaaattgagccaggaattgttaatgccctcaacctcagtgatgaccatttttcataaccttactgcaaagagtggtcaatggcctctaaggcattagaataatattattgtttatgaactcacttgggcagcctagaagccacagggggttaaatccagcagtctttgaaaaataatacaagaaaggctacttgctatcacaagtactttattatttcgtcttctgaaaatctgcagagcatatgtgtgaaattttctctctatttagggtgttgtttcttccaaaggctcagctgctctcctttagctggtggggaggcagggaggaggagggaatccacccagccctaactgtgctgtgatttatttctcttctaatcaccttcccccatggcctcaggctgtgtgtgttgcatgaaatcagcctcataagaggtcccaattttaggttcccttcacccagsggggatgtaaatatttgattaattttactgtcccattccatctgggcttaattcctctaagcacccagtttcctgtgtggccataggcacagaggggactggagttgccctatggtgtggagagcaca

SEQ ID NO: 623735 - DNA, 581 bp, Homo sapiens
agaatataaaaaaacttttggccaggcagggtggctcatgcytgtaatcccagcactttgggaggccgaggtgggtggatcatgaggtcaggagtttgagaccagcctgaccaacacggtgaaaccctgtctctactaaaaatacaaaaatcagctgggcatggtggcaggcgcctgtaatcccagctactcaggaggctgaggcaggagaactgcttgaacccgggtggcagaggttgcagtgagtggagttcacaccactgcactacagcctgggcaacagagtaagactccatctcaaaaaggaaaaataaaaaatttcatgagaacacctttacagagattacagagcaatatgaatagtatgatccaaacttaaaactttgtcttgcaaatcagaatgactagaagaatctaaagctaagcatcagccatgatccccttcctgtggtaggattataggtgatctccagtttgttctttatgcttttctcaatacaatttctggaaataattgataccatgaaatatatggcttttatgagtagaaaaagaacaacaggtgctattttaaagaaaca

SEQ ID NO: 623736 - DNA, 509 bp, Homo sapiens
tgataaagaactaaagtgcctcccaggtgctgagcttgcatgccatcctctgttaagattgtaggcaacctaccaggacagcatcttcagacttgattaccctaaccctacatttccagcatctacctactggaactttttcaaaggaaggatttcgacttttgggaagagtcttcctgaaccagtcaatcagaaattgtttgggagattttccagttcagcgttgagcagtacagtcaaaatttyttacatcatgaggttctttttatctttctcttcttcagtagcagctgcagatttttcaaataactgaaaagttcaatgcactttctccttctatggccacaggaggctttttttctttcattttgttgatgtgaaatctttatggctggattaaatactggatcatcttctaaagtttcaatttctctttgaaatttccttattttttcctgagcctccttttggtcttgcctggttttttttttttttttttttggtttttt

SEQ ID NO: 623737 - DNA, 506 bp, Homo sapiens
tcttttctttatttcttcttaaaaataaaaaggatacatgtgcagaacgtgcacgtttgttacataagtatatgtgtgccatggtggtttgctctaccaattgacccatcctccactttccctcccctcacccccaccacccaacaggtgtgtgttgtccccctctccatgtccatgtgttctcaatgttcaactcccacttacgagtgagaatatgcggtgtttgattttctgttcctgtgttagtttgctgaggatgatagtttccagcttcatccatgtccctgcttttatttattattttttattttaggtttgtgggtacatgtgaaggtttcttgctacacccatraacatgtgtcataggggtttgttgtacatattattatatcaacaagataatcagctcagtacccagtagttatatttcctgctcttctccctcctgctaccctcccccatcaaatagaacccagtgtctgttgtttccttctttgtgtttttaa

SEQ ID NO: 623738 - DNA, 557 bp, Homo sapiens
tacccagattagttgtatttcaggcccaaatgaacttcctctgcagatgctatctcggtaatagctgctgctggacctctgtggtggttatgcttacctgacaggccccataataacccttcactctgcctagaaaaaaatgtcttaaattttgaaactctttataaaactcgaccaatgttaattacatctcctctattctacctttattcaaccgatctacaattttagttctaatttctgaactcatagctttgcaactttgcctacaaattagaaagttgtgcttctgtccatgtttgctattgcagcatttactttgcctaacacaatgtctggatcaaaggctaccacagtccatgctaagatgttatagattggaatgtaggcakgaatgacttaatttgctgcaaaaggagctaaatgagaaggataatactcgggaactggtattgattgttaagttggagcactgccagaggtggtaagatatgaagactcataggcatttactggacttggcaaaataataaagtaacagttgctctaatagggtg

SEQ ID NO: 623739 - DNA, 570 bp, Homo sapiens
aagaatttttgtatctgttgccagatgcagtggttcatgcctgcaatyccagcactttggaaggccgaggcaggaggatcacttgaggtcagatcgagaccagcctggccaccatggtgaaaccccatctccactaaaaaaaaattaaaaaaaattagctgggcatggtggcacatgcctgtagtcccagctactcaagaggctgaggcaggagaatcacttgaatctgggaggtggaggttgcagtgagctgagaccgtgccactgcatcccagcctgggtgacagagtgagactctgtctcaaaaataaataaataaataaacaaataaataaaatgaaaaaaaggaatttttgtatctatgttcgtgaaggataatcttttattttcttgtaatgcctgtttcagtatcgggttatgctgacatcataaaatgaatcaaaaattatttctcccttctctattttctgagtttgtgtagtattgtttcttaaaagtttggtaaaattaaccagtaaagccattcgtgcctggagtttcttttacaggagtgttttaaattaagaattc

SEQ ID NO: 623740 - DNA, 466 bp, Homo sapiens
ctagggaaggtgaggctggagaatcacttgaacccaggaggcagaggctgcagtgggccaagatcatgccactgcactccaacctgagcaacagagtgagaccctgtctcaaaaacaacaacaacaaaccctgttacagccagttaacaatcacatggtttagaagtactataagcagatcttttagaacagctcttcaagcatctttgcacactgtaaaccatctctagatagctttgattaatgaaattacaaagtacctaattttcattaggaaataatgaacttccraagaaagtaacttttgttattgcatcactctcaaagttcctcataaatcctactaatataaggatttcagtccatgtcagatagaggtgatcagttgattactgtaaacaagatccttccataattataaaaggcaaagtacttaaaggattttttaaaactattccagaaattc

SEQ ID NO: 623741 - DNA, 486 bp, Homo sapiens
agctgggcttggtggcacgtgcctgtaatccccgctactcaggaggctgaggcmggagaattgcttgaacctgggaggtggaggctgcagtgagctgagatcgcaccactgcactctagcctgggtgatatagcaagactccatctcaaaaaaaaaaaaaaaaaaaaagaaaagaaagtagtgtggagatgcccctgagactggagacaaaaagatttagataatgaggttatttatgcaagaaagacccaatggcaccagttcttattttgcacctttacctactcaagcaaatgctctgttaattataccaccccctggaggctgggaggcatctctgcagcgcttccttaccaaaggagaagcggagggtaaaatcactttgttttcttatctgttcatcaggagtcctgttgttctatttgacagtttttccttcaccattcataaaaaggattaacaaaattgcccaaaacaactctataa

SEQ ID NO: 623742 - DNA, 546 bp, Homo sapiens
actcacagtgatgtgcatttccctggtctgatcattagcataccaggcaggctcagatgcscagcatgtatcacagatagtaggacatcatgcatatgcatgggaaactcctagctcaaaattggcctctgatcagaccaaaaggccagtaactgtgtccaagtagcaactcaacatccacaaagtgccaactggaatgttttcccattttaagtgggcacggcaatctagacattaaccaatagacttataagaatagcttgtattgattaaagaagctttataatacatattttattcctatcattttatgtgcctaagatttattccttaaaatactgattcactgatttagaaaactcggtaggggtaaataaatctgcttgaataaagttgaaaatagactacatcctatagtttttaaaaaaatattagaagagtatttgtaccgcctccagacaaactggtagttgtccgttgcatttcagactcaatgaatatgggctcttaagccagatggcattaggatcaggaagtgggtttggc

SEQ ID NO: 623743 - DNA, 546 bp, Homo sapiens
actcacagtgatgtgcatttccctggtctgatcattagcataccaggcaggctcagatgcccagcatgtatcacagatagtaggacatcatgcatatgcatgggaaactcctagctcaaaattggcctctgatcagaccaaaaggccagtaactgtgtccaagtagcaactcaacatccacaaagtgccaactggaatgttttcccattttaagtgggcacggcaatctagacattaaccaatagacttataagaatagcttgtattgattaaagaagctttataatacatattttattcctatcattttatgtgcctaagatttattccttaaaatactgattcactgatttagaaaactcggtaggggtaaataaatctgsttgaataaagttgaaaatagactacatcctatagtttttaaaaaaatattagaagagtatttgtaccgcctccagacaaactggtagttgtccgttgcatttcagactcaatgaatatgggctcttaagccagatggcattaggatcaggaagtgggtttggc

SEQ ID NO: 623744 - DNA, 511 bp, Homo sapiens
agaccctgtttcccagacccccttgtcacctggctccccactggctttgtccagagggagcctggagggtgggcaggtggagaaccaggctacttctccctcactgttcctgccctggggacatctccagcggggtctgagtttccccrggctccagttcccgcgggatagacctccatggttccaccttccactagggaccccagcaacgagaccccttcatcccaccagcccaggagcggtagtggcttcctgctctcactaatcttggggtgttcctgctggcttctccactttgccatcacctcgttaaattccatctctttagatactcaagtcctggttttccctgaataatcacagtttgtcagctctgaactaagccctcaccagcatttctcgagatagccctcagagactcttgttgtacagctgaggaccctgaagctcaaagatgcacagggattggtttagggtgactcggctggtgagtagttcagccggaattcag

SEQ ID NO: 623745 - DNA, 572 bp, Homo sapiens
tcggctcactgcaacctccgcctctcaggttcaagcgattctcctgtctcagcctcccaactagctggtactacaggctgcactgccatacctggctaattttgtgtttttaatagagatggggttttttaccatgttggccaggctggtctcaaattcctgacctcaggccttggcctcccaaagtgctggaattacagacatgagcctctgcgcccggcccctaatgcattttctraccccgtcttctccattcctaggaagggatttcattggtccaggccttaagaaggggaagcatgactggagtttaaaaaaaaaagccaattatatggaaattcatattttaaaactagtccttagttcaagctatcacaagtaaacacctgtgcctacatcagtctgtattttcatactataagtatattattctgatggaaattattttgaattgggaagaaaagttaatttgttcaggaagctgggaagccaagaattctatagccaaccatggctaaagcagcatgccaatgggacctttgcctaccattctgcttgacatttttaaagac

SEQ ID NO: 623746 - DNA, 527 bp, Homo sapiens
ggcagagtaggtgatagagatcatgtgaagtctttaaaataggattatgacatactttccctacccagttgacctcctgcctggatttaataaagcctccttgactttgttacctggcacatttggctcaaatcaatctcgacttccaccctgtgctgccgtagcacctcattcatgtcattggctatacttttcaccttgaatctaaattcgatcctgttcactgcccctgccaggctgtgagctccaagaaagcagagctctttccagagttttctttacatccctggctctgggtatgacacatgatgaatgcttaataagtgtggaacaaaagagtgacccaaagaagggcgaagactcctggttcttcatcatgcccatgggaaccatgctttggggatgtagggagtggacattctctgtggcagcttcaggcttctggggttctgtggtgccactgatgtgtcatgtaayttgaaagccctggaagaaactatgggtgactctggttgtcccctctccag

SEQ ID NO: 623747 - DNA, 527 bp, Homo sapiens
ggcagagtaggtgatagagatcatgtgaagtctttaaaataggattatgacatactttccctacccagttgacctcctgcctggatttaataaagcctccttgactttgttacctggcacatttggctcaaatcaatctcgacttccaccctgtgctgccgtagcacctcattcatgtcattggctatacttttcaccttgaatctaaattcgatcctgttcactgcccctgccaggctgtgagctccaagaaagcagagctctttccagagttttctttacatccctggctctgggtatgacacatgatgaatgcttaataagtgtggaacaaaagagtgacccaaagaagggcgaagactcctggttcttcatcatgcccatgggaaccatgctttggggatgtagggagtggacattctctgtggcagcttcaggcttctggggttctgtggtgccactgatgtgtcatgtaatttgaaagccctggaagaamctatgggtgactctggttgtcccctctccag

SEQ ID NO: 623748 - DNA, 545 bp, Homo sapiens
cctcctcactcagcttcccaagtagctgggactgcaggcaagcactaccactcccagctaatttttttgatttttagtagagacgaggtctccctatgttgcccaggctggtcttcaactcctgaatgcaagcaatctccccgcctcagcttccccaaatactgggattacaggctaggtgtgagccactgtttgtccttcctggacattcttgtttccactctccctacccctcctcctccatagcccccgtcaaggtagagtgccttytactttgttcatgagtgcccagcagttgaagtgatgcaggtccacccctctgtgaaccacgtatctgaaatcgcagttacaggcatagctgcagcactgccaggatggcattacagggttgtgcattcttcagattttctagcgggccaggggctctggtcccaagggaggcatgtgatggcagagggtacaggcacttttctactagcaaagcttcattgtgctgcctggcaactccaataatcagaaagtgagtgattctctttttccctttt

SEQ ID NO: 623749 - DNA, 748 bp, Homo sapiens
tcagatttcagaattatggataagggagtatagatctgagtatgaaaacatttatgggaataaaagacagcaaattcaggttatgcttgccttcaggaagggaaggaggggacagggattagttgctcatccataacgacacctactccatagtattatggggctgagacacagaagaatgtacacacagtgactgacattacaaaatacatttgtaatgtcttttttaaggaagcaaatatggcaaaagatgctgagatttgataaagcctcatggtgggcacatgagtacatattattctcttttttcttttttttctgagatggagtctcgctctgttgcccaggctggagtgcagtggcccggtctcggctcactgcaaactctrcctcctggttcaagtgattctcgtgcctcagcctcccgagtagctgggattataggcacttgccaccacacctggctaatttttgtatttttagtagagatggtgttttgccaccttggccaggatggtctcgaactcctgacctcaagcaatccactccacccacttcggtctctcaaaatgctgagattacaggcatgagtcactgcacctggccttattatcctctacaaagctgtatgttttaaaatgtgtcttaataagaagtgttgaatattcatatcctctcccctcatcgggcccatagagatgaactgagttttccagttactcaactagttggtggtacagctggaatt

SEQ ID NO: 623750 - DNA, 748 bp, Homo sapiens
tcagatttcagaattatggataagggagtatagatctgagtatgaaaacatttatgggaataaaagacagcaaattcaggttatgcttgccttcaggaagggaaggaggggacagggattagttgctcatccataacgacacctactccatagtattatggggctgagacacagaagaatgtacacacagtgactgacattacaaaatacatttgtaatgtcttttttaaggaagcaaatatggcaaaagatgctgagatttgataaagcctcatggtgggcacatgagtacatattattctcttttttcttttttttctgagatggagtctcgctctgttgcccaggctggagtgcagtggcccggtctcggctcactgcaaactctgcctcctggttcaagtgattctcgtgcctcagcctcccgagtagctgggattataggcacttgccaccacacctggctaatttttgtatttttagtagagatggtgttttgccaccttggccaggatggtctcgaactcctgacctcaagcratccactccacccacttcggtctctcaaaatgctgagattacaggcatgagtcactgcacctggccttattatcctctacaaagctgtatgttttaaaatgtgtcttaataagaagtgttgaatattcatatcctctcccctcatcgggcccatagagatgaactgagttttccagttactcaactagttggtggtacagctggaatt

SEQ ID NO: 623751 - DNA, 460 bp, Homo sapiens
cccagcatatcctctttagcctcatcttccaccagctcccaccttgagcccacaaatctaccttctgagccactgcagccccaggtagctccccaggcctaggctctctcttctcctttgtccatgctrtttggcagccttggccaggaatgcctactgctctccctagctaattcctgatcattaatactccagatctgaatcccctatgtgcagaggcccctcaggctgggttttcaaattctcctctgtgctccatagcaccctgcacagcctctaacagcatttatcacaccctcttatggctgctggttacttggccatctccctgctgggatggctccctgaaggcagtgattgagttaatccttgatgtatcccccatcagctaacattgttcctaggagatggtgtccaataagcattggatggtaggctgaaccagagtgataaaaatatc

SEQ ID NO: 623752 - DNA, 460 bp, Homo sapiens
cccagcatatcctctttagcctcatcttccaccagctcccaccttgagcccacaaatctaccttctgagccactgcagccccaggtagctccccaggcctaggctctctcttctcctttgtccatgctgtttggcagccttggccaggaatgcctactgctctccctagctaattcctgatcattaatactccagatctgaatcccctatgtgcagaggcccctcaggctgggttttcaaattctcctctgtgctccatagcaccctgcacakcctctaacagcatttatcacaccctcttatggctgctggttacttggccatctccctgctgggatggctccctgaaggcagtgattgagttaatccttgatgtatcccccatcagctaacattgttcctaggagatggtgtccaataagcattggatggtaggctgaaccagagtgataaaaatatc

SEQ ID NO: 623753 - DNA, 460 bp, Homo sapiens
cccagcatatcctctttagcctcatcttccaccagctcccaccttgagcccacaaatctaccttctgagccactgcagccccaggtagctccccaggcctaggctctctcttctcctttgtccatgctgtttggcagccttggccaggaatgcctactgctctccctagctaattcctgatcattaatactccagatctgaatcccctatgtgcagaggcccctcaggctgggttttcaaattctcctctgtgctccatagcaccctgcacagcctctaayagcatttatcacaccctcttatggctgctggttacttggccatctccctgctgggatggctccctgaaggcagtgattgagttaatccttgatgtatcccccatcagctaacattgttcctaggagatggtgtccaataagcattggatggtaggctgaaccagagtgataaaaatatc

SEQ ID NO: 623754 - DNA, 581 bp, Homo sapiens
caagaagcctaaatagcagatgcagcaactttctgaagagctccagcacgcacaactgaagacaataaaaaggaatttcaagatgtcatgtggggacaagggttccaaaagagaaaagactggatgctttttaggagatttgtatagaaaaggaaaaaaaaactgctaataaaattatgagtaagaatagtaacctggacaatcaagtgctaaataaattgatgttagacattaagggttcttgcttgaatatttgactacaggctcaaatataacaatgagtgtcccgataatcaacacatacaaatatagccatgtaggccttccaggtaaggagaatgtaatttatatgaaaggacattgtttttttcctaacaatacaatcggataatttatgtgtgaaaytgttatctttttctataaacttaataaatatcttttttctcctagagggagagttatctttttgtgttatgtacagctctctacttcaacattaaccatacattagcaccagaaaattttcttccatgagtggaaaatttgattaatttcttgactttatattggttattttcatt

SEQ ID NO: 623755 - DNA, 589 bp, Homo sapiens
atggtggcgggtgcctgtaatcccagctgcttggaaggctgaagcaggagaatcacttgaacctgggaggcagaggttgcagtaagccgagaatgcgccatttcactccagcctgggcagtaagagcaaaactccatctcaaaataaaaaataaaataaaataaagaaatgtgttggaagaatacatactaaatccttaactgaggctacctatgcaagttgggttgggtaatggggatgggagtggaatggaacatttgcttttttctctgtacatttttaaatataaatttttccacatcaagcatatactaatgttaatgcaaagcaaaacaaagcaaaaacctggagttgaacaagacaaggcaccagacaataagaatttcagtaggcacgatcacatacatatacattaaaacatatttgcataagtacaacagaattagctaagcatagattaggctatttttatggttacttcagctccaagcaatatgtatccttggacaactacagcacacatcatcacgaaaaagatttcactctgttaaacactggtaartctgctaaatttgtgtgtctagtgggt

SEQ ID NO: 623756 - DNA, 531 bp, Homo sapiens
ttatgctcaaaactttcatatacacattaggctttcattagtcagctactcttgacctgcagaagtgccaatttcctatggttcagcctaataaaaacatgaaagaacatggaatgctgttcccatttcctagsctgaaagagtgaggtgaggccacagccacaaagagggtcactgggtctcagctcccaccgagtcaggacactgcagtccagagatcagaacaccatccaattcagggccttccataaatgacacagggatgggaaggagtgggttcaaggatatttgaaaaccattaagcatgaaggttctttccttattattattaatttttttgttgttgttgttttatgatggagtctcactctgtcacccaggctggagtacagtggagcattcttggctcactgcaaactctgcctcccggcttcaaacgattcttctgcctcagcctcctgagtagctgggactacaggcgtgcaccaccacacccagctaatttttgtatttttggtagagacagggttt

SEQ ID NO: 623757 - DNA, 531 bp, Homo sapiens
ttatgctcaaaactttcatatacacattaggctttcattagtcagctactcttgacctgcagaagtgccaatttcctatggttcagcctaataaaaacatgaaagaacatggaatgctgttcccatttcctaggctgaaagagtgaggtgaggccacagccacaaagagggtcactgggtctcagctcccaccgagtcaggacactgcagtccagagatcagaacaccatccaattcagggccttccataaatgacacagggatgggaaggagtgggttcaaggatatttgaaaaccattaagcatgaaggttctttccttattattattaatttttttgttgttgttgttttatgatggagtctcactctgtcacccaggctggagtacagtggagcattcttggctcactgcaaactctgcctcccggcttcaaacgattcttctgcctcagcctcctgagtagctgggactacaggcgtrcaccaccacacccagctaatttttgtatttttggtagagacagggttt

SEQ ID NO: 623758 - DNA, 380 bp, Homo sapiens
tctctttttctctgtctctgtctctctttctccttcttctcacacccctatttttatctctcctggagcctgagccgttagtgttttgctgctgggaatcctggcactgtgcatgttccttacatgtttcttacactgagtgagccctgtgccatctctcttgaatcttcttggtgggggatgtcaagacattagctacagcagaatgagtcgtcaaggaagtttctamagctgtagatacgtttttgcagtgatcctcttctatccctacacgtatcctggtttccatagtagaacagttaagtcagggtaattttttttttcttgcttgaattcagccagctaggtggttctggagtctttcttctacaagttctgag

SEQ ID NO: 623759 - DNA, 445 bp, Homo sapiens
tctaccaaaaaagtaggaaggaaagaacagatatctattaatacaacctgtgatggttatgacattttttttcatccatttaaccaatatttattgagcacccagtacatagtaggaaaagacaaagttcctaactctcaagcttctcttctcatgggggaacagacagtaaacaaagaaactgaatgaatgaacaaatagcttaatttcaagtagtgagaagcacattgaagctgaagtaggtacggcaaaamaaaggaatagagtgatgagaggtgaggagttgatgtggctattatttatttatttattattattattattattttcccttcaacttttattttaacttttgggatacatgtgcaagatgtgcagttttgttacacgggtaaccatgtatcacggtggtttgctgcacagatcatcccatcacctaggtatt

SEQ ID NO: 623760 - DNA, 563 bp, Homo sapiens
agtcagcacagatgacaagctctgctttttagtgtacatggtcttccccagtatgcacattcttttcctattcttgacttatctcccttaacgataaaatggccaagttagaaaccctagacactcttattctcttttctttctttctttcttttctttcttaagagacagggtctcattctgtcacccaggctggagtacagtggcacaactgtaggtagctcactgcagcctgaaattcctaggctcaagtgattctcctgcctcagcgacttcggagtggctgagattccaagcttaaaccattgtgtcctgcacttctcactttcatggctgttatcctgggggtcatcaacttttctagatctkattacagaaatgtctcttcttttttctttattgctgctgttaaagctttgatccagatctttctcaagtcttagttattttagagtctgttagctgattttcctgacatgcatctctctcggtcctctaatcttccatgtacactgctgctgctgctgctgtgaagcagatctggtcacctcagtctcttggtt

SEQ ID NO: 623761 - DNA, 553 bp, Homo sapiens
agaattggcctgattagaaaccatttgaggtagggaatgggggctcacacctgaatcccagcactttgggacactgaggccaggagttggagaccagcctggtcaatacatgagaccctgtctctacaaaaaaaaaaaaaaaaaaaaaaaaaaaaaatttttagtactccgaataaatgtatctgtaaaaggaaagccacagtaattcagagtcatggtttatatacctatttcacataagatgccactgtatcttctcctacaattaataagttgtctttttagtacaattcaggtctctttgcttttgggtcttagaagcctaattttctaggctctggctatctttgactactaataatatcataaaactatgataatgataataactcttatttataagagttgatatcaggcactggtgtaagggctttccttacgttactgaatctaatccgtacataagatcagtgtagtcarcatgattagtatcatctctaggttacacatgagggaatcagggcttagaacatctgagaaaatccagtgacga

SEQ ID NO: 623762 - DNA, 525 bp, Homo sapiens
ctctctttaaactagaataaaactgaggacaagcacaaagcaactagagtgcagactcctcatagatttgaagaatttcctacccagtaatttttagttgtctaacccttgcctaatttgattcatttttgcaactcacatttatctagctttccaaaacactcaacctaggtttatagaaacaaccctcttctgatatttgttttcatcaatttacttaactcaaaattaaatctcataattatatgactatgactgttatcacaaggtattaagtaactccgagtaagcaaataagtcaacagttagcaggagaagaggccaggcatcacytttagcattctgggagcccaggccattgttctgtttgtcttacagggcaccagatatgtttctggagttgatcaaacaggttggttgagaaggcttcttacagtgtttcatggtattacagctagccccaggaatgcccatatccacctatagaaccactcctttgtgaaagatttcttaaaaagatatatg

SEQ ID NO: 623763 - DNA, 244 bp, Homo sapiens
gtcatggctgtaaggtgagtaggtctccgttcccctggtgggtggttgaaactggaactattttatggcttaggaaagtctgccccttcctggaagctgaaaagaggatggtgatttagaaaggaacagtttcratagtgtaattagacaaaaataaagtcttttaggaaattgaatcagaaatttaaaagataaaggagaaaggattgaggaagattttgtgttacctgtttgtttcatttgg

SEQ ID NO: 623764 - DNA, 515 bp, Homo sapiens
gctgacgcctgtagtcccagcactttgagaggccaagtcaggagaatcacttgaacccaggagttcgagcccagcctgggcaacatggcaaaaccccatctctacaaaaaaaaaaaaaaaaaaacacaaaaacaaaaaaatgaagcaggcttgccagtagtcccagctactcaggaggctgaggtgggaggatccctggaacctgggaggcagaggttgcagtgagctgagatcatgcccctgcactcctgcttaggtgacagagtgagactctgtctcaaaaataaaaataaaataaataaaaataagaataaataaataaaattgttaaaaatttgccttagtaatttaacttttaraaatttatcctaagaaaacaaccagacaggtattagatagatgatagatagataaatagatagatagatagaaagacagactaagtccagtggctcacgcctctaatcccaatactttgggaggctgaggcgggaggatcatttgaggtcaggagt

SEQ ID NO: 623765 - DNA, 594 bp, Homo sapiens
aggaaagtgggatattgcaactgagggcatggaagtgatcaaggcccccaggccaggtcatagagagctcttctgctgtccacagggttcccaagggaggacccctgagcgttcaggcagggagtaggcagatgctgatttgggggtccgctaacttttcctctgtctttatcactcagcttttgatgaattctaccttttctcatctctctgtacatatccccttaatcttcctccttcctcatactttttggttaattcctttgactgccctcttcactacccttccacaccaaggaaggcttttttatttttttaaatttttttcagagagagtcttgctctgttgtccaggctggagtgcagtggctcgatcttggcttactgcaacctctgcctcctgggttcaagcaattctcctgcctcagcctcctgagtagctgggattacaggtgcccaccaccacgccyggctagtttttgtattttttcagtagagacagggtttcaccatgttggccgggctggtctcaaactcctgacctcaagcaatcctcctgccccaacctcccaaagtgctcggattacaggtgtg

SEQ ID NO: 623766 - DNA, 366 bp, Homo sapiens
ttttttttttttgtagcccagagatcctttattatttttttttaacacctattatgccatgaattcatagggaataggttccagcagctcaggctccttcccattggttctcacaaagtgtgcttctctgggtggagcaggctggcgctttagttgaacccaggtacctttctctttggcttctttctttttctgatcattttccttcatgcgtttcaggaagctrtctcagctcttagagtgcttaatgtgctcaataaacacattaattctcttggcaagaatcttgcccttaacttgtgtgtttacaacaatgccaacagcatgctgggtaacattgtagactcttccagttttgccatggta

SEQ ID NO: 623767 - DNA, 620 bp, Homo sapiens
tagaatgaaaggaataccaatttgagaatcaggatttgaaagattgcagcaagccagaaagatgaataaaacctaaccagatgacatttatttgtgatttctttcttttttcttttctcttttcttttgcaagtgtgtctgaatacctcaacagcattaagttcagagtatgtaagatgggtcacctgtggaaaaaactctgaggttttctaggccagttgaaatactaatatacgyatgaatcggagattaattttaaggatttggttcttccttcaaagagtaacaaagaactagaaaaaataagcatctgcttaagaaaaatcaacatgaaaattgctactagtgctcttaacaagagctcagaggctaccccactagtaataaagcacggaatgcaataaaagtgcttggatttatttccaacatccttaacagatgaatgctaaaatttgagcaatatgtcttcttctaaatcagcaaactcaaaagccactggttaccaaacattttgcttgatgtactgatatctctcctccactcgtaggagcagattttgctaagaactctacctgccaacctgtcccccgacccccatgccgtatgtaattcaattaatg

SEQ ID NO: 623768 - DNA, 620 bp, Homo sapiens
tagaatgaaaggaataccaatttgagaatcaggatttgaaagattgcagcaagccagaaagatgaataaaacctaaccagatgacatttatttgtgatttctttcttttttcttttctcttttcttttgcaagtgtgtctgaatacctcaacagcattaagttcagagtatgtaagatgggtcacctgtggaaaaaactctgaggttttctaggccagttgaaatactaatatacgtatgaatyggagattaattttaaggatttggttcttccttcaaagagtaacaaagaactagaaaaaataagcatctgcttaagaaaaatcaacatgaaaattgctactagtgctcttaacaagagctcagaggctaccccactagtaataaagcacggaatgcaataaaagtgcttggatttatttccaacatccttaacagatgaatgctaaaatttgagcaatatgtcttcttctaaatcagcaaactcaaaagccactggttaccaaacattttgcttgatgtactgatatctctcctccactcgtaggagcagattttgctaagaactctacctgccaacctgtcccccgacccccatgccgtatgtaattcaattaatg

SEQ ID NO: 623769 - DNA, 602 bp, Homo sapiens
aaactctcttgaaaaccaacctctaggttgggatggaactccgggcatctgtaaacgagggcatgtctcttgtcctgtcccacttgggagttcatatctagttctgactaacacctgccatgaagaagcattgctcgggtgaatgctcctatawttccttgtacaacgtagcattggctttctttgataatcttacccctaaaacatttgccttttccatcaaagaataaaagataatgtttctgatcttgggtattctgtgttctgtattaaaaaaatatcactctggaagatatctagctttaaatcataggctaatgtgaaattcataagaattttgttatgatagaaaaatattaaattggacataaacatttagaatagctactttattctcactggtattctcatggcagaagatatacatttttattcctccaaggaaaatatgtagtaactttaccccagaagccagtctccattctaattgtattaggcgtactctatctgtagcattgtcattccatcagacaatttgcaataaattttaatgatacatgcaaatacaccaatctaatagtccattataaaagatatgactg

SEQ ID NO: 623770 - DNA, 575 bp, Homo sapiens
aatacactggctactacatatgttgccaataaagtatttgatgatacaactttcccctctctttctacccaaggggcagtctcttttgagaatcaaaaagcctgagttttagtggtacaaatatatgccaaattgcttttatcaatactgtttygtgaaataattttagcttaaagaagagagtggatgaaaggaataagttatgctccagggcctggatatattcttattcccaggttaatctgagtattgagaatatttgagtattgagaatactcacatggaaatcataaaaagccaaaaatataacctctgtggaacacctgtataaaccaaacttatataggtaactttgaactacacaagagctttcttccgtcttctccaggcctgtttctcaggctaccttctcagggctaccatgcttcccatgtcatcctcttccttgctatgagctaagaggaccttaaggaggacctaagaggatgtcttgttttcttgcatctcaaggacctgccactgtgaaatagcaacacttttgaatcatgaaagaaaggcaaagaaagtaacagaga

SEQ ID NO: 623771 - DNA, 575 bp, Homo sapiens
aatacactggctactacatatgttgccaataaagtatttgatgatacaactttcccctctctttctacccaaggggcagtctcttttgagaatcaaaaagcctgagttttagtggtacaaatatatgccaaattgcttttatcaatactgttttgtgaaataattttagcttaaagaagagagtggatgaaaggaataagttatgctccagggcctggatatattcttattcccaggttaatctgagtattgagaatatttgagtattgagaatactcacatggaaatcataaaaagccaaaaatataacctctgtggaacacctgtataaaccaaacttatataggtaactttgaactacacaagagctttcttccgtcttctccaggcctgtttctcaggctaccttctcagggctaccatgcttcccatgtcatcctcttccttgctatgagctaagaggaccttaaggaggacctaasaggatgtcttgttttcttgcatctcaaggacctgccactgtgaaatagcaacacttttgaatcatgaaagaaaggcaaagaaagtaacagaga

SEQ ID NO: 623772 - DNA, 563 bp, Homo sapiens
ttgtagcaccaccgtcagcaagggttggtttaagagttgtgttgagagaagagggagctaggaattgtgtcaagggaggtgtgtctggactcttcccaggtgaggatgtagaggggcaagtggactgaggtacaaaccgtagaactcaccaaatatccctatgctcttttccacatttcccagtctccatgtagttattttgggacaacaagactaccctgaccaatgggatatgaacagcaataatatatcacctatgagatgaggcatttaagagrcggtgtgagttatttctcttcccttgccatggtgatcactgcagtcccaaaagataatgctagaagatttaaaaagaaaaaaaagaaaaggacctggatctccaagtcactgtttggaaggaagctgtcctagagagttacttgaaccacaaatgactttgtgtgggcaagagaggagtaaatttgtatgcaataagccctgagtgttgagatttgtttccatagcataacccatctgtctttactgatatcctagtgaagatgagtgcttcagaactaagctct

SEQ ID NO: 623773 - DNA, 563 bp, Homo sapiens
ttgtagcaccaccgtcagcaagggttggtttaagagttgtgttgagagaagagggagctaggaattgtgtcaagggaggtgtgtctggactcttcccaggtgaggatgtagaggggcaagtggactgaggtacaaaccgtagaactcaccaaatatccctatgctcttttccacatttcccagtctccatgtagttattttgggacaacaagactaccctgaccaatgggatatgaacagcaataatatatcacctatgagatgaggcatttaagaggcggtgtgagttatttctcttcccttgccatggtgatcactgcagtcccaaaagataatgctagaagatttaaaaagaaaaaaaagaaaaggacctggrtctccaagtcactgtttggaaggaagctgtcctagagagttacttgaaccacaaatgactttgtgtgggcaagagaggagtaaatttgtatgcaataagccctgagtgttgagatttgtttccatagcataacccatctgtctttactgatatcctagtgaagatgagtgcttcagaactaagctct

SEQ ID NO: 623774 - DNA, 545 bp, Homo sapiens
ttgaaatggtaaatttccgctaaaaaaggcataatagacaaaagctaaagaagccatagagtgaaaaacgayatttggaacacatagagtagacagaggagtagtatccagaattaagaagactttattcaacttaataaggaaaaagtcaccgatctccatcccaataaatgggaaaggcttataaataggtgaaaatatgaagggccaacaagcataaaaaggtacctacctcagtaataatcagtgacatacatattaaagcaacctaaaatattgttttgcacatagtaggttggcgaacaatctacaatttacaaataggtcaatacaaatagtgctaagtatttggagaaatgagaacttacattcactctgattgggtatgtaaatatgaagaaatatttgaaaaagtttaataaacttgaagattacttgcttgagatttagcaattccattagagaaatcctcacacatatgcagaagaaggcatgcattatccattccagctttttttaaaagtgaaaaactagaaacaacccaa

SEQ ID NO: 623775 - DNA, 560 bp, Homo sapiens
ttgttgacataaaggcagaataaaataaacataagaatagtattatatttcttggttttctgagaagcatgttttgtgaagagaaatatatatatatatatgaagttacatatatatagtgtgttatatgtataatgaacatttacatarctaaattacattaacattttctattttagcttttttgcttcatcttcatcaggatttctatcagctattgctcaaataaataatacctacatttgataaaggatgtgttcaggaatgagattgctctacagtattcccccctcatctgtagttttgctttcacggtttcagttacctgtaatcaactgtggtccaaaaatattaaatggaaaaatccggaagtaaacaattcatgatttaagttgcatgctgttctgagtagcgtgatgaaatcttgagctgtcctgcaccctctgtcttgcccgttccctagtccagagtatccatactgcagagctgcaggcacgcccagccattagttcttgacttaaggaaaggaaaattgcaggctgaggttgctaagatctatg

SEQ ID NO: 623776 - DNA, 543 bp, Homo sapiens
ccaggaaatgatactgacacacatagattcccaggaaatgctactgacacacaatggattctgacatgaccagcctctataataagaggaaagtgtggtccctgtacactagctttcaaaccaatgggaaaatacaaatgggaccaacaagcctgtcttgtcatgcttgtatgatagacatggtggtatcaaaaggaaataggggattactaatgccaaagtatatagaagaggaaagatagcatggtcctagccgattgtctttgggaaactcatctatcttttgtgaatctcttcatttttctcatttgcagtttgctgtgatgactagaaaagtatatgtcaaatgttgacttataagagggtctcaattaatgaagttatgattgctatttttattaatattgttgctgctgctatattgggaaacgtaatattgaaaatcacatgataagttttatcgatgtactcatttgaaatagataattcatgtaaggaaaaaaagtattcttattytacaacacaggaaattctcatttttct

SEQ ID NO: 623777 - DNA, 566 bp, Homo sapiens
atttaccttacagtggggtgcattagtttactcattcaatagtggtatttgggtataaaagaaggatctaggagtaagtcataaaaatacatatttctcattaaaattaatattatagagaagttaggaaacgagaaaaaaataaatataaaatagaaaaatatcgatagttttacctctcaagtatatattttatgtcttaacatatgtgctaacaattttgtatatttctttccagcccttgttctatgcattacttttttaaaacstagttgagattaaattacagcataattttgtatcctgtcttttcattatcattataccctaagcactttgcatattactataaactttaatattaaaatagctaatatattttaagtattgataatcagtatgtgctagacaccatgctaaacactatatgagatccactatcccatttaatctccacataaattagtaggtactattactgtttttatattacaaaggctaacactgaggcttagaaaagttagttcatttgttcacagccacacagctaaaagtggaacagttgg

SEQ ID NO: 623778 - DNA, 640 bp, Homo sapiens
tgtccacatctgcaggcagggagtcagtgtggtatggttaacctttttcttgctccttccataaggaatgaattccaaggaatatctgcccccaaaccatgccaggttgcaagacaaggtatctagagttgggggatactcaggtgagctcagagtaagagttaaaataaaggtccacattccatatctctaaatacctgtatttaaaatgtataaattaagctcacatactattaaatacaattgttctaccccctaccttgacaaatacacactgaaaacaacagagaagggcgggttacaatttggaattctctagcatcttgcaacatggaggctcaggaagaaccatcccctaccatgctccaggaattctccctcctctcttcctacccctggcttcatcctgcaccaagaatgtctcrcatgcacacatgtgtaaatatcctagcccacacatccaagctgcatcatacctctgaaaaactgatgccccttggctacctctcccagagatgcaggagattcatcctcaggagaatagacccagagaagaggtctctgtaggcccttgaagcatgttcaaggctatttgagcagggaactattgggtctggaagcatggccttgaaggaaggat

SEQ ID NO: 623779 - DNA, 640 bp, Homo sapiens
tgtccacatctgcaggcagggagtcagtgtggtatggttaacctttttcttgctccttccataaggaatgaattccaaggaatatctgcccccaaaccatgccaggttgcaagacaaggtatctagagttgggggatactcaggtgagctcagagtaagagttaaaataaaggtccacattccatatctctaaatacctgtatttaaaatgtataaattaagctcacatactattaaatacaattgttctaccccctaccttgacaaatacacactgaaaacaacagagaagggcgggttacaatttggaattctctagcatcttgcaacatggaggctcaggaagaaccatcccctaccatgctccaggaattctccctcctctcttcctacccctggcttcatcctgcaccaagaatgtctcgcaygcacacatgtgtaaatatcctagcccacacatccaagctgcatcatacctctgaaaaactgatgccccttggctacctctcccagagatgcaggagattcatcctcaggagaatagacccagagaagaggtctctgtaggcccttgaagcatgttcaaggctatttgagcagggaactattgggtctggaagcatggccttgaaggaaggat

SEQ ID NO: 623780 - DNA, 389 bp, Homo sapiens
acttgaggcagggcaagcacagtgactaggggtcttggcattgaactcagtgctgccctgtcacagcagggagcaaaaccttgcttggttcagctggcacccactcacagaaggagcatgtggaccagccccagccagagggaaattgcccatcccagtggttggaacttgagtttcagcaaaacttgccactgcaggctaaagtgctcttgggttctaggtaaacttgaaatgcagtctaggacacaagtaccgcaatttctaggygaggcctagtgctaaggctggacttacagccagtagactaaggcagcacgtgacctaggaagacaccagctggggcagctaagggtgttgcttgtgccaccacttgtgaaacccaagcttgt

SEQ ID NO: 623781 - DNA, 598 bp, Homo sapiens
gcgaatgtcaattagtactaccactatggagaacagtttgggggttcctcaaaaatctaaaaatagagctgccatatgatccagcaatcccactgctaagtatatatctagaagaaaggaaatcagtatagggaagggatatctgcaccaccatgtttgttgcaacactgttcatagtagccaagatttggaagcaacctaagtgtccatcgacagatgaatggataaaggaaatgtgctgcatatacacaatggagtattattcagccattaaaagaatgtgatcttgtcattgcaacatgggtggaactggaagtcattacattaagtgaaataagccaagcacagcaagacaaactttatatgttctcatttatttgttgggtctaaaaataaaaaacaattgaactcatggaggcagagaatagaacgatggtcactaaagtctgggaagggtcgtggggrctggggaaagaagtaggggtggtcaatggatacaaaaaaaaaaagtggttagaaagaatgaataagacctagtatttgatagcacatcagggggactatagtcaataataatttaattgtacattttaaaata

SEQ ID NO: 623782 - DNA, 547 bp, Homo sapiens
tcccacaggggaataccagtttggaatctcagataagctgttgagaaaatgcaaaatgcatctttgccagggcaactgtcactctgctgaaatatttaggccttttgcctcactttcttctgttctatgtgtgttttgcctttggggtactgattccactggaggatgggaagggaaagaaagcggaactccaaccaggacattttgctgactttcagtagtagtagcctggagacctgtgcaagggtgtgatggactatttcctgcaatcccctccctaaacccaattcatatcctgttgctgatggatgtgaaaccgttcctttcatttgaaagaggatgatgatgaccataactctttatacctacagcttaaaagcaccttcacatgcatcagctcaagctttcatgactcttgggaggtagrtgttgttatccctacatgcttagtaagtggcagaagccacaattcaaacccattgcctctgactctgagtccaatgttctttcaattacaaaccagcatgctgatttgttatcggccaaa

SEQ ID NO: 623783 - DNA, 561 bp, Homo sapiens
tagtttactataaccttgaactactgggctcaagtgatcctcttacctcaaactcctgaatagcaaggactataggtgtatgccaccatggctggctaatttttaaatttttctgtagagagggggccttgctgtgttgcccagttggatcttgaactgctgggctcaagcagtcctcctaccccagcccccaaaagtgctgagactgttaagtgtgagccatcacgcccagcctggtagtgattgttttgaatgggtgaaggctcatttcgatgtgtaagttctattatgtttgtttttaacagatattattactcatrtctcataatacagtttgattattttcatttcagaattccatttttgtttctgttattttgagataattgtcttttagagagagacagcttattttggagcaaatccattgatcgttaggtaaaaatactcgtcatttgtagtttgtttctttaactgaactaagctttatttaaactaagctactttggtgtcgtcccttatttaaaaatttttctcagtggttacactgttttattttct

SEQ ID NO: 623784 - DNA, 573 bp, Homo sapiens
tgactgcagctgcagaaagatgtgtgggaacagacacacaactctccctcccagataagcacaacaaagagacacagaagcagtctaagcctctgataaactctcccaccctgaatccttaaaaactcagtctgtaagagagtgtggctcygacctaacttggtcagaaggcacctctcaggtttgttttctgtaaaatgaatctgtcttgactgtccagccgcttttcatgtttctttcctctttctttaattgttacactaggaatcctcaattaatacctatacctctgtcatcatacagaccctcatttaaatcctgttggaatgatgaatggtttgatgtcagggtttaatcacatcttaaaactgtttttcaaaggtgtcttttataacgtcatcagtggctaaaacactacttgttattaaattattcctcatagccaatcctcatgttattccatgtgattttcctctggagctcagctaaaaatggaaaaaaaaaaagaaagagttgatgactttctttgtttaaaaatgattaagtgatttttagttttattttcatagcatg

SEQ ID NO: 623785 - DNA, 581 bp, Homo sapiens
aggtaatggatatcctatttaccctgatgtgatcattgtgcactgtatgcctgtatcaaaatatctcatgcaacccacaaacatatgcactgaatatgtacccacaaaaattaaaacttaaaaattaaaatatatatatgtcctataaacacaagaatttgcataaatttgattggacacaattttctttgaaaagtrtgtgatgcagtataactatatatgctgcctaaaaaataaattcctgacataagagaatggccattttcaagatctttgtattctgggccctcgctttacaggctacttctaagcccctgggaggggccctcgcatgagtacacatgattatccatttgtccagtttggaaaagtcagataattttatgacaaatggttaataacactgtgtcttcccatactgacttctccatcacacatcccttcatgttagatagtgttaacaatgggcatttctgagacctggactgaatcattcagagaactaaactctttgctacaattccacactctcacgactgcaaggactttccacagagtagcttccagccccatacactcca

SEQ ID NO: 623786 - DNA, 581 bp, Homo sapiens
aggtaatggatatcctatttaccctgatgtgatcattgtgcactgtatgcctgtatcaaaatatctcatgcaacccacaaacatatgcactgaatatgtacccacaaaaattaaaacttaaaaattaaaatatatatatgtcctataaacacaagaatttgcataaatttgattggacacaattttctttgaaaagtatgtgatgcagtataactatatatgctgcctaaaaaataaattcctgacataagagaatggccattttcaagatctttgtattctgggccctcrctttacaggctacttctaagcccctgggaggggccctcgcatgagtacacatgattatccatttgtccagtttggaaaagtcagataattttatgacaaatggttaataacactgtgtcttcccatactgacttctccatcacacatcccttcatgttagatagtgttaacaatgggcatttctgagacctggactgaatcattcagagaactaaactctttgctacaattccacactctcacgactgcaaggactttccacagagtagcttccagccccatacactcca

SEQ ID NO: 623787 - DNA, 553 bp, Homo sapiens
actggaatctcctgttttcaggataaaatggtctgttttgggttctgtctgctcccttaaagtttcagtttcactatgtggcgtttagcaaagtgactccattttggcttgttctcacctgttgggacttagtaaaagttcagtctaaaaaatgaccttctataattttttaatacctatttctcataaacaaggtccaggctcctggaagagtaggaatcaccagatcaagggtgatgggggtaaacctagactatcttaggcttattrttaataattgcaaattagaagcatcttttgaacagagactgaaagtggtgaagaaaataagattgacaaaattaaaatataaaagagatcaaagaggaactgcctgcaacaaaatggaatcatagaaaatggaatcataaattataaaaagagaaaagacatggggctcagaaggaagaagctaggtttgaagaacaaatctttgcccacagtgcactggttctcaaacttggctgcacattaaagacaccttagaagtttttttaaaaacactgagtcccac

SEQ ID NO: 623788 - DNA, 596 bp, Homo sapiens
tggcatttctgggtgttttgcactggaagaggtaatggataatctagtccaccatactgcatgaaatggaagtactcattattctttgttgttcaagtgtaggtcccctaagacaaaaccaaatttgtcctccaaattatttcctcttctcaaacctaaatcactatatttcttcaactttgtaagcaastggaaagacagaataccttattaattgtattattagcaacttaatttcaacattctgcttcttttttttttttcttttttttttttgagatagagtttcgctcttgttgcccaggctggaatgcaatggcacaatatcggctcactacaacatctgcctcccacgttcaagcgattctcctgcctcagcctctcgagtagctggaattacaggtgcctgccaccactccaggctaatttttgtatttttagtagagacagggtttcaccatgttggccaggctggtctcaaaatcctgaactcaggtgatcctcctgcctcagcctcccaaagtgctgggattacaggtgtgagccactgcgcccagccttcaacattcttcttttatgaaaaactataaattatg

SEQ ID NO: 623789 - DNA, 326 bp, Homo sapiens
attagatttccagcatcactatttttgcatgctttggggccattattaagtaaaataaggattccttgaatacaagccctgcaataccacaatagttgatctgataagccggatggctatkaagtgactaacaggcgggtagcatggacagcatagacacactggacaaagggatgattaatgtcctgggtgggatggtgaaatatttcatcatgctactcagagcagtggaaatttaaaacttatgaattgtttatttgtgcaatttttcatttaatattttcagaccatggttgaccactggtaactgaaactacagaaagttt

SEQ ID NO: 623790 - DNA, 399 bp, Homo sapiens
ttgcatgctttggggccattattaagtaaaataaggattccttgaatacaagccctgcaataccacaatagttgatctgataagccggatggctatgaagtgactaacaggcgggtagcatggacagcatagacacactggacaaagggatgattaatgtcctgggtgggatggtgaaatatttcatcatgctactcagagcagtggaaatttaaaacttatgaattgtttatttgtgcaatttttcatttaatattttcagrccatggttgaccactggtaactgaaactacagaaagtttagataaaagaggacaactgttttggggttcagtaaagagatgacatgatttgattcatgttttaacattatcactgcagccacttgctgagagcaca

SEQ ID NO: 623791 - DNA, 580 bp, Homo sapiens
atatctttgaggtatgcctataatttcaacagagactgcatgacctgcaaacttgacaatacttactctgacactttacaaaacagtttgctgaccgctgaccaatatgaaaagacacagaaaagttaaaatattcagtttatctggaagatgtttttaattaacttttttacacctaacaaagtagcttcagaaaataacaagagaattaaagaaaacttaagtaaatggaagagtataatatgctcatgaattacaaaactcaaaattgttacaatgtcatttcacctcatatagttctatagactcagttcaatcccaacttaagaacccagctaagatttgatttgttttgttttgtaaattgagaagcraattctaaaatgtatatagaaatgtaagagacctagaaaagccaagacaatctaacagaagaaaaaaactggcagacatacactgtctgacttcaaaccattatgaaactgaagaaattaagatactgtgtaatattggcacaagaatggagcaatggtacagaatagctattaagcaagaaatatacctacacatatacagtcac

SEQ ID NO: 623792 - DNA, 520 bp, Homo sapiens
agcattccccttgagaagtggggaatgacaaagatgtccattctcaccacatctattcaacgtagtactggaagtcctggaagccagagcaatcaggaaaaaaaaaaagaaataaaaggcatccaaacaggaagagaagaagttaaattatctctcttcacagataatagaattctayacttagaaaaccccaaagactctgccaaaagggtcctagaactgaaaattacttcaataaggtttcaggatataaaatcaatgtacaaaaattagtaacatttctactcaacaataatgttcaagccaaaagccaaaccaagagtccaatcccattaaaaatacccagaaaaataaaataccaagaaataccgctaaccaaggaagtgaaagctctctataatgagaattacaaaatactgctgaaagaaatctgaggtgacaaaaataaatggagaaatattccatgctcatggataggaagaatcagtattgttaaaatggccatactgcccaaagcaat

SEQ ID NO: 623793 - DNA, 597 bp, Homo sapiens
agactactttgtcagttaagataggctaggttgtggtacaataacaaacaattctaaaatctcagtggcttaatacaacacaggtttatttatcactcactgtatatgtcctagttttgcctggttctatggttacattgcccatttcatccaaattttttatattcattggttgttcrtagtatcttcttatgatgttaatatttgcaagatttgtggtggtctttttcatgcatgatactaataatttgtgccttttctgtttttcttgatcattcttgctaggggtttatacactttattagcttttccagaggactagcttttggctttgttggttttctttctattgaatgtttattttgcattttgttgatttttgttcttatcattattttatttcttatgtttgggtttaatgtgcttttgtttttcaagctttttgagatgggtactgtattagtttgttttcacactactgataaagacatacctgagattgggcaatttacaaaagaaagaagtttaatggactcacagctccccatggctgaggaggcctcacaatcatggtggaaggtaaaaggcatgcctcac

SEQ ID NO: 623794 - DNA, 597 bp, Homo sapiens
agactactttgtcagttaagataggctaggttgtggtacaataacaaacaattctaaaatctcagtggcttaatacaacacaggtttatttatcactcactgtatatgtcctagttttgcctggttctatggttacattgcccatttcatccaaattttttatattcattggttgttcatagtatcttcttatgatgttaatatttgcaagatttgtggtggtctttttcatgcatgatactaataatttgtgccttttctgtttttcttgatcattcttgctaggggtttatacactttattagcttttccagaggactagcttttggctttgttggttttctttctattgaatgtttattttgcattttgttgatttttgttcttatcattattttatttcttatgtttgggtttaatgtgcttttgtttttcaagctttttgagatgggtactgtattagtttgttttcacactactgataaagacatacctgagattgggcaatttacaaaagaaagaagtttaatggactcacagctccccrtggctgaggaggcctcacaatcatggtggaaggtaaaaggcatgcctcac

SEQ ID NO: 623795 - DNA, 611 bp, Homo sapiens
ctatttttgattactgctgtcttcactacctacatgagtgctggcacatagaaatttcagtagttattgatcatatgaatgaatgaaagattgggagataggaatgcaaaggcaaggatgtgagaaattttaaggaaatgtaaaactaatttggtctgattccttctgagatcccttattgcaccaccacagagcattgtgtcaccttcttccttagactcttgctgagtgctgactctactaaggggaaagaagcatgttttgttgatggtggtaatgactaactttccttctcccttctagataatgttgctttgtgccttcaccactaccaaacgatcacttctagatttctcagaaagggcttttctctttggccaagacacaaggctcttctgcagagctatggacttcctggttcccgtttatcatcacattatagacattgggattggaggagaggaaagttggaatttttggttaatggcttcagcttccttagtgtgtaggaggttaggtcatctgttaagagggaggagggaggatgaaatttggaacctttactgacgggattaggacagrcagttgataagagaaaacagaggtgttga

SEQ ID NO: 623796 - DNA, 610 bp, Homo sapiens
tgccaccgcagaaatgttccctgcaatcacaatagcttgagacttgctggcatattaattcattttttttaaattatactttaagttctggggtacatgtgcagaacatgcaggtttgttacataagtatacaygtgccatggtggtttgccacacccatcaacccgtcacctacatttggtatttctcctaatgctatccgtcccctaggcccccccaccccccgacagtccctggtgtgtgatgttcccctccctgtgtccatgtgttctcattgttcaactcccacttacgagagagaacatgcggtgtttggttttctgttcttgtgttagtttgctgagaatgatggtttccagcttcatccatgtagaaagattcttggtatggttgcactgctctctctccaattgtatttccttctcccaaagtaccaacgtattatcctgccactccctagaaacccttgggcttctgctagtctaagacagagaacttatcaaatgtgccatggattttaaaactgccaattcaatatcaattaacgtaagtttcactggaaaaatgagaatatctctcaaagaactttgtttagaaaaaccagaaaagc

SEQ ID NO: 623797 - DNA, 610 bp, Homo sapiens
tgccaccgcagaaatgttccctgcaatcacaatagcttgagacttgctggcatattaattcattttttttaaattatactttaagttctggggtacatgtgcagaacatgcaggtttgttacataagtatacacgtgccatggtggtttgccacacccatcaacccgtcacctacatttggtatttctcctaatgctatccgtcccctaggcccccccaccccccracagtccctggtgtgtgatgttcccctccctgtgtccatgtgttctcattgttcaactcccacttacgagagagaacatgcggtgtttggttttctgttcttgtgttagtttgctgagaatgatggtttccagcttcatccatgtagaaagattcttggtatggttgcactgctctctctccaattgtatttccttctcccaaagtaccaacgtattatcctgccactccctagaaacccttgggcttctgctagtctaagacagagaacttatcaaatgtgccatggattttaaaactgccaattcaatatcaattaacgtaagtttcactggaaaaatgagaatatctctcaaagaactttgtttagaaaaaccagaaaagc

SEQ ID NO: 623798 - DNA, 551 bp, Homo sapiens
aactttgtccaattatttgagcaatattttttataattttaaattttattttagatagagggggcacatgttcagttttgttagctggatatattgtgtsatgctgaggtttgggatatgaatatcccatcacccagatagtaagcatagtacccaaagttagtttttcaaccattgcccccttttcttcctcacctttctattagttcccatctttatatccatgaagcccaatgttagttcccatttttaagtgagaacttgcagtgtttggttttctgttcccgtgttaatttggttaggatatgcgttaatttggttaggatattggcctccagctccatctgtgttgctgcaaaggtcatgattttgttctttttttatggatgtatagtattccatggtgcatatgtgccacattttctttatccagttcaccactgatgggtactttggttgagtccatgtctttgctatagtgagcagtgctgtaataaacatgcaaatgcatgtgtctttttggaaaaattattttcttttgaacatatact

SEQ ID NO: 623799 - DNA, 552 bp, Homo sapiens
ctttttctttctttgttgctgcgagaaagcttcttctggtatctgtttctccttgccttcggctcaaaataatccttatgccaaagtggcatattttaggktggcatattctgctagctttctctttattattcccttttcacatttcccccaaacattatcatgaagggagggatttatataagacaaatccgtcatggttaaggactctttgagagggaagtggtcaacagagaaaatccatgtagcatccccagcctcagatttccctttggtcatcccctaattctcttcttttcctgtctccctcataacagactttccatccccaccatgcacctcatgatatctcagatccccattctcctccccttatgaagaataacaggacacaaagacagtagctaatgtttaagaaggtttaaaatgggaaaatgacgaaagatattatttaaaatgaggtataacagaaaactttaaatctgaatgtataattggactgtgactagttgattattaataatgtaattcattatttgatttaaaagaata

SEQ ID NO: 623800 - DNA, 544 bp, Homo sapiens
tttggaactatgaaatttaagatggatatatatacaaacacacgtatatatgtaggtatacacacacacacataaagctttctgccctcctatttgcctgaaagcagaacataaatttacaaacctttcccttctcccttctctaccaggaaggtcaaaagttcctccccggagatgactttggacccttatgagcctggagacaacaccagagtaatccacattacaaactctaccaactaacctatttttttcatctgcttttcttccaaatccagtaacgtatccaccttgttaaggacaagttgacaaaaatggctgaatgatrtcaggctggctgagcttctagaccttgactgctcccaactgtcgcaagcaccgctcaatagtttttcaacattctagggtgcctttgagctccacccaaagctcaaatcatttgaattcttaaagatgccttatagactaccttcaccattacaatgtcataaggttctttccagataattcagcacagagttggccttccattaagaccatttct

SEQ ID NO: 623801 - DNA, 544 bp, Homo sapiens
tttggaactatgaaatttaagatggatatatatacaaacacacgtatatatgtaggtatacacacacacacataaagctttctgccctcctatttgcctgaaagcagaacataaatttacaaacctttcccttctcccttctctaccaggaaggtcaaaagttcctccccggagatgactttggacccttatgagcctggagacaacaccagagtaatccacattacaaactctaccaactaacctatttttttcatctgcttttcttccaaatccagtaacgtatccaccttgttaaggacaagttgacaaaaatggctgaatgatgtcaggctggctgagcttctagaccttgactgctcccaactgtcgcaagcaccgctcaatagtttttcaacattctagggtgcctttgagctccacccaaagctcaaatcatttgaattcttaaagatgccttatagactaccttcaccattacaatgtcataaggttctytccagataattcagcacagagttggccttccattaagaccatttct

SEQ ID NO: 623802 - DNA, 568 bp, Homo sapiens
ctgccctcctatttgcctgaaagcagaacataaatttacaaacctttcccttctcccttctctaccaggaaggtcaaaagttcctccccggagatgactttggacccttatgagcctggagacaacaccagagtaatccacattacaaactctaccaactaacctatttttttcatctgcttttcttccaaatccagtaacgtatccaccttgttaaggacaagttgacaaaaatggctgaatgatgtcaggctggctgagcttctagaccttgactgctcccaactgtcgcaagcaccgctcaatagtttttcaacattctagggtgcctttgagctccacccaaagctcaaatcatttgaattcttaaagatgccttatagactaccttcaccattacaatgtcataaggttctttccagataattcagcacagagttggccttccattaagaccatttcttcacttcattgtatccaaattcagcaatcctaggttttaaatttgcatttttgtttacayataggtcaggaactgccatttattaccttgtggcaagccattttg

SEQ ID NO: 623803 - DNA, 537 bp, Homo sapiens
atttttagttgacacctagtaattgtacatatttataagatacagggtagtatytcagtccatatatatgatatagaataatcaaagcagggtagttagcatatccatcacctcaattgaaaatatataataaattattgttaaccttatttaccctacagtgttataaaacaatagaacctactctttctatttagctataattgtgtatctgttaaccaacctcttctttcctatctacccctctacccctctcagcctctgataatcaaaattctactccctaactactacgaactcaatgttttttagcttccagatatgtgagaacatgtggtatttatctttctgtgcctgacttatttcacttaacatgatgttcgccaggctcatccatgttgccatggatgacaaggtgtcattcttttatatggctgaatagtattcccttgtgtatataacatattttctttatccatcactctgttgatggacatttaggttgattccatatcttagctattgtgaatggtgctg

SEQ ID NO: 623804 - DNA, 537 bp, Homo sapiens
atttttagttgacacctagtaattgtacatatttataagatacagggtagtatctcagtccatatatatgatatagaataatcaaagcagggtagttagcatatccatcacctcaattgaaaatatataataaattattgttaaccttatttaccctacagtgttataaaacaatagaacctactctttstatttagctataattgtgtatctgttaaccaacctcttctttcctatctacccctctacccctctcagcctctgataatcaaaattctactccctaactactacgaactcaatgttttttagcttccagatatgtgagaacatgtggtatttatctttctgtgcctgacttatttcacttaacatgatgttcgccaggctcatccatgttgccatggatgacaaggtgtcattcttttatatggctgaatagtattcccttgtgtatataacatattttctttatccatcactctgttgatggacatttaggttgattccatatcttagctattgtgaatggtgctg

SEQ ID NO: 623805 - DNA, 469 bp, Homo sapiens
tgttagaagaaatttgccttaatgttattcttatttctaacagggtcatattacagaaagtgaaaagtctgtgttgtagtgaagttccaaattgtgactaagccttatgctgctgttgtgatttagccttactctgctattgtgatttagccttattctttttatgttcttatatttttttactcagtgatataaatgaatccaaatttatctggggattgcatgactatttacttatgaataataaactcatcttaaaaatggagactagactgtggagtaagtttgtaaaatcttttgtacctgagtctattgattgttactaaactctggatcctgaagctaagatgacattttgaagctcttgtckgatgcaactgcttcagacagccactacggaaacaacctgatccagaagatgatcctttttagctcaaacaaatactttgaaaatttgaaagtttggagg

SEQ ID NO: 623806 - DNA, 570 bp, Homo sapiens
  misc_feature 544, 545, 546, 547, 548, 549, 550, 551, 552, 553, 554, 555,556, 557, 558, 559, 560, 561, 562, 563, 564, 565, 566, 567,568, 569, 570: n = A,T,C or G
catgttcattcagagctggtgactctttctggaccacaagtagggtactcagatccttggtgttctctgcacagaaggtccccagactgtcccccaaacttgtatagacttctgcycagtgtgtcctcctgagcataaaccatccatggtgtgcacagcccaggtaggcttgtgagctggaatgtccacaggtaggtatgtggaccaccttgaggtgtgggatgaaatggggggcataagggcaggagtttgcatgaatgcagccagggtgctgccacactcccttgggccattgaattttggcctagaacttcaaggagttcaagaattccttgtttttgatttttcaattaattaattttttagttgacaaaatttttatatatttatggcatataatatgttttgatatatgtatatattataaaatggctaaattaagctaatgtacatatccattacttcataacttttttgtgataagaacactttaaatcaactctcttagcaatttcaagcatacaatacatagttattaactaannnnnnnnnnnnnnnnnnnnnnnnnnn

SEQ ID NO: 623807 - DNA, 570 bp, Homo sapiens
  misc_feature 544, 545, 546, 547, 548, 549, 550, 551, 552, 553, 554, 555,556, 557, 558, 559, 560, 561, 562, 563, 564, 565, 566, 567,568, 569, 570: n = A,T,C or G
catgttcattcagagctggtgactctttctggaccacaagtagggtactcagatccttggtgttctctgcacagaaggtccccagactgtcccccaaacttgtatagacttctgcccagtgtgtcctcctgagcataaaccatccatggtgtgcacagcccaggtaggcttgtgagctggaatgtccacaggtaggtatgtggaccaccttgaggtgtgggatgaaatggggggcataagggcaggagtttgcatgaatgcagccagggtgctgccacactcccttgggccattgaattttggcctagaacttcaaggagttcaagaattccttgtttttgatttttcaattaattaattttttagttgacaaaatttttatatatttatggcatataatatgttttgatatatgtatatattataaaatgrctaaattaagctaatgtacatatccattacttcataacttttttgtgataagaacactttaaatcaactctcttagcaatttcaagcatacaatacatagttattaactaannnnnnnnnnnnnnnnnnnnnnnnnnn

SEQ ID NO: 623808 - DNA, 570 bp, Homo sapiens
  misc_feature 544, 545, 546, 547, 548, 549, 550, 551, 552, 553, 554, 555,556, 557, 558, 559, 560, 561, 562, 563, 564, 565, 566, 567,568, 569, 570: n = A,T,C or G
catgttcattcagagctggtgactctttctggaccacaagtagggtactcagatccttggtgttctctgcacagaaggtccccagactgtcccccaaacttgtatagacttctgcccagtgtgtcctcctgagcataaaccatccatggtgtgcacagcccaggtaggcttgtgagctggaatgtccacaggtaggtatgtggaccaccttgaggtgtgggatgaaatggggggcataagggcaggagtttgcatgaatgcagccagggtgctgccacactcccttgggccattgaattttggcctagaacttcaaggagttcaagaattccttgtttttgatttttcaattaattaattttttagttgacaaaatttttatatatttatggcatataatatgttttgatatatgtatatattataaaatggctaaattaagctaatgtacatatcyattacttcataacttttttgtgataagaacactttaaatcaactctcttagcaatttcaagcatacaatacatagttattaactaannnnnnnnnnnnnnnnnnnnnnnnnnn

SEQ ID NO: 623809 - DNA, 587 bp, Homo sapiens
tgtcgcccaggctggaatgcagtagtgcgatctcagctcactgcaacctccgcctcctgggttcaagcgattctcctgcctcagcctcctgagcagctgggattacaggtgcccgccaccatgcccggctaattttttgtatttttagtacaaacggggtttcactgcgttagccaggatggtctagatctgctgaccttgtgatccacccaccttggcctcccaaagtgctggaattacaggcgtgagccaccgcgcccggccaggtttctcttattttctgcttctcttgcccaaatgtaagacaggattcactgtggctagcatttgtcttcctcaagggactagcaccctgtcctcaggaccagytgggctgggatggagaaagaaaggatagagtggagcctgccaccctgcctagcttttgccccagcttcctttcctggagagctagatctcatccccagtacctgtggcttgttggatggaagcctttgctaggtttgccaatccactgcagccacagaggatgctatcactcatcggttttgagcaacactttcttgctgaaaacaactacaatgtcc

SEQ ID NO: 623810 - DNA, 559 bp, Homo sapiens
ctatgcgtgtgtcattaatccttttacctcttcagagtgcatccagtgcagcccaagaggcgtcatgcattctcttccccttgtttgcygagctcctgccccgggccaggtgcagctctgagtgctggtgcagagttggccatcagtcacagctagggcttactgctttggagcatttcactttttttcaattgtgaagttggcctcactagtacctggatcaccccttggggttgcagggtaattaaaggaaggtgaggatctctccctggtaggggaaatttggagcttttataatccttaaacagacaggggatcatgtcagaggcaggcaacgtggccccttgaacctgccccaaaggtgtgcatttttgattaagacttagacaagtccaagcacctgctgtgccagagcagcctcccccaagttccctggcagacacagctcaacgcactgtcactagccccgacagtggtgggggtggggccagcagagctgggcaaacttgcctgtcctgcagctcccccgtgcctgggaaagcccctctgtctttttttc

SEQ ID NO: 623811 - DNA, 559 bp, Homo sapiens
ctatgcgtgtgtcattaatccttttacctcttcagagtgcatccagtgcagcccaagaggcgtcatgcattctcttccccttgtttgctgagctcctgccccgggccaggtgcagctctgagtgctggtgcagagttggccatcagtcacagctagggcttactgctttggagcatttcactttttttcaattgtgaagttggcctcactagtacctggatcaccccttggggttgcagggtaaytaaaggaaggtgaggatctctccctggtaggggaaatttggagcttttataatccttaaacagacaggggatcatgtcagaggcaggcaacgtggccccttgaacctgccccaaaggtgtgcatttttgattaagacttagacaagtccaagcacctgctgtgccagagcagcctcccccaagttccctggcagacacagctcaacgcactgtcactagccccgacagtggtgggggtggggccagcagagctgggcaaacttgcctgtcctgcagctcccccgtgcctgggaaagcccctctgtctttttttc

SEQ ID NO: 623812 - DNA, 559 bp, Homo sapiens
ctatgcgtgtgtcattaatccttttacctcttcagagtgcatccagtgcagcccaagaggcgtcatgcattctcttccccttgtttgctgagctcctgccccgggccaggtgcagctctgagtgctggtgcagagttggccatcagtcacagctagggcttactgctttggagcatttcactttttttcaattgtgaagttggcctcactagtacctggatcaccccttggggttgcagggtaattaaaggaaggtgaggatctctccctggtrggggaaatttggagcttttataatccttaaacagacaggggatcatgtcagaggcaggcaacgtggccccttgaacctgccccaaaggtgtgcatttttgattaagacttagacaagtccaagcacctgctgtgccagagcagcctcccccaagttccctggcagacacagctcaacgcactgtcactagccccgacagtggtgggggtggggccagcagagctgggcaaacttgcctgtcctgcagctcccccgtgcctgggaaagcccctctgtctttttttc

SEQ ID NO: 623813 - DNA, 517 bp, Homo sapiens
tttatgcatcaaaagtgacggataatttggtttctctgaagtacaatttctgtcgaaaaggcacggaatcacacttagttctttctcttcgattaaggagtcacttcagttgtggcaagggaggctttactgtttkgaattttgctttctcttttttgagtatcattatgtgcacatggattatattattcaatgtgtttcaattgagcacagttattattctcttttgggctcaagttgtcccaaatttagtcagtgggagctccttcaagctggttcctatgtccttttgatatgtccctatttgtctttgagaacttctttgttttatggaataacccatcatcccaggctcaccttataaattgcctgccccagacctggaattagccacttctccaaggaaccctcgtggggaatggtatttagaaaccaagatctaggtactggtggtgatcattgttattgaaactttgggccatcattgcttctggatcaattgctctatctatctatc

SEQ ID NO: 623814 - DNA, 548 bp, Homo sapiens
agggggtagaggacaccggatgggttagcagaagacactgcctgctagccaggtggaccgtggccagggccactcaaccttgagcctcagctgcacttcwttcaagctaccacagttgactttgaaacctcgagaccagttcattctgtgcggcagcatttctctgtcttgctcaccttgcaaaatgtaaactctccatgtatccttcctctcctctgctcccacctgcagtttcttctgggcttcctgtaactagagttcccatggctcctctcctatgaaaagttttccatgtaccctctgggaccctttagtcaaatccatttcacctacttctgcacctacgcctacacagaataccttctacctctttgccttcctgaagctcggttgtcctggaatagtcctggcatcccttggaggaggatgctaatttgactacccctcagggctgcagatgggattcgcatccttctaaagtccctgaatcaattttcaaacaattgcccttcctttcttcagtaaaaggaccctcaattggccaggca

SEQ ID NO: 623815 - DNA, 548 bp, Homo sapiens
agggggtagaggacaccggatgggttagcagaagacactgcctgctagccaggtggaccgtggccagggccactcaaccttgagcctcagctgcacttcattcaagctaccacagttgactttgaaacctcgagaccagttcattctgtgcggcagcatttctctgtcttgctcaccttgcaaaatgtaaactctccatgtatccttcctctcctctgctcccacctgcagtttcttctgggcttcctgtaactagagttcccatggctcctctcctatgaaaagttttccatgtaccctctgggaccctttagtcaaatccatttcacctacttctgcacctacgcctacacaraataccttctacctctttgccttcctgaagctcggttgtcctggaatagtcctggcatcccttggaggaggatgctaatttgactacccctcagggctgcagatgggattcgcatccttctaaagtccctgaatcaattttcaaacaattgcccttcctttcttcagtaaaaggaccctcaattggccaggca

SEQ ID NO: 623816 - DNA, 538 bp, Homo sapiens
cctccgcctcccgggttcaagtgattctcatgcctcagcctcccgagtagctgggattgcaggcacacaccaccacgcccagctaatttatatattcttagtagagacggggtttcaccatgttggccaggctggtttcgaactcctgacttcaggtgatttgcccgcctaggcctcccaaagtgytgggattagaggcgtgagccactgtgcccagcctgctatgtgctattgaactgtgagtcaaggttattattagaacagatcactatctttagagtcttagactctgtttggggttacacaatggaaacaaatgaaataattaggaaattatgaaatcaaatctcaaaagcaagagctgtggtgtttaattcaagagatgctaattacatgtgtgtatttaaatttgttattaaattgcataaaatttgaaattcagttcctcagttttgctagtcacatttcaagttcttaataatcatatgttgaggctagttgctaccatattggatagtgtagatagagaacatttgta

SEQ ID NO: 623817 - DNA, 570 bp, Homo sapiens
attgtaagtaaatatccagatactaccctgtggcctttattggggctacagatcactaatacagagaacacacatgctagagacagggaaaaaaatccatcaacacagactttttgaggcccagttaggataaaagcagttagtctgggacacctgaatgtctctttctcagtgacagcacccctcgccatagttaatttcattctttgtaggcttttaaagcacttttaaattatatttattatagtactyactgttgcattatgcttcatatttccatgactgtcttccccattagactgtgaacttatcaaagggagggatatttccttactcctgccatatactaggtgttcaataaacattagtcagttgaactgagtgtagaataatgcctataaccaagaatcattcatgttgtaaagtaattcttcagcctaaaagtgaattgtgttttgttttaatttagacatactaaaaataaaaacattttttctttgattctttccatttagaaaattttcattctctttacaaaataaaggtaacctttaaaaagtttcctccaaa

SEQ ID NO: 623818 - DNA, 547 bp, Homo sapiens
ccaacactgaggattacaattcaacttgagatttgggtggggacacagagccaaaccatatcacctaycaaataatatctttggcttttgagtaatattttagacattatatatcactttcatacacacatacgcatacacacgatccaactgcatttttgcaacataatggattatttttaaaacacaaacaatgtgcatatgcttacctttactgtgacatcaaagaccctaatgccattgaacttacctgttttcaaaatagaagtactaaaatttcatcaggtggtttttaaacaagcaaatttatatctttaaaatatggaggtgaaattattaataacactaggcaattctgttcaagtttatttagtaaatctgctgtgctttccacttgttaatatggaaatctatagagatattaaaatgcaatttatattgtgtttaaagaaaatgatttttgcttaatacaatacaaagccgttgaaggctaatcccatggcatatgcccctccttgaactaccaaataccattgagaggagtgag

SEQ ID NO: 623819 - DNA, 547 bp, Homo sapiens
ccaacactgaggattacaattcaacttgagatttgggtggggacacagagccaaaccatatcacctatcaaataatatctttggcttttgagtaatattttagacattatatatcactttcatacacacatacgcatacacacgatccaactgcatttttgcaacataatggattatttttaaaacacaaacaatgtgcatatgcttacctttactgtgacatcaaagaccctaatgccattgaacttacctgttttcaaaatagaagtactaaaatttcatcaggtggtttttaaacaagcaaatttatatcyttaaaatatggaggtgaaattattaataacactaggcaattctgttcaagtttatttagtaaatctgctgtgctttccacttgttaatatggaaatctatagagatattaaaatgcaatttatattgtgtttaaagaaaatgatttttgcttaatacaatacaaagccgttgaaggctaatcccatggcatatgcccctccttgaactaccaaataccattgagaggagtgag

SEQ ID NO: 623820 - DNA, 385 bp, Homo sapiens
actgacataagtaaacagataggcccgtgtaccaataaaactttatttacaaaaaggggctgccagttgtatttggccaacaggccatagtctgctgtatcttctttgcatttctctcagtttgaatttataattacagaatatctacttcattaaggaygattagcctaaaaatatccatcaactttaggaaatttctaatatggctgccatgcattgaggaagatacagaaaacagatgatatctttcatgtccttatgcacataattttgttggatataccttacacaaacagacatatgttgctatggcctgaatgtttgtgtctcctgcaaaattcatattttgaaaccaaattcccaatgcaatactatgaaaatgtgg

SEQ ID NO: 623821 - DNA, 567 bp, Homo sapiens
ttgtagtcaccctattgtgctaccaaacactagatcttatttctactatataactgtatttttgtattcatcaatcaacccctcttataattaattaatattggcaccagcacagggtcaaatgagaatcaatacatcacattccttatagccaagaagctgatcaaatgtttgtcaacaaaacaaagataagatctttataaaatatgtgttgaatattagccattgagtgcaagctgttgacattggccaaggtgtacacttttaccattttatgtgtgtgtgtgtgtgtgtgtgtatcatgtcaatgatagcatctcacatttaattggttattactcatcagtcattctgttggtcttcacaacaatcctaaacactgttatctctttttatgggtgaaggaactgaggctaaaggagcycatgacattaacttgtaagtagaaaaattgagctcagctgacttgtgcttttcattggtatgattttttattatttaaaatattttaaaaatatttttgtagagatggggggggggtctcaccacgttgcctaggttggactc

SEQ ID NO: 623822 - DNA, 620 bp, Homo sapiens
tggtggtacacgcctgtaagtcctagccactcaggaggctgaggtgaaaggattgcttgggccccagaggtcgaggctacagtgaggtgtgtcataccactgtactccagcgtgagcaacagagcaagaccctgtctcaaattttaaaaaaattttaattaacaatatatattcacaaagggtttagtcaatggcttgactcatataaacacccactgacaggcagcattgttattaatactattggtaatattgttcgatactgacctgtaccagggacttaggttataccaccagtcagttagggcagctttctgggattaaggagttatttgaatgggagggcttgctgatgttctttctgactctccgttttcatcctaaaagcaataaataaatcaagtttacctttgggaaaaacctgtattggggcttgatgaggcttcagggartgccatcctgccctccaaagcaccctatgtgtttattgatgtcagcaatgggggccaaagtgtatccaataatcgagttcagatgctgctcaaggtaagtcagtggcttgaattcattcacgctgaggtgggatcagtaggtcggtcgggaaggatacctaatttgtg

SEQ ID NO: 623823 - DNA, 365 bp, Homo sapiens
aacttgctttacctaatgggatcttagcaaacatgacacaggcagagacgtgaaaaggggggttcattggagttggccttttgcttcttttggggaccctgtgactgctagctaccatgtgaagaagccctcattggacaatgagagacccatggcctactcattctatttccttggctgccagtcgccagtcaagtgaatgaatgaagttattatagattgtccagacatgarcagatctatcacctgaccacagacacagagaaaacccaactgagatgatctgaacctgcctggactggaacagcccagctgactcacagaagagcaagctgaataaaaggctgtggtttaagccgcaaggt

SEQ ID NO: 623824 - DNA, 540 bp, Homo sapiens
gctttggggctgctgctgggggttggggaagggatggcatcagcaattcaagattgtctttcctaccctcttcagtgcctctttcagtgatatgaagttaaaatcaggcactgtgattactcacttaatgtttggttcttatgaaggtgcttgtgtgtgtgtgtgtgtgtgcatgtgtgtgtgtgtttgtgtgagtgtgtagatagctgttaaacttgatatttcttcagggaggatgattggtggaagcttgtattcatccattttgttccacctcctgctactctgtgactttcttatgagatataacacataattttattccacatgagcctcaatttccacattgtaaaactgggttgataataccttcctcatagggttttttgatggttaagtttttaaaaatgtatatgctagagagctttttaaaaataagttgtaaagagattatagacagtccccaacytaggatggttccacttactatttttcaactttttagtggttcaaaagcaatatacatttagtacctcctca

SEQ ID NO: 623825 - DNA, 517 bp, Homo sapiens
atccatttaattttatctgtctcattttttcttcattttgaagaaatctttatgtagcctccaaactagacaaatttactttttctttagcaaaaaaccacatcctcatgttatttataacctttaccaaaacgcatcttagtttctttatgaactctgcatgtagaattctcttatatctagtagttttaattatatttattaacaactattctaactaagtaaccctaatttacagtgaaaaacctggrattacctaatataacatgatctctagattttaaattactaaagaaattttacaactagttttacttatcaaagattcctaaagtctcatgagctaacaggcatttgggctagcatgttgttctgatatttgatttaagcacttaatttcctttaagcctattgattagagtgctttcataaaatttggtagtgaaacatcacatacacatgccacatagaaacatatagacacatagaagcagatcttacagagttataagatttt

SEQ ID NO: 623826 - DNA, 590 bp, Homo sapiens
tgtgaattattctcaaactcttccaaaaagttgaacaggaaggaacacttccaaatccattttatgaggctaacattaccttgataccatagttggatgaggactgtatgagaaaataaaattataggccaatatctctgatgaacatagatgcaamaatcctcagcataatattaatactagcaaaagatggtccaatatatgcaaatcaataaatatgatacaccacattagcaggaggaaagataaaaataatataattatgtcagcagatgaataaaaagcatttgacacaattcaacatccttttagttaacatcatactcagtggtgtaaagctgaaattgttttctttaatattgggaataagacagggttgtccactcgcaccacttctgttcaacatagtgctggaagtcctagccatactaattaggcaagaaaaagaaataaaaagcattcaaattagaaaagaagaagtaaaattgtttctgttttcaggtgacatgatgatcttatatgtagaaaactctaaagactccactgaaaaaaaactgtaccaaaactctgccaaaaactaagaactaata

SEQ ID NO: 623827 - DNA, 578 bp, Homo sapiens
acttatattttactatcattaactggatatcccaagccaatatccagttaataatacagagtaaagtcgctgtggtcactcaagcacctcatttggcatctgaggtggacttaagtggggaccgaaaaaccatgaaaaaatggtgcggacctagcttaactaaactgccacgggtaggttatcagcagccagaactgagacagaagcatcacactcctgaaatagcagtattttttagaaacccatcaaataatggaaattgccttyctcccttactccatctactgcttaagggcaagctgtcctccttggtagattttagccaattagctttgcaaaaaaactctgttcaaaagactttctgcaatgtttgcttttaaagctttgcctttgctcagtgagacaatgtatacatgcttggtcccccttatataggagttaattttagctgtattctaaatcaggggtgggcagactttattctgtaaaaagccaaatagtaaatattttaagctttccaggtcatatgatttctattgtaactcctcaactctactgttgttggcaaaaacgggcac

SEQ ID NO: 623828 - DNA, 517 bp, Homo sapiens
ttggaaagtactatgtttggagccgagggatagtcaaataatttctcaacatacttctacaaaaagaactttaaggaagcctctatagaggaaaataagccttgatgagactattartcagggtactctggagggacagaactaataggatatatgtatatatgaagggaagtttattaaggagtattgactcacacgatcacaaggtgaagtcccacaagaggccatctgcaagctgaggagcaaggaaaccactttgagtcccaaaatctcaaaagtggggaagctgaaagtgtagccttcggtttgtggccaaaggcccaagagcccctggcaaaccactagtgtaagtccaagagtcaaaaagctgaaaaactttgagtctgatgtctgagggcaggaagcatccagcacaagagaaagatcaaggcaagaagactcagcaagttggcttctcccgtcttcttctgcctactttattctagccatgctgacagttgattagatgttgcccacc

SEQ ID NO: 623829 - DNA, 523 bp, Homo sapiens
aagtaaactttaacaaattgactaaatcaaatgttagcattgcatttgaaactgtgtctatttctctttctcttcatatccccttctatctctcaacctccaccccaaaaggtaaccactatctggaatttgtatgcatccttcctgtcacaatttaacaggatacctttaatcaaggccaggaaactggatgaagtgggggatgaagaccccactaactgaaaaggcagctctctgtcacgcatggcctacaattggctggcaagaccttgagrctattttcctttggaaaatatgaaccattggaattaatggttccattaattgaaccattggaattaataaagaccccagacttggctatcttccaagctaatttgatgtggctagtacagaaatgccaattccacactgctgtgcaaaaagcttaaggttttgactaggaaacaggagaatctggcacagaaaaccttcacaaaccgatgattgtcctggtgttttatgcccagtaattgactgcagc

SEQ ID NO: 623830 - DNA, 523 bp, Homo sapiens
aagtaaactttaacaaattgactaaatcaaatgttagcattgcatttgaaactgtgtctatttctctttctcttcatatccccttctatctctcaacctccaccccaaaaggtaaccactatctggaatttgtatgcatccttcctgtcacaatttaacaggatacctttaatcaaggccaggaaactggatgaagtgggggatgaagaccccactaactgaaaaggcagctctctgtcacgcatggcctacaattggctggcaagaccttgagactattttcctttggaaaatatgaaccattggaattaatggttccattaattgaaccattggaattaataaagaccccagacttggctatcttccaagctaatttgatgtggctagyacagaaatgccaattccacactgctgtgcaaaaagcttaaggttttgactaggaaacaggagaatctggcacagaaaaccttcacaaaccgatgattgtcctggtgttttatgcccagtaattgactgcagc

SEQ ID NO: 623831 - DNA, 609 bp, Homo sapiens
gcaatggcacgatcttggctcactgcaacttctgcctgccaggttcaagtgattctccagccacagcctcccgagtagctaggattacaggtatgcmacaccatgcccagctaattttttgtatttttaacagagacgaggtttctccatgttggtcaggctggtctcaaactcccaacctcaggtgatgtgcctgcctcagcctcccaaagtgttaggattacaggcgtgagccaccacgtctggccgcttttgacattttcatcatgaaatctttgcccatgcctatgtcctgaatttattgcctagattttcttctacggtttttatagtttggggttttacatttaagtctttaatccatcttgagttaatttttgtataaggtgtaaggagggggtccagtttcagttttctgcatgtggctagccagttttcccagcaccatttattaaataaaaaaattttctccattgcttgtttttgtcaggtttgtcaaagatcagatggttgtagatgtgtggtgttatttctgagatctttattttgttctgttggtcaatgtgtctgtttttcggctttatgttttttaaccagtaccatgctgtt

SEQ ID NO: 623832 - DNA, 545 bp, Homo sapiens
tagttttgaagtcacgtagcgtagatgccttcagctttgttctttttcttaggattgtcttggctatatgggctttgttttggttccatattaaatttaaagtacttttttctaatcctttgaagaaagtcaatgataacttgatggggatagcattgaatctataaattactctgggcggtatggccataaaatattttttaatccaaatagctcaaaaaatggtgatgtaatattatgtattcattaataaaaaygaagatgattacattcatttttgttgaaaatacttttcaaaaaatatatcttcttgggaaaactattgctattacctcaagggatgtgaacaatatcttcatcttattggatgtttttacttcataatacatgtaatttggaggcacttttccttggcggcaatagcacatttagtttttcatccattgaagcacatttattgatttcctcctatataccagacactgctagattaaaaaaataagtgtaaacaaaacaaacatattcaatgtccttatagaatttag

SEQ ID NO: 623833 - DNA, 545 bp, Homo sapiens
tagttttgaagtcacgtagcgtagatgccttcagctttgttctttttcttaggattgtcttggctatatgggctttgttttggttccatattaaatttaaagtacttttttctaatcctttgaagaaagtcaatgataacttgatggggatagcattgaatctataaattactctgggcggtatggccataaaatattttttaatccaaatagctcaaaaaatggtgatgtaatattatgtattcattaataaaaacgaagatgattacattcatttttgttgaaaatacttttcaaaaaatatatcttcttgggaaaactattgctattacctcaagggatgtgaacaatatcttcatcttattggatgtttttacttcatratacatgtaatttggaggcacttttccttggcggcaatagcacatttagtttttcatccattgaagcacatttattgatttcctcctatataccagacactgctagattaaaaaaataagtgtaaacaaaacaaacatattcaatgtccttatagaatttag

SEQ ID NO: 623834 - DNA, 571 bp, Homo sapiens
  misc_feature 1, 2, 3, 4, 5, 6, 7, 8, 9, 10, 11, 12, 13, 14, 15, 16, 17,18, 19, 20, 21, 22, 23, 24, 25, 26, 27, 28, 29: n = A,T,C or G
nnnnnnnnnnnnnnnnnnnnnnnnnnnnntgtaaattgttatacatattttaaaggttatttcagaagtttaaaggtataaactttgtaaacttgacactgtaattttagatacttgttctgaagaaataattgtggatgtataaaatgatataaaatatataaggtcttgactttataaagagaaaaattggaaactggaaaatgggttcaataaattcttatatgtaatgaaaaacattatgcagctaataaaagtattattatcaaaacacttaatgacctagatcttggggttagcaaactatagccaaactatggcaaaatggcctgcaatctgctttgttttttaattttttcttttgaaacaactatatattcacgggaagttgcaaagagtacagaaaggtactctgtacccctcaactagtttcctctactggttaaatcttactacagtgcaatatcaaaccataaaattgacrttagtacaatatgtgtatagattcttgtaattacaagtacaatcaagatactaactcttccatcaccacacaaatctcccttgtgct

SEQ ID NO: 623835 - DNA, 607 bp, Homo sapiens
ctttgcagggacatggatgaagctggtaaccatcattttcagcaaactaacacaggaacagaaaaccaaatactgcatgttctcactcataagtgggagttgaacaatgagaacacatggacacagggaggggaacatcacacaccaaagcatgttggggtgtggggggtaaatagagggagaccattaggacaaatacctaatgcatgtggggcttaaaacctagatgatgggttggtaggtgcagcaaaccaccatagcacatgtatacctatgtaacaaacctgcacgttctgcacatgcatcccagaacttaaaggaaaattttaaaaaagaaaagtagtactagaattgatgtagaaagaatcctttctcagtcatgcattaagtactattaatctaaatatttatttgaactatttgaagaataagcagctgtccatgttactaggacatacattcctaataaaattttagattttatatttaataatctatcaaaaatttaatttattttgatcaattttgtagaagtaattactgtaatatgtcaaycctgaagaaatttataacacttagaccataatgactgaaaacaaatttaatt

SEQ ID NO: 623836 - DNA, 539 bp, Homo sapiens
tttaatttattttgatcaattttgtagaagtaattactgtaatatgtcaatcctgaagaaatttataacacttagaccataatgaytgaaaacaaatttaatttaaaatattaatatgcatatgtttttaactacagagaagtatgataaggtgatctgtaaaacattttaggccaggcacagtggctcatgcctataatcccagcactttgtggggctgaggtgtgaggatttcctgaggtcaggagtttgagaccaacagggtgaaactctatctctactaaaaataccaaaattagttgggtgtggtggcgcatgcctgtaatcccaattactcgggaggctgaggcaggagaatcgcttgaacccaggaggtgaaggttgcagtgagccgagatcatgccactgcgctccagctgagagacagagcaacatttcatttcaaaaaaaaaaaaaaaaagattttaaacataaaatacattaaattaatattaggtagtgtgattgctaattatatgtatcaccttgactaggccatg

SEQ ID NO: 623837 - DNA, 539 bp, Homo sapiens
tttaatttattttgatcaattttgtagaagtaattactgtaatatgtcaatcctgaagaaatttataacacttagaccataatgactgaaaacaaatttaatttaaaatattaatatrcatatgtttttaactacagagaagtatgataaggtgatctgtaaaacattttaggccaggcacagtggctcatgcctataatcccagcactttgtggggctgaggtgtgaggatttcctgaggtcaggagtttgagaccaacagggtgaaactctatctctactaaaaataccaaaattagttgggtgtggtggcgcatgcctgtaatcccaattactcgggaggctgaggcaggagaatcgcttgaacccaggaggtgaaggttgcagtgagccgagatcatgccactgcgctccagctgagagacagagcaacatttcatttcaaaaaaaaaaaaaaaaagattttaaacataaaatacattaaattaatattaggtagtgtgattgctaattatatgtatcaccttgactaggccatg

SEQ ID NO: 623838 - DNA, 539 bp, Homo sapiens
tttaatttattttgatcaattttgtagaagtaattactgtaatatgtcaatcctgaagaaatttataacacttagaccataatgactgaaaacaaatttaatttaaaatattaatatgcatatgtttttaactacagagaagtatgataaggtgatctgtaaaacattttaggccaggcacagtggctcatgcctataatcccagcactttgtggggctgaggtgtgaggatttcctgaggtcaggagtttgagaccaacagggtgaaactctatctctactaaaaataccaaaattagttgggtgtggtggcrcatgcctgtaatcccaattactcgggaggctgaggcaggagaatcgcttgaacccaggaggtgaaggttgcagtgagccgagatcatgccactgcgctccagctgagagacagagcaacatttcatttcaaaaaaaaaaaaaaaaagattttaaacataaaatacattaaattaatattaggtagtgtgattgctaattatatgtatcaccttgactaggccatg

SEQ ID NO: 623839 - DNA, 539 bp, Homo sapiens
tttaatttattttgatcaattttgtagaagtaattactgtaatatgtcaatcctgaagaaatttataacacttagaccataatgactgaaaacaaatttaatttaaaatattaatatgcatatgtttttaactacagagaagtatgataaggtgatctgtaaaacattttaggccaggcacagtggctcatgcctataatcccagcactttgtggggctgaggtgtgaggatttcctgaggtcaggagtttgagaccaacagggtgaaactctatctctactaaaaataccaaaattagttgggtgtggtggcgcatgcctgtaatcccaattactcgggaggctgaggcaggagaatcgcttgaacccaggaggtgaaggttgcagtgagccgagatcatgccactgcgctccagctgagagacaragcaacatttcatttcaaaaaaaaaaaaaaaaagattttaaacataaaatacattaaattaatattaggtagtgtgattgctaattatatgtatcaccttgactaggccatg

SEQ ID NO: 623840 - DNA, 608 bp, Homo sapiens
aaagggcagtgttccattgtagtttgtgtgaatggtgtgccaggagttggactggacacaacctccatgatgctgactggtggacctgtgtgtagactaaaaaccttcctaaaacaaaaaaagcattaatatgttatatcctttgactatatattatagactttgaagagacctgttaaaacagcgtctagttcattatgataaatcttcatatatgatatgatatatatgttacatatatgtgcacacacttataaacatacatttatacacccacacacatatatatakagagagagaaggagagagggaaagggagagatagagagagagagagagagagaattaacaaataggactgtataacctgtttcttgatctctaactctatatcaggcactgtgccaaatattttgtatgcatttaatatatatgacaacactgaaaagatagatgcttttatcttcatgaatgaaaatgctaagactcagtgaaagttaaatattttgaccaaagtctcataattggtcagtggcagaagtgagatacttagtcagatgtgtctgaatctacaatccatgttccaatctcccaaagagctttgatgt

SEQ ID NO: 623841 - DNA, 564 bp, Homo sapiens
ataaatgtttggggaaatgtaagccttaggaacctaatttgcatcaatcatttaaagtaggttacattcacaaaagattaaaaatagggctaccatacgatgcatcaatcccactgctgggtatatatacaaaagaaaggaaatcattatatcaaagggatagctacactcccatgtttgttgcagctttgttcacaatagccaaaatttggaagcaacctaagtatcyaccaacagatgaatggataaataatatgtggcacaaatacataatggagtactattgagatataaaaaaagaatgagattcagccgtttgcaacaacacagatggaactggaggtcattatgttaagtaaaataagccaggtacagaaagacaaacatcacatgttctcacttattcatgggatctaaaaatgaagacagttgaactcatggagaaagagggcagaaggatggttaccagagggtgagaagagtattgggttgtgttggcagggagatggggatgtttaatgagtacaaaaaaatattagaataaatgaataagtcctagtattt

SEQ ID NO: 623842 - DNA, 604 bp, Homo sapiens
aatgaaattgcagcatatctattgtcacaaaaacaaactagaaaatttatctagaaaatttatctatattttragcacagaactcaaaatataggtccattaaaaaagcaatttataatcctatataaacattatgatacctattactgtgtatatttatgcatggtaggtttgtggtaaaaatataagacaaacatattattgaaaatgataaacactaaattcactatggtggttacatcttgatatggactgaatatttttgtccatccaacatcaatatactaaaactttaatctccaatgtgatgggatttagagatggggcctctggaagttaattaggtcatgagaatggagtcctatgatggaattagtatccttataagaagagacaagaaagagtttgtttcatctctctctacactttgccatgtgaagatacaataagaagatgtctgtttgcaaaccaaaaacagggccttcaccaagaaccccactatactggaaccctgatcttacacttccagactctagaactgtgagaaggaaatgtttgttgtttaagtcatccagtctatggtatttgttacagcaccccgaac

SEQ ID NO: 623843 - DNA, 577 bp, Homo sapiens
tcaaaacagacaaatctattattttagaaaaacttatttctcctaaagttatataaatatgcctaagggtcttttgatgatggccaaataaacatctttattcttttgcttgtatctagaatatgagaacatgtaaatatccaaatttaataaaattgtattaagttcattgacaaaagcrctgggccattccccagttgtttaactagttcaggttcaggagttaaaggtttaggaattttaactggttaaacgttcaggagagcacggaaaggttaggctaaggcataaccttatttctgtttcctcagtggattaacaagaagcatttaaattgtgaccaaatctgtttatagaaaatgtacttattattttaattataatttaactagtgttacactaagccaattaagtgtgagtgacaaactgaaaatgttatttctatgaaaactaagttgaaagctttagacatattaaaaatattaagatgaattggtacagatataaatgttaaatttaatttagccagacaattataaatatagaagaaaataacataaacatcttaaataagtct

SEQ ID NO: 623844 - DNA, 573 bp, Homo sapiens
ttcattattaatgtagcagtctaaatagaggaaaaaggataaagagaaagaggagaaattgtttttgaggcaagttggttcttttcccagttttctaagttagtccaagctggtagtccagccccacgccaaacacataggtaaccaagcgacttctgaataaatgagtcatagtatctagaagaaaaaaaaattgcaaagcttatttttaaaacttgataaaactgagatagagagaattctagtgatttgctcaagatcgtaccaatagctagatgcaaagctgagaccaggacctagatatctgcactcagaatccactttttattatgacttttgttatttaatatatagctttattttttgtaaaattgatactattacagtagaaataagctcacatgtcatacaaaggtaccaacagaagtgtgaagcttagaggatatctcaacattcccaagtaactattcttggtgagtgtattttgaggtatttctctttgcarccacacacatacatgcaattttatacaaaactctacttgctgtcctgtaatctctttttatcttctct

SEQ ID NO: 623845 - DNA, 622 bp, Homo sapiens
gaactacctcactatcatgagaacagcatgggggaaactggccccatgatccaatcacgtcccaccaggtccctccctcaattcctggggattacaatttgagataagatttggatgaagacacagagccaaaccatatcacaagggaagtgaaggacctctacaaggagaaatacaaaccactgcttaaaaatatcagagatgacacaaacaaatggaaaagcattctgtgctcatagataggaagaatcaaaatcgtgaaaatggccatactgtccaaagcaatttatagattcaatgatagttgcactaaactaccattgacattcttcatagaactggaaaaaaacttttaaaattcatatagaaccaaaaaaagaaaaaagcccaaatcatcaaggcaatcctaagcagaaagaacaaggctggatacatcatgccacctgacttcaaactacactatagggctacagtaaccaaaacagcatgctacttgtggaagaatagacaaatatatcattgtaacagaaaagagaamctagaaataagaccacacacttttaactatctgaggttcaacaatcctgacaaaaacaagcaatggggaaaggattccctattc

SEQ ID NO: 623846 - DNA, 603 bp, Homo sapiens
ggaaatgtacccaaagaaattacatcattgtacaataaagacacatgcattcatatattcattgcagcactattcagaataggaaagtcatggaatcatcctaaatgtccatcaatggtaaactgaataaagaaaatgtggtacatatacaccatggaatactatgcagccattaaaaagaacaagatcatgtccttttcagcaacatggatggatctggaggccataaccctaagcaaactaaygcaggaactgaaaaccaaatactacatgttctcacttataagtgggagctacacattgaggacatatggacacaaagaagagaacaactgacaacaggacctacttatgtagatactatcaggtactatgctatgacctgggcaatgaaataatctatacatcaaactccagtgacataaaacttacctacataacaaacctgcgcatgtacccctgaatgtaaaataaaagtttcaaaaagtatattataaattatatataatatattctatttcaacattaacaaaataataaataaatatgtaaaatttcaaaattaaagtcaaactacaaaaagagatattaattttaattatt

SEQ ID NO: 623847 - DNA, 657 bp, Homo sapiens
ttcccttttttactaaagtattatttctgggcatatttacattctaattccttagggttcctcttattttactcaaataaatgtttgccacattcaaaaattaacctactatattattttcataaagttgaacagttttacacataattttaaaatacttgtttctaatttggctcttattattttaagaatttaggcactttaacttatttggtcataagtgatcattttcacattgaaatccactaacatgaaaaataaaaacatacaaatgtcttttgctgcgcatatggtaaccttttctagtttgagagtcccacttgttaactggctaggactgatataccaaaatatggtataatattttgagaaagattttaccttatgcatttgagcaattttctttctttgccttgggtgttcatgtctgtgtgtgtgtgatagtgtgacaatgattgagattgctttagtatatggaattacatattgctatctgtgaawatagaaattgtgtcctttgtctctactacccaaaaattttcaagagatactagaaattttatcatcttgacattttatataaacaaacctggcttatttaaaacaaacataattgagcagcatattttagtcttggcacacggcagatggttaaga

SEQ ID NO: 623848 - DNA, 537 bp, Homo sapiens
atctctgtcttcattcaaaatggtgtttttgcctctcatttctcatagtcccattttctttaggtgatgagcagtttttaaaaattataaattatttttgttacatacaatttaatttcagtccatcaacaaggattttttacatttccagtgaattgtactatgtcaatagttcctgtccaagtacaaaatsgtttagcagagtttcatcaccaaatcttcttatgtcattaaactcatcaagtacaccttagttgtatgtctcatgaaaatacagattttttccaaaaaagtatgttaatcaggaaatatgtcaagtaagtagaaaagagatagtcatacactgaaatagattgcaagagggagaatacatggaaagagaaaaaaacaattacattattacactgacatatatttcttttctcctattttgcctttcaaaagacctgaatggagctggaaagctgaaggcaattgtttatctcatcacctcctcatggaagtgtataaaacgcactgaggcctagaaggcttatg

SEQ ID NO: 623849 - DNA, 537 bp, Homo sapiens
atctctgtcttcattcaaaatggtgtttttgcctctcatttctcatagtcccattttctttaggtgatgagcagtttttaaaaattataaattatttttgttacatacaatttaatttcagtccatcaacaaggattttttacatttccagtgaattgtactatgtcaatagttcctgtccaagtacaaaatggtttagcagagtttcatcaccaaatcttcttatgtcattaaactcatcaagtacaccttagttgtatgtctcatgaaaatacagattttttccaaaaaagtatgttaatcaggaaatatgtcaagtaagtagaaaagagatagkcatacactgaaatagattgcaagagggagaatacatggaaagagaaaaaaacaattacattattacactgacatatatttcttttctcctattttgcctttcaaaagacctgaatggagctggaaagctgaaggcaattgtttatctcatcacctcctcatggaagtgtataaaacgcactgaggcctagaaggcttatg

SEQ ID NO: 623850 - DNA, 553 bp, Homo sapiens
ttagtacatggtaagtagctttttaacccagtttccccctaccctctagtagtccacagtgtctattcttacacttatgtccatgtgtgcttaacatttagcaaccagttataaatgagaacatgcagtatttggttttcaaacaataacgaaaagaaagactgtgatatcctttgaaaagtttagaatatgtgatcattgaaataattaaaatcaattaatatattattttgtagtttgactttaattttgaaattttacatatttatttatttactattttcttaatgtttaaatagaatatatataatttataatatrctttttaaaacttttattttacattcaggggtacatgtggagatttgttatataggtaagttttatgtcactggagtttgatatacagattatttcattgcccaggtcatagcatagtacctgatagtacctacataagtaggccctggtgtcagtttttctcttctttgtgtccatatgtcctcaatgtgtagctcccagttattaatgagaacatgtggtatttgttttt

SEQ ID NO: 623851 - DNA, 520 bp, Homo sapiens
ttcttaaaattacactaacattcctaacttggtccaatatgatttcatttgggaggagtataactgtaaagataaaaattccagagctttatatctggagttttcatgttctatttgctaacatgttttacattatctttctttttcctttttttccytacgtcctaattggactcatgtaaaagtgaaaattcactcagcattgcttacatgaagcctctaacttgatgagagagcaagttggttaaaaaaatagaagcttatttgagaaatgaggagttagcattgtgcctgtcgaggccttcctcctgtctagcacatggaccatcgtaaatggccttgcgcctgggtgagtatgcggacattgggctagaaggagcccatgaaaagcaaattttcctcaggtatgaatgctacctgtgaatgtttgttcttggaaggaggcctttctttctgctcggaggccagtgcccaactttcggcctgtgggaagggctacttccaaggccacactcagccc

SEQ ID NO: 623852 - DNA, 635 bp, Homo sapiens
ctttttttttttcattctgtcaaccaggctggagtacagtggtgcaatcacagcttactgcagcctccatctctagggctcaagtgatcctctgaccccagcctctggagtagctgggactatacgcaagtgccatcaccccaggctaatttttctttcttattttttttagagatggggtctcaccctgttgcctaggcaggtctggaactcctggactcaagcaatcctcccacctcatcctctcaaagtgctgggattacaggcataagccaccactcctggcccatcattctatacttctaataagtacccacctttaggtcacatactacattcactgggaactttccccctgcttacaatggtcttctagaccccaaatcctcccaccctaggaagtgatttcagcatccagcagtccaagtcaggagtcacttaatccttatgcccttcacttctgttctacctcagctcttgtcttttaggtgtatattgcascattgtttgctagaatttctacaacttcaaacttggtcaactttctatctcaaacttctatttttccaactttctccacaacttactgctcacaccagtgaaaagttatcataggtttcaaaacatgtttccag

SEQ ID NO: 623853 - DNA, 600 bp, Homo sapiens
ttttatattaaaataacactcaataatttttgtctgttcaaattctggtttaagaaacaatcaaatatcttttctgtattgagtcagcatcctacgaagttttgaagcaacacagagtttattttgtattcagtgtactttatatttgaaaatgaactccaaactatgtttatatgcatgtggtaggaaaggataatattaaaaaattggattaatccataatttcttaacaaccgatctaacagtattggtaccaggaaaggattctgctgctagcaaagcatctagtgagttgttagcacaatgaagtgtgtccacacttaataatgccaaggcatattgataggaatatcttcagcaaaatattaaaagagtgcatttggttaatgaacaagaaatttatttgtgcacactctcaaacttaaccttcatattgtgcccttaaagtgacacaagcattaaaagtgcatttctgaggttattcttaataatttgaacataattkttacagctatctcacattctaaaagagttttcaatatcaattattttcaaactaaggtactatattgtttaaaagatatagattatcctccatcc

SEQ ID NO: 623854 - DNA, 593 bp, Homo sapiens
cccttacccctgaaagatcggggttgtgtaccaacagacttgtgtcttgtcttttactatttactaactcttctagccaactctctgygttttatttcagtatcagcaaggaaatcacacttgctggctgtgatttggaaatgcttgtctgttaactttcaagtttctaatacagatggttagttcccataaaacatcttccacatttgaccaaacatacccattggagatgataaggcattcctctttgtgatactcagcatcaatgtcatcctctttcaagtgtgagttacatgtattcatgcacagaaagaacatagttatttacacttagatgtgagaaatcatatcaatgctaaaagtattttacagcacattgttagctaaatagaccttaccctgtgaggatatctataaatattccctcgatgctaaaggacagataagtaaaaatattcatctaaattcaccagaaattgttatagaaaaactggcaatatgagaacaaatgttatttaatagtgcctagatgcaccagatatttctagagacactccacagagaatgactaaaagtcaattcaattaaaaccc

SEQ ID NO: 623855 - DNA, 605 bp, Homo sapiens
atttttttaatgaatgactgttggattttatcaaatgtttttactgcatattttgatatgaacatttaaattgtttagcatattgacatgatagattacattaattaattttaaataatgaatgagctttgcatacctgaataaatcccacttggtcatggtgtataattcttattatatattattgtgatttgatttgctaatatcttgtggagaatttttgcctctatgttcataagatatattgtagttttcttgaaaagtctcttgtaaatttttggtattaaggtaatattggccttatagaatgagttacaagtattgcctctgcttctgtcttctgaaagagattttataaaatggtacaatttttttccttatatatttggtagaattcaccagtgaaccccttctgggcctggtattttctattttggaaggttattaattattttgactaagtttatttaatagatatgtttacatacacattgtctctttcttctcatttgagtttttaaaaaatatgtctctcaaggaattatttcatttcatgtargcttttacatttgtgggcatagagttgttcataattttcatttatt

SEQ ID NO: 623856 - DNA, 398 bp, Homo sapiens
aagagcttggttgtgacaaacagaatgacatctggccgggtgcggtggctcatgcctttaatcccagcactttgggaggccgaggcgggcagatcacgaggtcaggagatggagaccatcctggctaacacggtgaaaccttgtctctactaaaaatataaaaaattagctgggcgtggtggtgggtgcctgtagtccctgctactcgggaggctraggcaggagaatcgcttgaacccaggaggccgtgcttgaacccaggaggcaggagccgagatcgcgccactgcactccagcctgagctatggtgagactcatctaaaaaaaagaaaaaagaaaaaaggaatgacgtactagaggaagtgaggccaacaaaattcttcacattaaaggaattc

SEQ ID NO: 623857 - DNA, 398 bp, Homo sapiens
aagagcttggttgtgacaaacagaatgacatctggccgggtgcggtggctcatgcctttaatcccagcactttgggaggccgaggcgggcagatcacgaggtcaggagatggagaccatcctggctaacacggtgaaaccttgtctctactaaaaatataaaaaattagctgggcgtggtggtgggtgcctgtagtccctgctactcgggaggctaaggcaggagaatcrcttgaacccaggaggccgtgcttgaacccaggaggcaggagccgagatcgcgccactgcactccagcctgagctatggtgagactcatctaaaaaaaagaaaaaagaaaaaaggaatgacgtactagaggaagtgaggccaacaaaattcttcacattaaaggaattc

SEQ ID NO: 623858 - DNA, 398 bp, Homo sapiens
aagagcttggttgtgacaaacagaatgacatctggccgggtgcggtggctcatgcctttaatcccagcactttgggaggccgaggcgggcagatcacgaggtcaggagatggagaccatcctggctaacacggtgaaaccttgtctctactaaaaatataaaaaattagctgggcgtggtggtgggtgcctgtagtccctgctactcgggaggctaaggcaggagaatcgcttgaacccaggaggccgtgcttgaacccaggaggcaggagccgagatcrcgccactgcactccagcctgagctatggtgagactcatctaaaaaaaagaaaaaagaaaaaaggaatgacgtactagaggaagtgaggccaacaaaattcttcacattaaaggaattc

SEQ ID NO: 623859 - DNA, 583 bp, Homo sapiens
cttgctcttatatttccttgcttctgtttgtttgggtttattttgctcatctttttctaagttcttgaagtagggccttaaattattgagacattttcccatttctaatgtagtcccttagaagtttgacatttttatttattataattggataaccttttagtttgtaattttctttatcattttatgcccagaaagatttttattgttagagattaactaaatattcaatcagattattttgagtaggtttttaaaattaattttatataataaattgttttaaattgctaatattaattttattttggtgtaatttgtgaatctatcttcctcaaaatttaactaaccaattataattaaattaaaatttagtaaataacattttgttgtacactgtttagaatccttactttatcataaatcaaatacttaacacatgataaattattttcatgaatttttttgtggctcattggtacgtatgtgtgataatattctgaagttttaattttaattttaataagtttacctttcagcattcctttagctacctmtttaatccatggactatttagaagtg

SEQ ID NO: 623860 - DNA, 624 bp, Homo sapiens
tcacagtcccacactactatgcaaagtgagaactgcctgtgtgtatacatatacatatatccacacacatatacatacacatatatatgtaaatgtgtatgtgtgtggtggtgatatatgtgtgcatttggtattattactcttgrgaaataaaaataagaaatcttttaaactgaaatttagatatatagttttagcagtcattcttaaaatagctaagcccacaggaattttacaaattatgaattactaaaaaaagaactgtcataaaaccattattttttagcataaagattatattacacaaacttaattggagctacccagagattatctttttagtcaaaagataaagagtttgaaagtttgcttttcaagagacttttaaagtgattatgcagccgagtactgagctcatacagtctagtgtagttcaacctccctggcaagtacacacagcatggcaatacagcagagaatactctctggtgtctcccaccaaaaagaatactaactggtttctacagacaatgtaattcagctactcattggaagccttaaacacaatcattagcttcctagaaataggctccttagcacatttcacctgctgtaatttttcgt

SEQ ID NO: 623861 - DNA, 624 bp, Homo sapiens
tcacagtcccacactactatgcaaagtgagaactgcctgtgtgtatacatatacatatatccacacacatatacatacacatatatatgtaaatgtgtatgtgtgtggtggtgatatatgtgtgcatttggtattattactcttgggaaataaaaataagaaatcttttaaactgaaatttagatatatagttttagcagtcattcttaaaatagctaagcccacaggaattttacaaattatgaattactaaaaaaagaactgtcataaaaccattattttttagcataaagattatattacacaaacttaattggagctacccagagattatctttttagtcaaaagataaagagtttgaaagtttgcttttcaagagacttttaaagtgattatgcagccgagtactgagctcatacagtctagtgtagttcaacctccctggcaagtacacacagcatggcaatacagcagagaatactctctggtgtctcccaccaaaaagaatactaactggtttctacagacaatgtaattcagctactcattggaagccttaaacacartcattagcttcctagaaataggctccttagcacatttcacctgctgtaatttttcgt

SEQ ID NO: 623862 - DNA, 616 bp, Homo sapiens
ataaatcattctactatgaagacgcatgcacacatatgtttattgcagcactgttcacaatagcaaagacttggaactaatccaaatacccatcaatgatagactggataaagaaaatgtggctcagcatggaatactatgcagccataaaaaaggataagttcatgtcctttgcagggacatggatgccatgctttccacatcattctcagcaaactaacacagacacagaaaacgaaacaccgcatgttctcactcaaaagtgggagttgaacaatgagaacacatggccacagggaggggagcatcacacaccaggacctgcttgggggtggggtgctagkggagggatagcatttggagaaatacctagtgtaggtgataggttgatgggtgcagcaacccacaatggcacgtgtatacctatgtaacaaacctgcacattctgcacatgtaaattattttaaaaagaagcaaattgacacatatgttaaattgtatttaaaaataaataagtggcagttaaaaaaaaaagaaagtgaagtattttatttgctatggaaaatagaaagatgaagagttgattttctccctcaaatacagtaacattactagg

SEQ ID NO: 623863 - DNA, 643 bp, Homo sapiens
gttaatgcagctatttggtcataaatgtttctttgttaatcgctttcgattactaattcaatctcttaggttataggtctattcagattttctctttcttcttgaaccactttagtagtttgtgtctttctagcaattcgtccatttcatccagggcacctaatttgttgttagacagttgttcacagtatactcctgtaatccttttgtatttctgtaaagttggtagtaatggctctgctttcatttattattttaataattagtcttccatcttttgctcagtcaatatagtgaaaggcttgatctttcaaataatctatgtttatttattctactgctctccaacattctattttattgatttatgctctaattatgctctttattatttctttccttctgctagctttggatttagtctttttttgttttcttccaytgcctttaggtatagaatgaggatattgatttgagatttcttcttaaatgtagttgtttatatccatacattttcccttgaactctactttcactgcattcaataagttttggtatgttttgtttttattttgtctcaagatattttataattttgcttgtgatttattttttcactcactggtagtttaagactgtattg

SEQ ID NO: 623864 - DNA, 542 bp, Homo sapiens
accacgataacatttagcctggaacagagcggcactcggcctgagcgggtaaggcagagcctttctttgcagactgtcctgtgggcttctcagcacatggcttcctttcctcagggccaggtcttagccatggggcttggattaggctctctaaacatgtgttctagtgctctctgagccactgacttgttagaagtcacagtaaaggcgggtattatttatgccagctcatcattgtgcaccagggactgttctaagcttttaacttacacattaattgatttaaccctccaaacactctcatgaagcggttgttcctgacctggttttaaaatgattctgtggcctggtgggattgagtaccatagccagagtcacggagccagyaagaggtgtcactgcggttcagattcaggtctaaccccacagcctggactcctcatcactacccagtattgcctctgtgtgcatctggttgtgttcctcagctgcttgggctgtggcttctttgtttctaaagcagaaagtctaatcccggcctc

SEQ ID NO: 623865 - DNA, 605 bp, Homo sapiens
cctcatcatacatagtttcccctacagtctgaaacctatattaaatatcatctatgtgctccccaagcctactcttactctcttgactttgctgcctgtcctcacctttgtaaattatctgtttcatttaactttatttaaattatgcaatttaagtatgtttgtttcttgccaggactctaactgatacagatcctcttgaatccagtgcaaaaggctttggtgtttaaaggaagataataaaccatgcacagtagaggcaggggcaattgctagggaaaaaagaaaaaataaaaacaacaacaacaaaacctcaagtaatcactgttgtacccagtgactcagttagtttagggatctaagacaactctggtagtaatgcttgccagtccaagcaactccaatgtgtgatagagatggcattgcacagaagaaaagactagttgtaaccataaaagggtcagtgctctttcacaggaatagaactaagcaaagtggcaacagaaattattgagtgctgtgtggtaactgagaaaaytgtctgcaagcacatttgagataactccaaagcatttaaaaataatctttaatctaattttccaact

SEQ ID NO: 623866 - DNA, 614 bp, Homo sapiens
cgaactcctgacctcaagccattcacatgcttgagcctcctgaagtgctgggattacagaccygagccaccacacctggccaaaactgctaaaaatttttaatgttctcaccacgaaaaacaatgaattggtgagatgacagatatgttaattagctggattgaacctttctacaatgtatttatagatcaaagcatcacattttacctgtaagtatacccagttatttgtcaattaaaaataattttacaaataaatatatatcctaaatatgtcatatgaaaaaagagtggtaagttttgtgtctctctgtaggtatgtatgtaggtatatgtgaggctctggaatatgaattgagttaatcttactttcttggatctctgcaagtaggtatttgaaagtaattctccttttctcttgctttgtgtagtatctgtttcagtgcaaatattttaatgaatttatatgggtaattagtttcatgtgattatactttcctccagcatttctagaaatatcttaaatgccaacatttcctatcttttatcacacagatataggaaggctgacaatcagcaatggctatgttaaactctgcataggtgtgctactgt

SEQ ID NO: 623867 - DNA, 560 bp, Homo sapiens
gttatttaataggtctatggctactgtctttccatatcactggctttatacagactcaagaactttaatgagaggttattatggaactattttcagactagttctaagtggagaataaaggtcataataccactgtagcagctaaaagcacttttgctgacattatctaattttcatagaactctagggacaggggcaattattttgattatgcttctatagataggtattttaggcaccttgagtagaataatggtggtcaatcattgcttgcaccagaaatagacatgcatctactcatattcaggggagacctatttagatgacacaacttggacttcaaaaagaatctttcattatccttctcctacctaatacagaaaaacccaaagactttgatattctcattaataaattggagttgcactgtttaagaaacacattttaagaattcgaggctccccctcacaaaaagtacaatgtgcagtctctgaacataaayagttgatagccagcacttgtatgacagctttattttaaataaatcctgtttaacaaaa

SEQ ID NO: 623868 - DNA, 527 bp, Homo sapiens
cttctggaaggttctacatttctattaccctccttggccacagctgacataggcataaaagactgagctgctttctccgtcttcttcctgcatagaaaaggttgggtactcaatagttgttttaagtcttagtctcttttaggccaagctgatgaagtttttagtggtataactcaataccctcaaaatyttgatttttaaaaatttgttttattccagtcagcaatatgtgtcaatagcagacctaattttccatttcttgagttgaacacgttcctatgagaagactacatcctttttttagagctttttgtccaactaaaatgatctactgagcacaatcacaatgcattcagaggttttaacaaaggacaggaaaaccatacccttgcttaggtctttatcaaaaggctgagttttaatcagccttttttattcacagttgattttactttatagccaaggttgaaaactactattaaatggtctgttaaattctgtcatagtaagcaggaagcactgctgat

SEQ ID NO: 623869 - DNA, 349 bp, Homo sapiens
tcatattttgtgcatttttatagatgttttaatttactttttaaaaacttaagaaggattcaattatttttcctcaatacttcgctgtgaactctgtgaaaatgggagtcatgtctgttttgttcattgatgttctctctaggactgagcacacaggctggaacaaaggagctcaacagaaatttgatgactaaatgaatgaaagaaagcaaagctaagtaaagaaccaattactttawttttttaatttattaacaataataaaagtgattataagagttagtatttatggaacactcaccatgtactagacattggtttaagcactttatttacatcgtattattta

SEQ ID NO: 623870 - DNA, 486 bp, Homo sapiens
aacttaaggcccctccactgccttaataaaatcaaaccaagcaacctaatatggggacccaaaagcaggataagttcaagaaagacagttactatcacctccttctccagccacatcatatgtctttgggacatgaagggtcaaattagggtggaagcaactggggctatttctactgtttcccaatttccctggtaaatagaaccccttccttcttttcaattttaaagttatttaatttagctgaaccatgagggtgcaagctagaaaactgaaataggctatcaataaattaagcaagcccagaagctatacccagcacatttcaaactgttactttaaatgaagttcttactataaaatatttctattttattaaattataaaggatgatgtctaccttgcagaaagcaaatgtatcctgacacggtttactaacttaaagtatwtggtaaagtcgccaagacagtcctaattataggtaag

SEQ ID NO: 623871 - DNA, 496 bp, Homo sapiens
tgtgtctgtctagaaggtggccatagtggcagagattaaggctgtggaagatgctgcctttttgctctgccaatatgccttgaaccctacattttcaatatgtttagatgacttcaaactgccggcatctgcatctgtgtctaagcattttttcctggccattattttccatacatgcatcacacccagatttcctgggaaattaataccactaggatcggacttcaaccactgacttaygggagagttaatgcataaatacctcagcttcctcatattgatatgggttggtgctgaggtatatgttttacacttttcctcagaggttctccttgaattaagcccgcttgcccactgtggtagctggcatagtaactcagcacttattggctgtcctcttttccccgtatcactttatcattccactgcttgttttcactggagtcccaaataaacctcctgcattacaaccattttattagtatacgtttccagt

SEQ ID NO: 623872 - DNA, 626 bp, Homo sapiens
tttgactttctattaatttacaggaatattacttgctaacatttattaactagccaaagtttatgaacatcactgtaacctgaaagaatctataagcaaaatcagaattgaggctttaagtgtcaacaccaaaaatgacagtgcttctctcatttacctaatttgaatacggtggctgacacctgtaatcccagctctttgggaggctgargtgggtggatcacctaaggtcaggagttcaagaccaggctgacctatatggtgaaagcccatctctactaaagttacaaaaaaattagccgggcatggtggcatatgcctgtagtcccagctacccaggaggctgaggcaggagaatcgcttgaacacaggaggcggaggttgcagtgagttgagattgcaccactgcactccagcctgggaaagagagtgagactccgtctcaaaaaaaaaattatataaaattaagtatatattatgacattaatgagctaattaagtaaaataagtaaagtaataagtaaataacaggtaaattacaagcaagtctgtgattcttaatctgctttttccaagggaaactatgacacagaataaagaaacataagagaaacaaatgaaatgtg

SEQ ID NO: 623873 - DNA, 496 bp, Homo sapiens
tgtgtctgtctagaaggtggccatagtggcagagattaaggctgtggaagatgctgcctttttgctctgccaatatgccttgaaccctacattttcaatatgtttagatgacttcaaactgccggcatctgcatctgtgtctaagcattttttcctggccattattttccatacatgcatcacacccagatttcctgggaaattaataccactaggatcggacttcaaccactgacttatgggagagttaatgcataaatacctcagcttcctcatattgatatgggttggtgctgaggtatatgttttacacttttcctcagaggttctccttgaattaagcccgcttgcccactgtggtagctggcatagtaactcagcacttattggctgtcctcttttccccgtatcactttatcattccrctgcttgttttcactggagtcccaaataaacctcctgcattacaaccattttattagtatacgtttccagt

SEQ ID NO: 623874 - DNA, 585 bp, Homo sapiens
gatagcccattcaatataaaaaaaaattcaagcaaatcaggctccttatgtgatgtggattaagccactggcgtatatttttatttttcccatttttgttttagttatgcacagtctctgagacataaaaacattttttataacttgaaaaattcctgaagtgaacatatataaatgtgcatttaatgaagtaataattaaaatttaatttatayataaaaagatatttctgtgtgtatttgcaaagtgtatgtatacagtgaagcatataaggcctctcaccacctggggttgttcctggggttgttccttattgcctctctggccacttgacttggtcctatggcagcttcagcacttacagacagtctttagccactgagatctattccagctctgccctactccacctacaattcagacttagctgctggcaattttttcaacaagcttctgaagcctcagttttcatcaacactgaaactcttatttagagatatgtttaaaacagcaaggcaattaagagcccaattctttacatctctatcaactataataacctcccaaactataataatctcctct

SEQ ID NO: 623875 - DNA, 585 bp, Homo sapiens
gatagcccattcaatataaaaaaaaattcaagcaaatcaggctccttatgtgatgtggattaagccactggcgtatatttttatttttcccatttttgttttagttatgcacagtctctgagacataaaaacattttttataacttgaaaaattcctgaagtgaacatatataaatgtgcatttaatgaagtaataattaaaatttaatttatacataaaaagatatttctgtgtgtatttgcaaagtgtatgtatacagtgaagcatataaggcctctcaccacctggggttgttcctggggttgttccttattgcctctctggccacttgacttggtcctatggcagcttcagcacttacagacagtctttagccactgagatcyattccagctctgccctactccacctacaattcagacttagctgctggcaattttttcaacaagcttctgaagcctcagttttcatcaacactgaaactcttatttagagatatgtttaaaacagcaaggcaattaagagcccaattctttacatctctatcaactataataacctcccaaactataataatctcctct

SEQ ID NO: 623876 - DNA, 557 bp, Homo sapiens
ttcaaagcccataagaacatacactgacttgataattgtttgacctcaactctaatggtctccattcaagcccctcttcagtttggtcatctattcctggcatcaactaaaatggttctatctttgtaataytgacctttaataattatttgaatttctttgaatcttttggtgctttgtccatcctgtcactttcactcttaaactgtgacttcattgaaatttctacttcattgttcctattatctttcacctttatattatgtctatcatgggacacctttcataattaatctagatttgatgcttaatattctgaaaaaaaatttataaacttggatactcttatactcttttgcatcagtctagcaaaaccccaacactgaaataattctgaagcctacctcctccaattgtaatacttagtaaagatgaaaaaatacacatctatgaaggcttgtgtcattacaaattcatggtgaccaacctctagctgagcactcagaaatgccctgtaatcatttattttttacttgttcatcagtgtatcctacaaa

SEQ ID NO: 623877 - DNA, 557 bp, Homo sapiens
ttcaaagcccataagaacatacactgacttgataattgtttgacctcaactctaatggtctccattcaagcccctcttcagtttggtcatctattcctggcatcaactaaaatggttctatctttgtaatactgacctttaataattatttgaatttctttgaatcttttggtgctttgtccatcctgtcactttcactcttaaactgtgacttcattgaaatttctacttcattgttcctattatctttcacytttatattatgtctatcatgggacacctttcataattaatctagatttgatgcttaatattctgaaaaaaaatttataaacttggatactcttatactcttttgcatcagtctagcaaaaccccaacactgaaataattctgaagcctacctcctccaattgtaatacttagtaaagatgaaaaaatacacatctatgaaggcttgtgtcattacaaattcatggtgaccaacctctagctgagcactcagaaatgccctgtaatcatttattttttacttgttcatcagtgtatcctacaaa

SEQ ID NO: 623878 - DNA, 557 bp, Homo sapiens
ttcaaagcccataagaacatacactgacttgataattgtttgacctcaactctaatggtctccattcaagcccctcttcagtttggtcatctattcctggcatcaactaaaatggttctatctttgtaatactgacctttaataattatttgaatttctttgaatcttttggtgctttgtccatcctgtcactttcactcttaaactgtgacttcattgaaatttctacttcattgttcctattatctttcacctttatattatgtctatcatgggacacctttcataattaatctagatttgatgcttratattctgaaaaaaaatttataaacttggatactcttatactcttttgcatcagtctagcaaaaccccaacactgaaataattctgaagcctacctcctccaattgtaatacttagtaaagatgaaaaaatacacatctatgaaggcttgtgtcattacaaattcatggtgaccaacctctagctgagcactcagaaatgccctgtaatcatttattttttacttgttcatcagtgtatcctacaaa

SEQ ID NO: 623879 - DNA, 572 bp, Homo sapiens
atttgatttctttacatgatcccatatttcttggaagttttatccattcctttttattatttttacctctattcttttctgcctgtcttattttaggaaaatagtcttcaagctctgaaattctttcctctgcttggtctattctgctattaatacttgcgattgcattgtgaagttctttctgtgtgtttttcagctctgtcaggtcagttatgttcctctctaaactgtctattttggctctcagctcctgcattgttctatcatacttcttagcttcttggcattgggttacaacatcattctttagctcacataacttcgtttttgttcatatgttcaaccctacttctgttatttcagccatctcagcctcagccacattctgagcccttgatagagaggygttgcagtcatttggagcaaaaggggtgctctagatttttgatttttcattgtttttgcgttgattatttctcatctttgtgggcttatctacctctgatctttgaggttacttctttggatgcaattttttgtggtttgctgttattgttgctgttgttttctgt

SEQ ID NO: 623880 - DNA, 532 bp, Homo sapiens
acaagtaaaacagttcaagattcccaagttaatggcctggtgtattttctttccatatcttcctccatgcaagcaaacatatacatgcatatacccacatatttaggttgtttatatttaattttataaaaatatgtgtaataatgttgaatacagtacsctgtaacttgcctacccaacttaaaaataaattacacacttcatttctgattgtcttaactctttctgttttttaatagttgggtattagttcacaatgtgactatcaaaaatttatctccattagcattcaagtagtttctagatttttctacttcaggctgcctccaataaccttattatacataaatttagcatttatgtataataaatttgtatgtatatataaatgtatttatgtatttttaaaggatgtactcccaaaatacagattactgggacactcctttgtgcctacatgtcttctcaaaaaatttgtgactacacataattttattaataaagtatgaaaatatctgtttcattgtgttcc

SEQ ID NO: 623881 - DNA, 643 bp, Homo sapiens
gccaactccatcctgaataggaactgggtaaaatgaggctgagacctactgggctgcattcccaggaggttaaggcattctaagtcacaggatgagataggaggtagtcacaaaatataggtcataaagaccttgctgataaaacaggctgcagtaaagaagctggctaaaacaccaaatcaagatggcaacaagagtgatctctggtcaccctcactgctacactcccaccwacaccatgacagtttacaaatgccatggcaatgtcagaaagttactctatatggtctaaaaaggggaggcatgaataatccaccccttgtttagcatatcatcaagaaataatcataaaaatgggcaaccagtagccctcaggactgctctgcctatagagtagccattcttttattccattactttcttaataaacttgctttcactttatgcactgacctcgaattctttcttgcgagagatccaagaaccctttcttggggtctggatcaggatccctttccaataacaattccactcctaggcatttacccaaaagaaaaaaaatacatatatccctacaaagacttgtacatgagtgttcacagcagctttatgtggaatagccaaaaactggaaataacacaaa

SEQ ID NO: 623882 - DNA, 560 bp, Homo sapiens
gtcatggtgcctaggaaagagagagttgttttaatgagccatgtgctactccaccatctccagtccctggcctagagataaatgatgccagccaaaccagtctggggcagatattaggccagcggtgactgctctccactgtggtttgagtggaaagtattgractaacggtcaggtgaactaccttctggccttagctccatgagcaacttgcataacctcaggcaagccattacctctgtctgaacctcagtttccacatctcctaatggccgttccccaaaatctagagctgcagcagaggtgtgtgtgatgcgtagtggctgtctcagtgcggggagcttccttccttcacattctcttctgaggacccaagcgaggaacctcagtggcaacgcaaaccaaacccatctttccccacaaaccagctctctatatgttcctgcctcccaatacgcccactgcctaggcttaaacctcaagtcatccttgctctcttctggccacatgtatttaggcaccaaattctaccaacttttccatcaaatggttgggttttt

SEQ ID NO: 623883 - DNA, 485 bp, Homo sapiens
agatgacagatagatagatagatagatagacagatagatagatagatacacatgcatacatactacatacatatatacctacatatgttggcacatagatgttcctttaccacagattaagttattctagatgcatatcttgtagcctacatttttatacattttcatcatttttaataactgcatactgctctattatattctgtattttctatattagattagatccatgttttatcaccatttaggtagcttttggttttctgttactgtaatgttgagataaacgtctttatgtacttgttcaattattcccattaaacaaaagcccaargtacaaagtttctgagtaaaaaaataggcacattttaaggttttctgatatatattgccaaattgtgctacaaaagaaaaactgtaccaattaacactcccagcaacaacgccaagagaatgctagtttccccacatctcaccaacactgt

SEQ ID NO: 623884 - DNA, 594 bp, Homo sapiens
aaagcagtgttaagggaaatttatagtgctaaacgtcatcatcaagaagttagaaagatctcagattaaccatcaaagtttgcacctagaactagaaagaaaagaacaaaccaaccccaaagctagcagaagaaaaaaaaattactaaaattagaaaagaactgaaaaaaattgagatgcaaaattccatagaaaggaccaataaagccaaaaggtggttttttgaaagaataaaaaaggttgatagactgctagctacataaccatgaagaaaaaagaagaccmaaataaatacaataaaaaatgaagaagatgacattacaatgaatcccacagaaatacaaaagatactcagagatcattttgaacaactctatgcacacaaattggaaaatctagaggaaatggataaattcctggaaatataaaacctcccaatattaaagccaaaggaacatgaaaacctgaacaatcaataaacaagttcctaaactgaatcaataataaaaacctaccagcccaaaaaaaccctggaagagatggattcacagcctaattctaccagacataaaaagaactggtatcaattctact

SEQ ID NO: 623885 - DNA, 566 bp, Homo sapiens
gtggtaaaatatatgacataacattggccattttagccatttttccttttatttttagttgacacataattgtacttatttataggatacaaagtgatatttcaatacatgcatataatgtgtaatgatcaaaccagggtaattagcatatccgtcacctcaracatttatcatttgtattgggaacattcaaaatcctctcttctagccttttaaaagtatacaataaattgtagttaaccatattcaccttacagtgctacaacaccagaagtcattcctcctatctataattttgcatccattagccaatctctctccatcctcccctctccctaatcattaccagcctctaatattaatatctgcaacactactctctacttccatgtgctcaacttttttagctcccatatataaataggaacatgtggtaatctttctgtgcctgacatttcacataacataatgtcctccaggctatccatgttgttgcaaaggacagaatttcattatttttatgggtgaatagtattccattgtgtgtgtgtgtgtatatatatata

SEQ ID NO: 623886 - DNA, 254 bp, Homo sapiens
gccttaactgatgacattccaccacaaaagaagtgaaaatggctggtccttgccttaactgatgacattaccttgtgaaatcccttttcctggctcatcttggctcaaaaagctcccccactgagcaccttgtgacccccactcctgcctgccagagaacaacycccctttgactgtaattttcctttacctacccaaatcttataaaacggccccacctctatctcccttcactgactctgttttcggactca

SEQ ID NO: 623887 - DNA, 530 bp, Homo sapiens
ggcccaggaagagaactgccacaggggtggggccgctgcagacagcctccactaaggcaatgcccagtggggccatggcatcaagactgccacagagagactccataaggatgtctggtggaaccatgacagtggggtcaccccaaagaccacaaaactgtagagccaccaacgtgcaactgcagtcaaggagagtctcaggcactagactccaacccacgaaagctgtaatgtaggctgcaccgtgcaaagtcatggggctcagtcccccagagccttggggacacaacccctgccccagtgtgtcttggaggcaggacgtggtgtcaaagattattctcaagcctcaagatttaattttttttatcttgttggggttgggacttacctgggatcagttacctttttcatctttcctatttcttcttttcaaaatgagaattcctgtgccaccactgtattttggaagcacataacttgttagatttcacatctaaagaggctcacakctagatattatctaaatcaag

SEQ ID NO: 623888 - DNA, 568 bp, Homo sapiens
agtgcccagacatttggtcgaacattattctgaaagtgtctgtgaagatgcttttgatgagattaacatttgaattggtaaactgagtaaagtagattgcattccgtaatgtgggtagccttcattaaatcagctgaagtcctgaatcaaacaaaaagatgaccttccctcaagggaggggaactccttctgtctcactgcttaagctaagacattgttcttgcctcttcctgccttctgactggaacgaaaacattggctgctcttggatgtcaaataagaaacaccatccagctactccattggctctcctgggtctccagcttgccaacttcagaacctgggactccagccttcataaccacatgaaccaattccttataatatacacatacatacgtgtatacatatatcctcttcgttctgtttctctgtggaactctaacacatcctcctaaaacttggtcagaaagaaaaggaattggtattacctagaaaaggaattggtatttargtagaagttacatggttaaagctctcaaatacaattttaagatgtttaaaggag

SEQ ID NO: 623889 - DNA, 555 bp, Homo sapiens
gccagtgctatatcggatgagtcaccatcatcataacactagcagttacttcatgccagtgyggcagtaagcattttttttggcaacaactttattaagatatattcatgtactatacaattcacccatttaaaatgtgtaattcagtggctttctgtatatcctcagaattatgcagccgtcactataatcaattttagaacatttttattaccccaaaaagaaacctgcacccttagtcatcaaccttaatccccactgccccataaccctaggtggccactcatctttctttctctatggctgtgcctgttctcgacatctgctgtgagtggaatataccaaggaatataccatgctgtgactggcttctttgacttagtagaatcttttcaagtttcatctgtgtgtaccaagcactttacctaccttgacctatttaattcttacagcaactggaactgtatatattgtatatattgttgttatcctcattagattaataaggaaactgaggcatggaagggtggagtgacttgctcacggccacagagt

SEQ ID NO: 623890 - DNA, 565 bp, Homo sapiens
gctcactgttaggatttcgctgcctctgcagctgagccctgggctggctgcagcgtaaatactggcttgtcaggatttagagcttcctggtctattgtgctgcttctcctgctttgggtaataacttaacacttttcagtgggcttgagagtaaaagcattttcttttttgagacagagtctcactctgttgcccaggctggagtgcagcgacatgatctcggctcactgcaacctccacctcctgagttcaaggaattctcctgcctcagcctcccaagtagctgggattacaggcacctgccaccacatctggctgatttttgtatttttagtaaagatggggtttcaccaggttgaccaggctgctctagaactcctaacctcagatgatctgcccgcctcagcctcccaaagttctgggattacaggcatgagccactgcacccagtcttaaaagcattttcacatcccttaatgaagctaggcttctcctcatcacacagataggacagctgaggcccaaagagctgcacmaactggctccaggtcacactatgcattag

SEQ ID NO: 623891 - DNA, 613 bp, Homo sapiens
gcaatctcagctcactgcaacctctgtctcccaggttcaagcaattctcctgcctcaacttcctgggtaactgggattttacaggagcctgccaccatgcccagttgatttttgtatttttagtagagacaggatttcaccatgttggccaggctggactcaaactcctgatctcaagtgatccacccgccttggcctcccaaagttctgggattacaggcatgagccaccccgcctggcctttttaagatttttaataaactttcactcctgctctgaaacttgcctcagtctctcagtctgccttatgccccttggtcaaattcttccttctactctacttccttctrcaagaattgaggttgtcacagagccattacgattcgctgctgctaacaggagtttgcatgaattaaatattgattattttccagtgttttattttgtttagttttcttgaggctctccatgtgtccctatgctggaaccttttctgccttctatgactactactttgttttgtaatgttttcccttccatgactactactttgttttgtaatgttttctctgtcccgcttttgtttcctagctcttttgcttgtactccatat

SEQ ID NO: 623892 - DNA, 531 bp, Homo sapiens
tacattagcttcccaaaaagaatcccatgcctattaagcaacccctccccatttacccctcccccagcccctggctaccactaggtacacctcatctatttaatgttactgaattgtagaatcttgttggcattttactttctattgtagctagctgtttctctgtctctctgtctcattttctccctctctctctctctctctctctccctctcattgtctctctcttattctctctctctctgtctctctttctctctttccctccctccatccctcctcccttccttccttcgttctgtccctctttccctctccctgtctatgcaatagacaaacatagaaaggcaggttcaaaaacagatggggagatgaagagaaagagagaagggcgaagaagggagagagagaagggagaagggagagacagaagagagagaaaatgaaagtaagagaaaaagagggagggagaaggaaagtgtccaggaaagagagagaaaagaatgyagaggacaagaggaggggaaagag

SEQ ID NO: 623893 - DNA, 220 bp, Homo sapiens
ccaccgcacccagcctgaatgttcttttgagcatktgtcacttccaaatgaaaaaaaaaaaaagtatctaattttttccagttctttctggtaataaattcatcttccctttaatagggctctattaaagttttaataacagaattgtcttttgttagtaatgagtagaatggatgatctattcatttgcttatttacccatccacactagaagtagagc

SEQ ID NO: 623894 - DNA, 397 bp, Homo sapiens
agactttgagccaattttgaaatctkactttgttggcattttccaccacgtctatgacaaaaacgcattcgtttaatggtcagaactttttattttctttgacaaaaaaaatcctgtcttcattccaattcttctgtagtccttagacaataattcatttccacatgccagctgaatgtcaccatatctttagcaaacccttcggtgacagtgacatggtcagagtcttgtgagtcataatgttgaggtcagaatattgcctataccacctaaccaaacaaatggccattggccagccatttaatttccctgattatcattttcctatctgtacatcaagggcaataataatatttattggagagaagaccaaatgtaacaagagcaaaagtggttt

SEQ ID NO: 623895 - DNA, 615 bp, Homo sapiens
tatgacatcttccttttgcattgtcactgctagtggcttgaagttctgcacccttagaatagcctggttttctgtgggtgtgagagatgtcctggaaactgaccccagttgaaaatcaatctagcctgtttttgtaggacaactctgttgtgaaaacctatgcactcaagggcagctggatcccacttgagcatgccgatggccccttgcagtctgaagtttgtgttgtcatgaggtcagttgcatacaggcagtgatgatgagactacaggacaggcagggcagatagcacatccttcggcctctgatgaaagatgcaaatggaaactgcagtcaggaaggtataatcaaacaccatccacccatgttaatgcagattgtcaggacggccaacctctcctttccccaggagtgtcacaggcatgattaacgtgctctgagttcagcagaaaccactgtggctcttaccccgggctgtgccttagctcaggcctaggtgaaatgcctgggcaagtgaygggattgtcgaggaatgtggaacatcccctgcttcccttctgcccctttcctcatgcctcctgagctgccccagtcatccaacctgcagtttgggta

SEQ ID NO: 623896 - DNA, 603 bp, Homo sapiens
tcattattcaactcgtatttatgagtgaaaacatgcggtgtttggttttctgttcctgtgttagtttgctgagaatgatggtctacgcaaataaactagatgatctacaagagatgtatagattcctgcacacatacaccctcccaagactaaaccagggaagaagccgaatcccttaatagaccaataacaagttctgaaattgaggcagtaattaatagcctaccaaccaaaaaaaagcccaggaccagacggattcacagtagaattctaccagaggtgcraagaggagctggtactgttccttctgaaactatttccaaacaatagaaaaagagggactcctccgtaactcattttatggaagcccctgactttctaagcttattggtttcactggtgttgtctgtaatggcagccatgagccccatgtgactgtttaaatttaaatgtaaaaattcagtgcctcaatgggactagttacatttcaagtgcttactgaccacacagggccagaggctaccatactggatggcacggatatgtgagtttgctgaagctgccatagtaaaatgccacagactgtttggcttaagcaataga

SEQ ID NO: 623897 - DNA, 603 bp, Homo sapiens
tcattattcaactcgtatttatgagtgaaaacatgcggtgtttggttttctgttcctgtgttagtttgctgagaatgatggtctacgcaaataaactagatgatctacaagagatgtatagattcctgcacacatacaccctcccaagactaaaccagggaagaagccgaatcccttaatagaccaataacaagttctgaaattgaggcagtaattaatagcctaccaaccaaaaaaaagcccaggaccagacggattcacagtagaattctaccagaggtgcaaagaggagctggtactgttccttctgaaactatttccaaacaatagaaaaagagggactcctccgtaactcattttatggaagcccctgactttctaagcttattggtttcactggtgttgtctgtaatggcagccatgagccccatgtgactgtttaaatttaaatgtaaaaattcagtgcctcamtgggactagttacatttcaagtgcttactgaccacacagggccagaggctaccatactggatggcacggatatgtgagtttgctgaagctgccatagtaaaatgccacagactgtttggcttaagcaataga

SEQ ID NO: 623898 - DNA, 630 bp, Homo sapiens
tctgccccttctgtgatgtgtggaatcatgtgattgctggacagcccccttggaagcctgccagcccagcctcttcagcatccagatgggaacccggaggcgcatctcacagcggaccgttgattaacccaaggtcacctggctctggtttctgacggagcgagaaygagtacccagaggtttccagaacctcagcacaaagggtatccatgatgaacaggcatttccctatcccttctctctcctgtcccctgcataaacaatgcaaaaaacacactcccttcttggccaggacccaaagacctattatcctacacatgtctttctgtgctttgagggatcagcaggggtgccagtgaacttggattactctttggatcaccctgctgcctccagctccccctctgttttgtttcatgactcagtcatcctgtttgagctcatttaccacttgtataggggtacattccttgacttctcagagcaaaccaagcccccatccatgatttcttcttcttttacaatgagctctcatatcacatttatcccagtggaaatttcatatcaatatctgtgattctttgactgttctctctttcccctagactccaggatccttgggatcactgg

SEQ ID NO: 623899 - DNA, 588 bp, Homo sapiens
ttgccatgacaccagagatataccaggtgctaaataagttgcttattattctcacatcttcatcacagtaaacaacttggagaatacagacaaaccaggcatcaaccattggtgtttcagagcaagagaataactgacatccagtatcgtatcctaagttgatcaaactgttcctgaccatgtggcgatatatgcagaggcccctcaaaccacagggaaaacaaggtaaagtggccagtgctatgctcatttgacctaggagtaaggaatgaaaaacggtatctgtgttaaagcaattacagatataygacagagttgcatgtaaaatgcatgtggatttctaggacaaacacatcatatcaaatgcatcttgcccttgcaatacttgattccagttgtgtttcccagaattactggagggttaggtcactctcctctggggacagctgattttctccacaaaactggtgattaggaggactgtggaaatgtgcccacacttcccagtaagcatttcttcttgtgctttattgaagattccactagtaattaagtgctttggaaattgaagttttgaaatcagcacat

SEQ ID NO: 623900 - DNA, 496 bp, Homo sapiens
ctgggaggaagggaagtatgggtggtgagaaaggcggagagctggaaagatattggattgtttgaggaattgtggaataaagaatctctatggttgaaaaataaagagagaggtgttggggtagttattgattccgcaaagatgaagctcagagagtayccaggaacatgactggggtcataggttctggagaggaacttggactttaattgaaatgcaaggggaaatgactaaagtcttggtaaagtcaaagtccattggcaaccattcaatgaacttcaaatccatgccttttagggttggtgaccctgaaggatgaagcgttggccttgagaataaggcagttcttgtaagttcaaccactggctttcacttacagccttcatcacatcactcacctcctgtaagcatccgtagccttcattttcaatggagaaaaaagaagttgagatgcatttctccccattgctattttggaatccactcagagcactca

SEQ ID NO: 623901 - DNA, 414 bp, Homo sapiens
ggagtaatatcttcctagggtattacaaataatttcacagtctgtacacacatggtgtacactcactgtgatattaggagtaatatctacctagtrgataacaaataacatcgcagggtgtacacccactttgatattagctgtaatatttttcaaagttgttacaaataagatcacagggtgtacaaacatggtgtacactcactgtgatatcaggagtcgtatctctgtaatatattatgaataatatcacaggttgtacgtccactgtattattaggagtaatatctctgtaggatattacaattaatatcacagggtgtagagccaccgtgatattaggagcaatatctttctaggatattacaaataatatcacagggtgtacgcccactctactgtcaggagcaatat

SEQ ID NO: 623902 - DNA, 595 bp, Homo sapiens
aagtaatacaaagaagacaggctagtaagcataaattttcactttgtggacttctttgtcatcacattccctctgtttgttgtagtaatagaacgtattgtcccttctctgaagtttcttcacatatcctgtctccggccaacgatctacctgcacatcaagaaccagagtacaaacgttacaatggagggttgatttttatctcatattttactatcaaayagttaaaaagtatgacttacagaaacaaagtataagattagattttagaatgcttgagcttttaaagtatgatacccacaagacacatcttacattgcagccttatgctgtaagataactaattcaggccgagtgcagtagctcatgcctgtaatcccagcactctgggaggctgaggcaggtggatcaattgaggtcaggagttcaagaccaacctggccaacatggtgaaacaatgcctctactaaaaatacaaaaattagctgggtgtggtggtaggtgcctataatcccaggtactcagggggctgaggcagaagaatccattgaactctggaggcaggggttgcagtgactctagatggcgccactgc

SEQ ID NO: 623903 - DNA, 595 bp, Homo sapiens
aagtaatacaaagaagacaggctagtaagcataaattttcactttgtggacttctttgtcatcacattccctctgtttgttgtagtaatagaacgtattgtcccttctctgaagtttcttcacatatcctgtctccggccaacgatctacctgcacatcaagaaccagagtacaaacgttacaatggagggttgatttttatctcatattttactatcaaatagttaaaaagtatgacttacasaaacaaagtataagattagattttagaatgcttgagcttttaaagtatgatacccacaagacacatcttacattgcagccttatgctgtaagataactaattcaggccgagtgcagtagctcatgcctgtaatcccagcactctgggaggctgaggcaggtggatcaattgaggtcaggagttcaagaccaacctggccaacatggtgaaacaatgcctctactaaaaatacaaaaattagctgggtgtggtggtaggtgcctataatcccaggtactcagggggctgaggcagaagaatccattgaactctggaggcaggggttgcagtgactctagatggcgccactgc

SEQ ID NO: 623904 - DNA, 595 bp, Homo sapiens
aagtaatacaaagaagacaggctagtaagcataaattttcactttgtggacttctttgtcatcacattccctctgtttgttgtagtaatagaacgtattgtcccttctctgaagtttcttcacatatcctgtctccggccaacgatctacctgcacatcaagaaccagagtacaaacgttacaatggagggttgatttttatctcatattttactatcaaatagttaaaaagtatgacttacagaaacaaagtataagattagattttagaatgcttgagcttttaaagtatkatacccacaagacacatcttacattgcagccttatgctgtaagataactaattcaggccgagtgcagtagctcatgcctgtaatcccagcactctgggaggctgaggcaggtggatcaattgaggtcaggagttcaagaccaacctggccaacatggtgaaacaatgcctctactaaaaatacaaaaattagctgggtgtggtggtaggtgcctataatcccaggtactcagggggctgaggcagaagaatccattgaactctggaggcaggggttgcagtgactctagatggcgccactgc

SEQ ID NO: 623905 - DNA, 595 bp, Homo sapiens
aagtaatacaaagaagacaggctagtaagcataaattttcactttgtggacttctttgtcatcacattccctctgtttgttgtagtaatagaacgtattgtcccttctctgaagtttcttcacatatcctgtctccggccaacgatctacctgcacatcaagaaccagagtacaaacgttacaatggagggttgatttttatctcatattttactatcaaatagttaaaaagtatgacttacagaaacaaagtataagattagattttagaatgcttgagcttttaaagtatgatacccacaagacacatcttacattgcagccttatgctgtaagataactaattcaggccgagtgcagtagctcatgcctgtaatcccagcactytgggaggctgaggcaggtggatcaattgaggtcaggagttcaagaccaacctggccaacatggtgaaacaatgcctctactaaaaatacaaaaattagctgggtgtggtggtaggtgcctataatcccaggtactcagggggctgaggcagaagaatccattgaactctggaggcaggggttgcagtgactctagatggcgccactgc

SEQ ID NO: 623906 - DNA, 310 bp, Homo sapiens
agttaaaaaggccctttacagaggtctgtcttaaggaataaggtgtgtgtgcaggggggactttaattaccagtgggatgtatttaatgtatgatttcatttagaatccgggagccaatggttagtgttttttaatagactgaaattttcatcagggtgagttctggatctttatgcagctggkgctcagctcatctttgacctgcctgggtccttttctcacccattccatggtgggaagcagacactttgacttttcagagcgttattgatggaacaaatgtagtttgaatgagcttattagagtgtc

SEQ ID NO: 623907 - DNA, 535 bp, Homo sapiens
ttatgttttctcagtttcttttctctttcttttgtttattcattctttctattatttgttatgtggttttgtgtagtaagtgtgcttgtgtttgtggtttcatcaatcttttatggctttgggttatgattcataattagaaattccttctccattccaagatttgaaagtaattctcatgtattttctttggctacttttgtggtttcattggaaatatgtaaatctttatatttatttgaaatatattctcatgaggatttagagcatgctttttaatatacagttaaccccttgaacaatataggtttgaactgcatggatctacttatacgtggattttttttttttttcctacagtaggccctccatatctggcaagtttcacgtccacagccaaatgcagatctraaatactgtattcatagaatgcgaagcctgaggatgtggaggaccaattttttgtatctatgggttccacagggctaattgtgggtcctgagcatgcatggattttggtggagtgtcctggtac

SEQ ID NO: 623908 - DNA, 457 bp, Homo sapiens
ctcccacaacatgtggggattatgggaactactattcaagatgagatttgggtgggggcaaagccaaaccatatcacctatcatattgtttaatttataaattaggcacagtaagattaataataactggtaataaaattgaataattataacaatatactataataaaagttacatgaatgaggtctctgtctctctccctctcaaaatatcttattgtactgtactcagctatttttctacctctcttgctcacaggtaactgaaactacagaaagtgaaacttcagacaaaaggggtctactgcarttatacttctttttgcttagactgttagaaatctcaagacaaacttgaagatcataacactgtggacttctgtatttggtgcatgtttcaggtacctatggctgcaaaacaaaccaccccaaaatttaatggcataatcattattttc

SEQ ID NO: 623909 - DNA, 619 bp, Homo sapiens
acaaacttgaagatcataacactgtggacttctgtatttggtgcatgtttcaggtacctatggctgcaaaacaaaccaccccaaaatttaatggcataatcattattttctaatattctgtgacttaacggggctcatctgttgtcttttaggatctctcatgcagatacagttagaaggaggctggactagagtcatctgaaaattcaattggactaaatttcaaagataatgtattagtccattttctgttgttataactgaatgccatagacttggtaatttgtaaagaaaaaaggtttatttagcacatggttctagaacccagtaagtcatagagtgtggttcatttggtgaggatcttcttgttgtggcatgacttggtggagagtattagatgtgacaaggcaagaacatgtgtgtcagctcagatctttctcttcttatgacaccaacatttttatcatgaaggccccactctaataaccttatctaattcttattacctcccaaaggttacacctccaataaacatatgaatttgaggattaaattttcaacccttgtgctttgaggaamattcaaagaatggcatatggcttcttcatcgacatgcctg

SEQ ID NO: 623910 - DNA, 527 bp, Homo sapiens
aagaacagtgggcccaggggaccggctctcagcaaatggaggccctggtctctgagttccctcagtatttactgatcactatctctaccatcttggtgagggggatgtgrcaggactaaagggtaatggtggggagagggtcagtaggaaaacatgtgagcaaagatctctgtgtcataaataagtttaaggaaaggtgctgtgccttgatgtgcacgtaggccagatttatgtttgactttacacaaacatctcagtgcattaaagagcagtactgctgccagcatgtctcacctccagccataaggtagttttctcctatctcattaaatagaacatacgatcaggttttacaccgagacattccattcccagggaggagcaggagacagataccttcctcttatgtcaactgcaaagaggccttcctctttcactaatcctccttatacagaccctttatgggtgtcgggctgggggatggtcaggtctttcccttcccacggagccatatctctggctatcac

SEQ ID NO: 623911 - DNA, 496 bp, Homo sapiens
tcaagccagccgcataaatttgcataagtaatgaagagccaaatgttaatcaccaaaacaatgggaaaaaagatctgtagagcatgtcagaggtctgcacagtagcccctcccatcacaggtccagatacctaggaggaraaagtggttttgtgagccaggcccagtgtccctatgctgtgtgcagcctagggacttggtgctctgtgttccagctgctccagccatggctgaaaggggccaatatagagcttgggccatggcttcagagggtgcaagcctcaagccttggcagcttccatgtggttttgagcctgctagtgcacagaagtcaagaattcaggtttgggaacctctgcctagatttcagagtacatatgcaaatgcctggatgtccaggcagagttgtctacaggggcagagccctcatggagaacctctgctagggcagtgtggaagggaaatgtagggtcagagttcctacacagagttcccac

SEQ ID NO: 623912 - DNA, 496 bp, Homo sapiens
tcaagccagccgcataaatttgcataagtaatgaagagccaaatgttaatcaccaaaacaatgggaaaaaagatctgtagagcatgtcagaggtctgcacagtagcccctcccatcacaggyccagatacctaggaggagaaagtggttttgtgagccaggcccagtgtccctatgctgtgtgcagcctagggacttggtgctctgtgttccagctgctccagccatggctgaaaggggccaatatagagcttgggccatggcttcagagggtgcaagcctcaagccttggcagcttccatgtggttttgagcctgctagtgcacagaagtcaagaattcaggtttgggaacctctgcctagatttcagagtacatatgcaaatgcctggatgtccaggcagagttgtctacaggggcagagccctcatggagaacctctgctagggcagtgtggaagggaaatgtagggtcagagttcctacacagagttcccac

SEQ ID NO: 623913 - DNA, 491 bp, Homo sapiens
agccaaggaagaaatgaggaaaacagcttacaaaagcttacaggagagagaggaagcctacactggaaagaaggaccrtgtttttaaaaactcagaaacaacagcttataggtttattggtctgacaatagaaacgattggagagtatgatgttgcactgagtctccctctgcttccagaatagccctacaagacagaggcctggatggtaaaacctacaacactttccaggcaagtattttccccagaaggcactgctctagattcattctccatgcagtcaacacccacaatgtgctggaggttctctatatattggattcttatgttcctttggtaggagaggctggggaggacacagaagccagggatgtgatgtgtacaaagtcacatggttattgatagagtcaatattcacacccagttcccaaattaactctaggcctctttccacaatgtcagtaagccttgggggagatgtaaacaggagc

SEQ ID NO: 623914 - DNA, 415 bp, Homo sapiens
ctttaaaagaagtatctgtttcactacagaaaaattaacagggtttttgacattttttgtatttgttagagatataaggaacacagtcaaaagaaaaattataaatagaataagattttaaatgcatttaacagataaaaggctggtaatagaatagataaaatgacttacaagttgaaaagacaaaaacaattaaaatggacaataaatatgaataggcaccttttcaacaggtaaagctgactgacacatatgtatcataaaattatcagtacaacttagtcattggaatttgtagcttgtacaatattacaaaaacaaaaaagccactgcygacatttagaattaaggaaatttacaaagaatttcagtttcactccttttgtttggtaggtcataaatctaacactcaact

SEQ ID NO: 623915 - DNA, 548 bp, Homo sapiens
gcacaccaccacacctggagaatttttgtatttttagtagagatggggtttcaccctattggccaggctggtctgaaactcctgacctcaagcgatccacccrcctcagcctcccaagttgctgggattacaggcatgagccaccgtgcccagcttactgtgcactttctttctattactattacattgtaatatatgattaaataattatataacacagcataatgtagaatcagcgggagtgtgagcttgttttcctgcaactagaggtcccatctggggacagatcatcgacattaggttctcataaggaacatgcaactagattcctcgcatatgcagttcacagtagagttcgcgctcctgtgagaatcggatgctgtggctgacctgacaggagccagagctccacgggaatgtgagagatgaggaatggtgtggattcaggtgaagcttcccttgctggcccaccactcacctgccatgcagcccggttcctaacagatcgcagactggtaccagtccatggcctgggggttggggacccc

SEQ ID NO: 623916 - DNA, 636 bp, Homo sapiens
cagtcaccttgaatttcttccaggctgcagtgggctagcaaaatgagccygagtgctttgcaagacctaactgtgatgagttgccttaagtctgcttgttcctggtcagttgtcagctccaaagaggcaggaactgcttattcaacaaatcagaggaacaaaatccatctgcaacctatggccaaagtgttcttgcccaaatagctacacaaagatagcccaggagcatgccaaagaaaatataaacggacatgtgaagcataagtatgagaacacatttgccaaaaaaatatgttttatgaaatttcaccgaaaaaaaaaaggatggtgagaaagcaaaaatatttatacattggcttttttttggggggggatggaatctttctctgtcacccaggctggagtccagtggcatgatctcagctcactgcaacctctgcctcctgggttcaagcaattctcctcagcctcctgagtagctgggattacaggcatgtgtcaccacgcccagctaatttttgtatttttagtagagacagggttttgccatgttggccaggctggtctcaaactcctgacctcaggtgatccaagtgctgggattacaggcgtgagccaccacgcctggccagtaca

SEQ ID NO: 623917 - DNA, 636 bp, Homo sapiens
cagtcaccttgaatttcttccaggctgcagtgggctagcaaaatgagcctgagtgctttgcaagacctaactgtgatgagttgccttaagtctgcttgttcctggtcagttgtcagctccaaagaggcaggaactgcttattcaacaaatcagaggaacaaaatccatctgcaacctatggccaaagtgttcttgcccaaatagctacacaaagatagcccaggagcatgccaaagaaaatataaacggacatgtgaagcataagtatgagaacacatttgccaaaaaaatatgttttatgaaatttcaccgaaaaaaaaaaggatggtgagaaagcaaaaatatttatacattggcttttttttggggggggatggaatctttctctgtcacccaggctggagtccagtggcatgatctcagctcactgcaacctctgcctcctgggttcaagcaattctcctcagcctcctgagtagctgggattacaggcatgtgtcaccaygcccagctaatttttgtatttttagtagagacagggttttgccatgttggccaggctggtctcaaactcctgacctcaggtgatccaagtgctgggattacaggcgtgagccaccacgcctggccagtaca

SEQ ID NO: 623918 - DNA, 588 bp, Homo sapiens
  misc_feature 563, 564, 565, 566, 567, 568, 569, 570, 571, 572, 573, 574,575, 576, 577, 578, 579, 580, 581, 582, 583, 584, 585, 586,587, 588: n = A,T,C or G
tatgaaaacttctccaaccttgctagagaggccaacagccaaattcagttaatacagagaactgcaagattctacacaagaagatcatccccaaaacacgtaattgagctttctccaaggttgaaatgaaagaatgttaaaggcagctagacagaaagggcaggttacttacaaaggggaccccattaggctaacagtggackgctcaactgaaattctacaggctggaagaaactgggggcctatgttcaaaactcttaaagtaaaaagtcttcaacaaagaatgtcatatccagttaaactaagcttcctcagtgaaaggaaaataagatcctttgcagataagcaaatgttgagggaattcattactaccagacttgccttaaagagatcttgaaaggagtcctaaatatggacagaaaagaccactaccagctaatacaaaaacacacttaaacccacagaccagtgtcactataaagcaaccacaaaaacaagttaacataataaccagctaacagcacaatgacaaaatcaaattcatacattcagtactaaacctnnnnnnnnnnnnnnnnnnnnnnnnnn

SEQ ID NO: 623919 - DNA, 519 bp, Homo sapiens
ctgctcaccttttcttctatgagatactgctgatcaaattctaaggaataaaactcaatggggaagttgcagggattcttcactatcacctcggcctcgtctccaggtgcacaaagtagcagtggccccagatccaggactgaaggactaaattccaggcgtggctctagaccttgcccacgtgccaggagggtaagcttttgagcactctgggcaatctgaaacaccagggtttggctgtagaatttctggaaaacataaaaacaaaacaagcatctgaatttatttccattacatgtcatgtaaaacaaaacaccgctgaggggaaaaaacttatctatttagattaagggagaaaacttattataaaattgcataagagtaatttttattaccraattaacataagtactgggtatttagcatgccaagcattgtaccaagtgctagatatcaaataaattctgggtatctagcattctagcacttgtatcaagtgcttcatcgttcgtagcaagc

SEQ ID NO: 623920 - DNA, 654 bp, Homo sapiens
atcacctcggcctcgtctccaggtgcacaaagtagcagtggccccagatccaggactgaaggactaaattccaggcgtggctctagaccttgcccacgtgccaggagggtaagcttttgagcactctgggcaatctgaaacaccagggtttggctgtagaatttctggaaaacataaaaacaaaacaagcatctgaatttatttccattacatgtcatgtaaaacaaaacaccgctgaggggaaaaaacttatctatttagattaagggagaaaacttattataaaattgcataagagtaatttttattaccaaattaacataagtactgggtatttagcatgccaagcattgtaccaagtgctagatatcaaataaattctgggtatctagcattctagcacttgtatcaagtgcttcatcgttcgtagcaagccctctgagtatcactttcacatccctcaaatcttccagtgtgctcagacttccagctgccactgtctgcatctctgggcctgaaggttctcatttcatggaccctgctgtccatgggcaggggagggcagggcaaaaatgccagggaaatgataccatctggaattagttattaagcaatgactctggggatttacggyaaaaagaccccagctccctt

SEQ ID NO: 623921 - DNA, 318 bp, Homo sapiens
cttcagttggtaggaaaagggtccaagatggagatatggtttggctgtgtccccatccaagtctcatcttgaattgtagctcccataactcccaygtgttgcgggagggacctggtgggaggtaaatgaatcatgggggcgggtctttcccaggctgttctcgtgatagtgaataagtctcacaagatctgatggttttataaatgggagttcccctgcacaagctctcttgcctgccaccacgtaagacatgtctttctcctcctttgccttccactgtgatagtgaggcctccccagccatgtggaactgtgagtc

SEQ ID NO: 623922 - DNA, 318 bp, Homo sapiens
cttcagttggtaggaaaagggtccaagatggagatatggtttggctgtgtccccatccaagtctcatcttgaattgtagctcccataactcccatgtgttgcgggagggacctggtgggaggtaaatgaatcatgggggcgggtctttcccaggctgttctcstgatagtgaataagtctcacaagatctgatggttttataaatgggagttcccctgcacaagctctcttgcctgccaccacgtaagacatgtctttctcctcctttgccttccactgtgatagtgaggcctccccagccatgtggaactgtgagtc

SEQ ID NO: 623923 - DNA, 597 bp, Homo sapiens
tttcagtcccaccctcttttgtaactctttctggaactccaatgacaagcgcattagatcttttgttatggttccacagatccctgagcatcaattcattttttctcattagacttaaatagactttcaagggactcaaaacagagtctactttctctcttttrtttagactgggcagaataatggcctccgaaagatgtccacatcctaatctctggaacctgtgaatatgttaccttatacagcaaaaggacttggttgacatgattacattaagaaccttgtgatgaggagattattctggattataatgggcccaatgtaatcacaagggtccttagaaatggaagagagttagaaggagatatgactatggaggaggttggagtaatgtgatgtgagaaggattcgatcctctgttgctggctttgaggatgatagaaggggactacaagccaaggaatgtgggctgcctccagaagctaaaaaaacaatgaaaaggattctttcctggtgtctccagaaaagaatacagcccttccaacaccttgattttagcacttctgacctacagaactgtaagataaaaaatgtgta

SEQ ID NO: 623924 - DNA, 597 bp, Homo sapiens
tttcagtcccaccctcttttgtaactctttctggaactccaatgacaagcgcattagatcttttgttatggttccacagatccctgagcatcaattcattttttctcattagacttaaatagactttcaagggactcaaaacagagtctactttctctcttttgtttagactgggcagaataatggcctccgaaagatgtccacatcctaatctctggaacctgtgaatatgttaccttatacagcaaaaggacttggttgacatgattacattaagaaccttgwgatgaggagattattctggattataatgggcccaatgtaatcacaagggtccttagaaatggaagagagttagaaggagatatgactatggaggaggttggagtaatgtgatgtgagaaggattcgatcctctgttgctggctttgaggatgatagaaggggactacaagccaaggaatgtgggctgcctccagaagctaaaaaaacaatgaaaaggattctttcctggtgtctccagaaaagaatacagcccttccaacaccttgattttagcacttctgacctacagaactgtaagataaaaaatgtgta

SEQ ID NO: 623925 - DNA, 545 bp, Homo sapiens
ttccccacggtggacttgacggccrcaaaccctatgggattcaggttacctgaacacgatctcatatttccccacattcctccacacggccgacttgatggccttacatctgatgggattccagttacctgaacgcgatctcatatttcccacggttcttcaattgcaggggctgcttcgcctcctctgtgaccctgacaatcccaaaatccagtcccccttcagctcctgcagagaccaggggccagggcagagaggggtgaatgggcatgagagtgggaagcaggggaagtgcctgttgaaattcacatggaaaacgcatggtgacagtttaagagaatttgttttctgaaagtactgtggctagaaaagcctcttataattgaatctgggcaaacaaacaacagatgctgctcttgatgcactctacagggctggtccctctggattccctccatcctaggatcattgcctttcatgtctactatcagctaaaactttcagtatttaaaaaagtcttgcataaagttgggatattacacata

SEQ ID NO: 623926 - DNA, 669 bp, Homo sapiens
tgtgataccaccttactcctgcaagaatgaccataatcaaaaaataaaatttatataaataaataaaaacagtagctgttggcatggatgcggtgcatcaagaaacacccttctacactgctgatgggaatgtaaactagtacaaccactatggaaaacaatgtggacattccttaaagaactaaaagtagaactgcaatttgatccagcagatctggatctagatactgcatatctacccagaggaaaagaagtcattatacgaaaaagatacttgcacacacatgtttatagcagcacaattcacaattgcaaaatggtggtaccatcccaaatgcccatcagtcaacaagtggataaagaaactgtggtatatrtatacacaaaggaatactactcagccataagaaggaatgaattaacggcattcacagctacctgaatgatatcggagactattattctaagtgaagtaactcaggaatgggaaacatcgtatgttctcactgatttgtgttagccaagctatggggactcaaaggcataagaatgatacaatggactttgggacttggggggaagggtgggagagggcaagagataaaagactacaaatagggtgcagtgtatactgctcgggtgatgggtgcaccaaaatctcacaaatcg

SEQ ID NO: 623927 - DNA, 563 bp, Homo sapiens
ggtttatgtaaacatcacgtggcagcatcaaacttctgttcaggcagcctctcctcaccttttcccctcctgtgttcagagtggtatttcctcagcggaagatggacatgaagacaaatgaggtcatctttaagaagtatgttatgagcacggagacgtactactttgggccactactttgtggaaaatcaagagataagtaagtgttccattattttaaagcagatttcagactgctgggttgggctcatgaacagtgcaagtaggattcctgtgtacatagatgtagcttttactaatgctgcctctcttagccccaaccacaaatcaggagaactgggttcttgtgtcccaactccctgctggacacccagaggaatragggtgccatgttcccatatgggaaggcctaggagaggtttcaggcttgatcagggtaggatcaagagtttgctttagcttatgttcagtttaagaggctgggaagatatttctgtagttacatgaagcagagaataggttatacagctttggttctcaaaggagagatcactcttcaaggc

SEQ ID NO: 623928 - DNA, 387 bp, Homo sapiens
actgagcctaagctttctgattcaaatccagcctcttggcaycatccctctgtgggatgttctagtccaaggttctgagccccattcaagacctaatgagatagaatctccaagggctggcccaaagacctgtgtttactcaaagctatctatcagtactttagagaactttccatcatgatgaaaatgttgtatttttgcattgtccaatatggtggcctatagctgaatgtggcttcagagcacttaaaatgtggctagcgaaactaaagaactgattttttattttattttaattaatgttaattttaattttaataaccacatgtgtctagtggctaccatattagctagcacagatctaagttcaaatttcaactcttccct

SEQ ID NO: 623929 - DNA, 467 bp, Homo sapiens
tggcttcaactgaaagtcaccaggtgcatttgccctgaacaagagtcagcctgtcctttgaaactttgaagccaggcattgatttctcttctctagctatgaaagtcctaaatgacatcttccaatagaaagctggcttatctgcattgaaaatctgtcrttcagtgtagctacctttaacaattatcttagctagatcttttggataacttgctgcagcatctacgtcagcacctgctgcttcaccttatatttttatgttatggcaacagcttctttacgtaaaccttatgaaccaacatctgctggcttcaaacttttttcttcagtttccttacttcttcagccttcatagaattcaagagagttagatccttgttctggattaggctttggcttaagggaatgctataactcgtttgattttctatccagaccactaatgctttatccatatcagcaataat

SEQ ID NO: 623930 - DNA, 542 bp, Homo sapiens
aaaaaaaaaaaaaaaagagagagagagaaagaaagactcttgactggtggctactggtgggaaagaggtttttactacatccccaattggacctttttattttaaagtatgtgaagataaataaatgacacaaaagagtgcataccatcccatttatttgaaattccagaaaaggcaaaattaatctgtggtgaaaaaatcataacagcagttccttctaacaggatattgactgggaargcacacaagagaaatttctgggtgctaaaaatggtctgccttgataggggtaggaattacaaaaaattcagttaacatttcaatgaatgtaaattttatcttaaaaactataaaaataatttaaaatttaaaatctagtagctaacacctagttgagcgctcagtgtctatgggtattggccaaagctatacatacacaattttgtttagtcctcatactgtcctcacgaggtaggtattattatcataacccccttgcatatgaagaagcccaaatttagtaaatactaaataactttcct

SEQ ID NO: 623931 - DNA, 554 bp, Homo sapiens
aaattgctgtatgtccatgatgtgatgcaatcttttaaaatagtgttgagtgggattttcctatggtgtgggtaggagtatgaattggcataacctctataacatacaactttgcaagtagatcaaaatttaaaatgcattgtccccccttctagaaattatcctccagatacacctctgcacttgcataaagcatgtaaccatccttgtacactgcagctttgtttgtaaaagcaagaaatattggaaacaacttaatcccaccaataggagaccgtctgaataaactaaattacatctgcacaaggcaatactatgaaattcttttttaaaaatgagaaagttctctacatactaatttggcacaatctttgatatattaagaaaaaatacccagtgcaaaacaaagtacactgtgtgctaccatttgtataaagaaaaaaagtctatgaaagcaaccaacacttaactgagcactgacctaagttttttttttttttttttttttttttttgaggcasagtctcactctgttgcccaggccagagtgaagt

SEQ ID NO: 623932 - DNA, 464 bp, Homo sapiens
gtatgtgtgagtatataaaatatttgtcttttaaatattaattcttctttttctattttcaaagatgcgtgtcatagaaaactcaagaataggccagaaacagtggttcaygcctgtaaccccagtactttgggagccaaggcaggaggatggcttgaggccacgagttcaagaccagcctgggcaacataacgagactccagggtgtgtggtggtgcacgcctgcagtcctggctactttagggaggctgaggtgggaaggtcactcgagcccaggcattcaaggctgcggtgagctctgatcatgccactgcattccagcctgggtgacagagacagacatcttgtctcaaaaataaaatatatatgtacatatatatgtacatatgtgtacatataaactcaagaatacagaaaaattaaagcaaacatcctcaaaattcccatcttctttctaccccact

SEQ ID NO: 623933 - DNA, 516 bp, Homo sapiens
gtgaactttaatttgatctgcaatgtggaaaagaaagtccaccctgtgacattaaatgtcaaggccgagggctacactatgaatgtggagatcaagtgcaaggacaggacaggctccatcactctgttgactcccaaccagactaacatcatcaacttctatgaggtaaaggtgtaagaagaccttgctatctatctcagcttccattctgactggggaaagtagtaaaaatgaatatgagctgagtctttctgcttcaaatgccagagagaccaggaaaacagaaacactscaagagcagctctatccccagaatgtatgtagatatgatgtgaatgcttttcttattttattttcagggggggtggagagatggtggggagaagaaagagtgcttgtgttaaacatacaggaaggatatttgactaccaacaaaggactaagaactaaattgccactttgctccatgagatattgaaagaaccccaatacttagtagctcctgctggaatatct

SEQ ID NO: 623934 - DNA, 545 bp, Homo sapiens
cactagtcagaaaagctaaggagaaaaactatttcagaacatgaagtctcagtaattggtggttccaggtatcctgggatgccaaaataaagatgaagctaaaacaaggtctggttgaaagtctgaaaaacaagcctccacacaaatgcaagccactgtcactctctaaccctggcagaagtttgragttgtattttctggaaaggtaaaagaaagccttagtttggccgaacaccaaccacagatatagttcaatttggggaaggaggaaggttctgtctaaggctctcagaatgctgcaaccagatataaactctccagtcaagaagctggaaaagacttgttttggaaatctgagcagtccaagagaaaacactgaaagaaattaacatttggggttgctgagttacttaacgcaagggtcagcctgatcacgataaagtgaggaccacaattaaggaggcccattcacatgcacaaggcttcaatccaattgttattgtccgatttttaaatatgaagcagaaaccaccacatatatgagg

SEQ ID NO: 623935 - DNA, 540 bp, Homo sapiens
aaatagataggtagataagacaaatggacagaggagagacagagagagagagagagagaatttgctatcatggawtggctcatgtaattttggaggctaggaagtcccaggatctgctgtctgcaaactaaagacccaggaaagccaatggtgtaattcagtctgaaggccagagaaccaaggaagctaatgggattaagtctgagtccaaatgcaaaagcctgcgaatcaggaacactgatgtcctggaacaggggaagatgatgttctaggtcaaggaagacagtacatttgccccttttatgcctttttgttctattcaggtgctccgtggattagatgatacctacttaaattggtaagggcgatcttccttccctagtcttccaatgcaagtcctaatctattctggaaacatcctcacagacccacccagaaataatgttttaccagctgtgtaccctttcacctattcaggttgacccatacaattaaccataacatagcctgatttgctgccaatcaaaaaaaagtgatggc

SEQ ID NO: 623936 - DNA, 470 bp, Homo sapiens
atgtatgccctgcttttaggcaaataggagggcagagagattttcttctatctgcttcttttcaattgccttcagctcaatatagtccttatgccaaaatgagttgcagattctggtctcctacagtatttttatttatcctagacacaaccctatgtcatgtgatcttattattcctatttcacagatgggggtaagagagtttttataattatttaatagttgatgaagccaygcctaaaatctagtagtctaaattcagaccctgtgctcttcaccagtatatactttagattttgccaagaatattcatagtctagtagtttactttctacttaatgtatattcaagtttggaaagcagatattcatgacacgtctatgaaagcctaatatagacataagcctgaaacaacaataatatcagtaataacagctaacaaaaatacaagttaaaaaatgcaaactgaa

SEQ ID NO: 623937 - DNA, 575 bp, Homo sapiens
accagtacctggaaaaatgcctgatgcataacagttgcacaataaatatttgtaaattggatttaacctatcagtaaactactgactttcaatttttgttataaggacttctaaatgttcaaagctagggcttcagtggcttttgcttttaaacataytggattggttgatggtcaagtgataggcttgatagtcactttacattgggatcatttgattttttcttaagatcctcgttataatacatcaaaaaattattaagattttggtaattaacaaagataaactaatatacaacagaaaaaattcactgcaagcacaacatatttaacagtgttgcccaattttcagcctaataattgttcttctgacactatagggtgtatctatatttcatcacaaatcataaattgattaaaattcaccaaaggcaacatattttttatggctatatcaatcattgaagggatttataaataacttccaaaatcttacagacaacttatcctctagtttgctaatcgaataaccaatctaataaaaatacaacatagaatacatgtagatatataaat

SEQ ID NO: 623938 - DNA, 543 bp, Homo sapiens
ccacccctgtcatcacccagtgggcccatacataaagtggccatggtggcagggatgraggttacacatgggctcagcaacataaagttccactcaccaaggctgacctggctatgaccactgctgattgcctaatttggtaacagcagagaccaacactgagccctcgatatggcaccattccttgggtgatcagccagctacatggtggcaggttgattatattggacctcttccttcatggaaaggggagtgggttttcctcactggaatagacactccagatatgggtttgcctattttacatgcaaggcatcttccaagactaccaatccatggattcataaaatgccttatgtgccgtcatggtaaaggcactcattttacagctaaagagtaaggcaatgggctcatgctcatggaattaactggtctcatcatgttccccatcatcctcatttatagctaagctactaagctgtgggtacacaaaggcatacagagtggtataatggacattggagactcagaagcagggaggag

SEQ ID NO: 623939 - DNA, 543 bp, Homo sapiens
agatatgactttaaagtttatctttaataaagccatgggactggaggtgatcatgtagaaagcaaccatagatggaaatgaagtctgaagtctgagtcttcgattacagaggtaaatgasggggaaaaaaacaaaggagactgagaaggaaaagcacgtgaaagagaaaggaaacaatgcccttgattgaataaaaagggaggatagttctaagtagaggccttgtatgtaggattatgattagttcatccacagtaataatctttctaggtagactacatggggatagatgcacacaggtatgtggggagatgtggtgacaggagcatgagaaatttattttcttattgcttctattttctcagtgatcaaggaagaaagttcatcagggggaagggaggaatataaagaagattttggagctgtgaaaagaaagctgtgtgctattgccttccaggagagaaagatagtgaatggaatagtgaaagagactagagaaagatgaaaggacaacactgaagtcctgcttgaagttagcggtca

SEQ ID NO: 623940 - DNA, 553 bp, Homo sapiens
caaactttgaaactccactccctcctattacccaccatgtacttctttattctatgcacatttgtctaattagatgcttgtatctaatcatgttcttacttagaatttccaggggttaatcttgagacaaaccaaggatggagactgagcttccaaattccacagattacctcaaggcagttggtcaacaactaagccattgttgagaggatgccagtccatgctccaaatggaccacggctcaagatagcaactggaacaagacacacagaccttgtgctcagcactyctcctgcatgcctcccattgtatcttccgttttcaaagcccctcctccaagcctaaagttcgaagtcatttctggagttgtaaactggctgcttccccactgctagctttggaaatgaaaccattttccttttgctgtacttcatccttgttattggctacaagcagcaagcagccaaacttgtgctcagttacagttttgtcaggtaaataagatgaagggaaagtgtgcatacaagagagtgaccatcattgtgggccataa

SEQ ID NO: 623941 - DNA, 529 bp, Homo sapiens
gatgtatggatttttgccctctcccagaaagaggtcagaaacatgtggatggagccctaaggggtagcctggtctcgtttgaaataaaataaattggcttcacagtggccactctgacctctggcagtctaatttctcagctggattataactagatgccctacatacagctattctcaagaactacacaagcctacgaaagagagagaaacttttaactggtgagaatgctggagctacatctgtccaggaaactggtaacacggtgacatcaactgggctccagaagttttgagaacttccatttggctttgagaaacaattcaaggtgttaattctgacttataaagctgtctgtgttttggatgctggttaccttagaaatggctctaagsccatttctcttagctctaaggctgaagagttcccagatttacacttcaaacacccagaagcaacacccttccataaacagacgagatggctagaattaagggctgcttcaatctcacagaattctactttgtaa

SEQ ID NO: 623942 - DNA, 611 bp, Homo sapiens
cagcaccaccatcaaagccataaacacatccatcacctmccaaagtgtcctcctgccctctttgttgttgttgttattgtctttctataagaacccttaacatatgatctactctcttaggaattttaagtatgtaatgcagtattgttagtgatgggtgcaatgatgtatagatctccagaacttatcttacacaactgaaactttgtaccttttaattgttcttttcccatttcttcctctccctattcactgacaactaccattctactctctgctactgtgagtttgactattttagattccacatgtaagtgaaatcatgcagtgtttatctttctgagtctggcttattccatttaatataatgtcttcgggttcatccgtgttgtgcaaatggtaggatttccttatttttgaggctgaatagtactccattgtatgtatctaccatgactttttcattcattcatccattgatggacaattaggttgcttccatatcttggttattgtgaataatgctgcaatgaacatgggaatgcagatgtttgtctcttcaagatcctatttcaactgttttggatatatacccagaagtgggattgctg

SEQ ID NO: 623943 - DNA, 578 bp, Homo sapiens
cctagtaggtgtgagatgatacctagagatttcagtttgcatttgtctgatgattagtgatgttgagcacattyatatgtacttcttggccatttggatgtctttttttgagaaatttcttttcaagttctttgcctattttgtagtcatatttattaatgtttttcttttcagctgtatgaattccgtattattttagatattaatcccttatcagatatatggtttgcaaatatttgctcccactccataagttgccttttcattttgttgatcatttcttttgctatccagaagctttttagtttgatgtaatactactggtttatttttgcttttgttgtctgtgcattttttgctaaaattaacttcgaggagcttttcctctatatcttcttctctaagtctttattttgagttgatgtgggtgcttggtgtaaggtaagagtttgtttgttttacatgtagatacacagatttctattcaatatttattcaaaaggttatctttcaatcttgtggatttctggtgcccttgtcaaaaattagttgcaaatgatgggcaaagacttcaagac

SEQ ID NO: 623944 - DNA, 620 bp, Homo sapiens
catgcatatgtatgtttattgtagcactatttacaatagcaaagacttggaaccaacccaaatgcccatcaatgatagactggataaagaaaatgtggcacatatataccatggaatactatgcagccataaaaaagaatgagttcatgtcctttgcaggaacatggatgaagctggaagccatcattctcagcaaactaacacaggaatagaaaaccaaataccacatgttctcactcataagtgggagttgaacaatgagaacacatggacccagggagaggagcattacacacttggtcctgtcagggggtggtgggtaaggggagggagagcattaggacaaacacctaatgcatgcggggcttaaaacctagatgacgggttgataggtacagcaaaccatcatggcacatgtatacctatgcaacaaacctgcacattctgcacatgtatcccagaacttgaagtaaaatttaaaaaaattagttgcaaatggatgggtttacttctgggctttctattctgtttcactrgtttatgtttttgtttatgcaaccactatactgttttgattatcatagctttgtaactttttttttcaacttttactttagatt

SEQ ID NO: 623945 - DNA, 596 bp, Homo sapiens
  misc_feature 586: n = A,T,C or G
atgatggaaaacatattgtatgaggtccattctttgaacattgctctttttgtagtacccctcacttaaaatgcaaatattactggaagtgtaacttagtaagtcatgagcaactttatgtaagtagttttattataaccctcagttcccatgagccaagagggcattcagggtgcttaaacacacaatggacctcagctaaaaaacaaaccaaaacaaaaaatctggtagtcatctagggcttgtctcaaaactagtgagcaggttcacagaatgaccaacacgtaagagaagatggtatgtcttctattgtaggggagagctagagatctctgttttataacatagcagtagctttcctaataacattttaatatctaagttatgtccaaatgttatttgggccctctgggcatttttgaaaacaacattctcagattctatgcataatgattacctcgcttataataaaataccgcaggatattttctaaaattcctattgawaaaaaggttggacctggactgctgttcctgggaagaggagtagatacactcttccctcttcctttcactaagtacaactnaaaaccatgg

SEQ ID NO: 623946 - DNA, 573 bp, Homo sapiens
taatatttactgtttctttctcttggtatttaggaaggttttgatcttcttccagtggttacctctttctaatattgtttgtaatgtcttcagtccacttttgcctttctgaggcttctactatttggtttgtcaactctaattgatatacttggactgcacatattacctataaagcaataagtttattctttccaccttctcctcacttttctctgtgtttctggggagttgtcttatttctactttgtcagattgtataatgcttatacactctttctccactatttgttttaatgttaggactacactgaaatatattccatgtatactatcagttcatttgccagagtttttctagtcttctgttggttggataaagcttaacttcttgttctatttgtgaatataccactccttcagttctcacactttatcttcaaaactgtttttatatagcattggtgrtttaacactaacttgtctagatataaaagctttcactcacacttcctgttcttgcttttaaaaactcttgtttcaaagttgttttgctttgtatcttgctgtcaa

SEQ ID NO: 623947 - DNA, 499 bp, Homo sapiens
tatgtgaagcaaaaatgtgtaattttgatgaagttcaatttaccaatttccttttatgtgcttttggtttcaagtctaagaattatttgctcagaagtagatcctgaaaattttctcctaatttttttctaaacattttatagttttatgctttatagtgaagactgtgattcaattttatttaatttttattaaggtatcagacttaagtctaagttgatctcctcctcttccttcttctccttccacctcctccttctccacttcgctgactccttgtcttcttgttgtctatggatgcccaattgcctgataccatttatcaataaggctacctttcctcttttgaagtgtttttgtaacttcattaaatagaagctagaaatatttgtataggtctatttctrggttctgttttaatgatctgtatgtctagccctacacaaatacaataggattgactactgtggctgttaagtcttgaaatcaggtagactgg

SEQ ID NO: 623948 - DNA, 576 bp, Homo sapiens
actatgttcagttttctgatctatgagcatggtatatttctccatgtattgaaatcttctttaatttcttttattattgttgtttagttttcagcatatcaatactgtacatgtattgttagatttatacctatttcttttttttgagcaattgtaaatggtattgtgcttttaatttaggtgtctatatgtcctttgccagtatatggacatacaattgatttttatatgtttaccttgtatcctgtgacctcactggactcacttattagttcttgtagtctttttgtgaattccttaagattttcaatatagatcaagatgttatgttcaaataaakacagtgttatttcttccttcttcacatgtatgacttttatttctttttcttatcttattgcattgactggaacttccagtgttatgttgaaataagcgtagtgagagtatacatccttttcttgatagtagggggaaagcattcagtcttttactattaagtatagtattagctattgattttttgtagatgctctgaagctgatgaaacttcccctctattctaatttttctgag

SEQ ID NO: 623949 - DNA, 560 bp, Homo sapiens
accaaaacaaacaaacaacaacaacaacaacaacaaaaaaccccagtcgtcttgattcaagaatgttcagctaactatcaatgcttaattatcattactagactggtcaaatataagagctggagatgcagtgtaaacccaaggtaaacagttctttaccaataattcactaaaaatgagtgtttgtcaggctcccatctttaatcagcactaaacagacacactcactgaackaaaaagaggagaattgctgaagtcattgcaagcacttctccagcatcaggggagcttaaagtaaatgaaaatgccttctgctgcactgtccatctcaacagcctccacctaactgaaccctcttctctaaaattagtttttagagatcacagaattcccaaatatcattcacccccccaaagtttgggtcttatattctttttaatgtgtactctgctctatctggatcagccctagctctatccctgtggccctcccgaaaaccgggctccattgttccctttttgtctgttgactggaaacttcaaccagagaagctccatccc

SEQ ID NO: 623950 - DNA, 541 bp, Homo sapiens
agagtgtgttgcaatgagctgagcagaggagagtggcwttcagttagaaaaaggttgaagaaggcagagacaaagaatgaaaagtggattgatcattccagaatgactttctttataggtttcagcagtgggaaattccttaatatgccagctcaggtaaactaggtttcttctggttgattgctgtcaatctcctggttttgtgtttgtttgcttatttttatttattttttaaaatttttgaaaactggcctgtttcagagtttagtttaattatgtggtatttagcgtgagtgacttcattctggtttagtttggttggctggggcccagtgtaggagcacagtcccaatactgacctcacgtaacttggtttagtacctccaaaaacgggggtgaggagcagagcaccccatagataacctttcttcacccatcaggactctcaggtagagggtgacacccattaaccatcacagtgctcagccgcttgctacacaggactaacttgtatagttgccaagagaaattggccaaagaa

SEQ ID NO: 623951 - DNA, 558 bp, Homo sapiens
tataaatatgatgacctctatcacaaactaaagtacaaaattacaacaaaattgcccaagtttttgaaccaattaatatgtatcaagtgcccttctcttgctactggacccaaatgatatataaatggataaacaaaactaatttttctttaacaatttagctttttcagccataagatgttgtgacatccaataaacgaatcaagccatttaatttttaatcaagccatttaatctcttaaaattaaaaagttgctttaagaaaataaaacrtataataattactaatgttggctatgagagcacattcaacatgtggcttttattccttttgtaaagctggcatgtcccaaatttaggaaatttgcaaaatatttctaagcgagaattttacagtgagtgttatgctcaatgagcagggatattcatacctaaaccacgttggtatgtttaatgtcacttagttggaaatgaagtttgcaatggctcaaacttccccatgtgaagtatatatttgtctaggttcccatccttttgtaaagatcactggagacaaag

SEQ ID NO: 623952 - DNA, 541 bp, Homo sapiens
agagtgtgttgcaatgagctgagcagaggagagtggcattcagttagaaaaaggttgaagaaggcagagacaaagaatgaaaagtggattgatcattccagaatgactttctttataggtttcagcagtgggaaattccttaatatgccagctcaggtaaactaggtttcttctggttgattgctgtcaatctcctggttttgtgtttgtttgcttatttttatttattttttaaaatttttgaaaactggcctgtttcagagtttagtttaattatgtggtatttagcgtgagtgacttcattctggtttagtttggttggctggggcccagtgtaggagcacagtcccaatactgacctcacgtaacttggtttagtacctccaaaaacgggrgtgaggagcagagcaccccatagataacctttcttcacccatcaggactctcaggtagagggtgacacccattaaccatcacagtgctcagccgcttgctacacaggactaacttgtatagttgccaagagaaattggccaaagaa

SEQ ID NO: 623953 - DNA, 606 bp, Homo sapiens
tgttataacatctttctttcatatatatatakagagagagagagttcagagagaaaataggatcaatactaatattacagacacaaaataatgaagctccataccatttctctctattgacataagactttcacatcattgtcaggttaatctttctaaaatggatttcttcatgtctttttcttgttaagtcttcattaatatcttacttttacctgtataatattccttatcccctaacttggcatttaaaactttttctaaaatgtcttatacctactctttttttcttattcttttggtatgctcatttattatttacctatatttattaagcacgtatttggtgcagactctgggaatacaaatggtgaatattcattgcccagccctctggattgtcttttattaaatagttgccttatttctctatatgacactgtacttgagactactattcctgccctcctcctttctgctgcctgctgaagaaacgggcgtttctctgccagaacacctcctttcctcggtatgtatctatgatttacttatgatttcatggcccagtcgatttcagcctccttttccagtgagtgttccaaacac

SEQ ID NO: 623954 - DNA, 606 bp, Homo sapiens
tgttataacatctttctttcatatatatatatagagagagagagttcagagagaaaataggatcaatactaatattacagacacaaaataatgaagctccataccatttctctctattgacataagactttcacatcattgtcaggttaatctttctaaaatggatttcttcatgtctttttcttgttaagtcttcattaatatcttacttttacctgtataatattccttatcccctaacttggcatttaaaactttttctaaaatgtcttatacctactctttttttcttattcttttggtatgctcatttattatttacctatatttattaagcacgtatttggtgcagacwctgggaatacaaatggtgaatattcattgcccagccctctggattgtcttttattaaatagttgccttatttctctatatgacactgtacttgagactactattcctgccctcctcctttctgctgcctgctgaagaaacgggcgtttctctgccagaacacctcctttcctcggtatgtatctatgatttacttatgatttcatggcccagtcgatttcagcctccttttccagtgagtgttccaaacac

SEQ ID NO: 623955 - DNA, 517 bp, Homo sapiens
ttctatatcattaaaaaatattgactcaattttttaaattatcatcatttaattcaggtctttctctcctcatatatggagtactgaaataaccatgtaactgggtgtccctgacttcatttttttccctccaggcagtaattcaacaggaatcttcatgtcaaactggtttcctaacatatatcacatcatttgcagtarcatttcaaagtgccacgcacctctccttatcttgacatttagtcccatctactgatcactgttgttttatcttctccagttcatagtatacttttgccgtggcttgggtgttccactgactgtgaactggacatgactgatatctcactgcccaatcctttgttcctgctattttctttctctggagtccctcccacatcctctctgcctatctaaatacttcaattcaggaccagcataatcaattttacccttccttcctaaaatcttttctgatcttctcagcccaaataattctcttcctttgcagagctgc

SEQ ID NO: 623956 - DNA, 539 bp, Homo sapiens
acctggtatttcgaatacccttcratacctgaaggagtgttttatcccatagtaggggcttaatcagaatatatgaactgactttgctgaccagaaattactcatacaattatatctcctcctctgtatattttctcttttaagacttaatttttcattctcatctgttctgcattttcccaaagtgtcatgttcagttcttggctgttggaaagcaaataccatttttcttacatttttaagtcaaaaggggcaaattactaccattgaagtcagctgactgatttttccaacagccagatacctgatatttttttactgacaagagccattttgtggcccaactgacctagctttagatgacatacatcctgggtagttcaggaagtctcaatatatgcctgccattttggagtaattataaatagtatttcctttcactctcagagctgtcctggttttgacgataaagtatatggttacctgatctatactacctctcataaaaatgcattttttctaacagaaattaaaaagaa

SEQ ID NO: 623957 - DNA, 539 bp, Homo sapiens
acctggtatttcgaatacccttcaatacctgaaggagtgttttatcccatagtaggggcttaatcagaatatatgaactgaytttgctgaccagaaattactcatacaattatatctcctcctctgtatattttctcttttaagacttaatttttcattctcatctgttctgcattttcccaaagtgtcatgttcagttcttggctgttggaaagcaaataccatttttcttacatttttaagtcaaaaggggcaaattactaccattgaagtcagctgactgatttttccaacagccagatacctgatatttttttactgacaagagccattttgtggcccaactgacctagctttagatgacatacatcctgggtagttcaggaagtctcaatatatgcctgccattttggagtaattataaatagtatttcctttcactctcagagctgtcctggttttgacgataaagtatatggttacctgatctatactacctctcataaaaatgcattttttctaacagaaattaaaaagaa

SEQ ID NO: 623958 - DNA, 539 bp, Homo sapiens
acctggtatttcgaatacccttcaatacctgaaggagtgttttatcccatagtaggggcttaatcagaatatatgaactgactttgctgaccagaaattactcatacaattatatctcctcctctgtatattttctcttttaagacttaatttttcattctcatctgttctgcattttcccaaagtgtcatgttcagttcttggctgttggaaagcaaataccatttttcttacatttttaagtcaaaaggggcaaattactaccattgaagtcagctgactgatttttccaacagccagatacctgatatttttttactgacaagagccattttgtggcccaaytgacctagctttagatgacatacatcctgggtagttcaggaagtctcaatatatgcctgccattttggagtaattataaatagtatttcctttcactctcagagctgtcctggttttgacgataaagtatatggttacctgatctatactacctctcataaaaatgcattttttctaacagaaattaaaaagaa

SEQ ID NO: 623959 - DNA, 564 bp, Homo sapiens
ggcctcccaaaccaagaattatcacctaaaacgtcagtagttctgagattgagaaaccctgctctaacctctttctagattatattcaacctcctagttccttattttctcctctgaattttcccagcaactatccattcttccattatgcagataggttaggccccttgctctagtttagataagatttgtttgtctccaccaaatcttctgatgaaatttgattcctaatgttgaaaatgggttctaatgggtgatgtttggtgtgcaggagaagatccttcataaatagattaatgctttcccagggatggggggagtaagtgaattcttattctgttagttgccatgagtgcaggttgttataaagagcctgttactgcccccctccctcccacaactgtcctgctcttgcttgctgtcttgctatgtgatctctgcacatgcctgtttcctttggctttctgccatgagtggaagcagcctgaggstttcatcagaagctgagcagatgccagtatcatacttcttgtacagcctgcagaaccatgagccaaataaacc

SEQ ID NO: 623960 - DNA, 629 bp, Homo sapiens
ctggaccacaaaatgagacgctgtctcaaaaaacaaaacaaaacaaaacaacaacaacaacttatgttataaaagaagaaactgttataaaatgttataaaacttaygttagaaaagaaaacatgttataaattaaggggctaaacattcaacttaaagaagttagaaaagtacagcataaaccaaaagagagtaaaggaagaagatagtaaaaacagaaattaaataaataaaaagaaaaaaaattagacaagctaaacaaagccaaacactgattctttgcaaaatgtaatcaaagacacaaagctctggcaagatagataaagacagagcagcacaaataaatactgacaatgaaaagagggctacaactaactacagacaccatgaaacttaagataaaataataccatgaacaacttaatgctataaaattagataacatatgaaatgagtaaattcctaagaaacacaatttaacaaaactacctcaagaagaaagacagtctaaattgttctataaccactaaagaaaatgaatctgtagtttaaaatcatcccacaaagaaatcaggccatatattttacaaacgagttctaccaaacattcaggaatagcctacagcagt

SEQ ID NO: 623961 - DNA, 629 bp, Homo sapiens
ctggaccacaaaatgagacgctgtctcaaaaaacaaaacaaaacaaaacaacaacaacaacttatgttataaaagaagaaactgttataaaatgttataaaacttacgttagaaaagaaaacatgttataaattaaggggctaaacattcaacttaaagaagttagaaaagtacagcataaaccaaaagagagtaaaggaagaagatagtaaaaacagaaattaaataaataaaaagaaaaaaaattagacaagctaaacaaagccaaacactgattctttgcaaaatgtaatcaaagacacaaagctctggcaagatagataaagacagagcagcacaaataaatactgacaatgaaaagagggctacaactaactacagacaccatgaaacttaagataaaataataccatgaacaacttaatgytataaaattagataacatatgaaatgagtaaattcctaagaaacacaatttaacaaaactacctcaagaagaaagacagtctaaattgttctataaccactaaagaaaatgaatctgtagtttaaaatcatcccacaaagaaatcaggccatatattttacaaacgagttctaccaaacattcaggaatagcctacagcagt

SEQ ID NO: 623962 - DNA, 629 bp, Homo sapiens
ctggaccacaaaatgagacgctgtctcaaaaaacaaaacaaaacaaaacaacaacaacaacttatgttataaaagaagaaactgttataaaatgttataaaacttacgttagaaaagaaaacatgttataaattaaggggctaaacattcaacttaaagaagttagaaaagtacagcataaaccaaaagagagtaaaggaagaagatagtaaaaacagaaattaaataaataaaaagaaaaaaaattagacaagctaaacaaagccaaacactgattctttgcaaaatgtaatcaaagacacaaagctctggcaagatagataaagacagagcagcacaaataaatactgacaatgaaaagagggctacaactaactacagacaccatgaaacttaagataaaataataccatgaacaacttaatgctataaaattagataacatatgaaatgagtaaattcctaagaaacacaatttaacaaaactacctcaagaagaaagacagtctaaattgttctataaccactaaagaaaatgaatctgtagtttaaaatcatcccacaaagaaatcaggccatataktttacaaacgagttctaccaaacattcaggaatagcctacagcagt

SEQ ID NO: 623963 - DNA, 571 bp, Homo sapiens
tcataacatctctctacagctttgtattaatatccttgctgtacagttggggaacctgaggttctgagatgttaatgaaattgtctgaggttgcagagccagatgatggcagatctgagatttgaatttgtgtctgtgtgtttttctatctataagacactgcttcaaaaaggtgaagggaagaggcacccttaaacagagttatgaatgactgtggtatgtgtgtgttttggacatggaagagtttggtgaagtgttggagagtagtggaaagcaaagcgggatcgacaggtgggaccagacatacatagtcatgwttataaacaatagtaataaatgtttgtggcatgaaagaagacagtgcttttggtttgggccgtattccaagaccataagaagactctcatattcaaatagaattgtcaaaaaatcaaatgtgagtgtaaaaattaccattcaattcagtgcattttttcaccaatgtggataactgacagttgacagcactggctatgcttaatcaattatggaaataatagtcttaaagaagtaacagacatcagtcaccatg

SEQ ID NO: 623964 - DNA, 571 bp, Homo sapiens
tcataacatctctctacagctttgtattaatatccttgctgtacagttggggaacctgaggttctgagatgttaatgaaattgtctgaggttgcagagccagatgatggcagatctgagatttgaatttgtgtctgtgtgtttttctatctataagacactgcttcaaaaaggtgaagggaagaggcacccttaaacagagttatgaatgactgtggtatgtgtgtgttttggacatggaagagtttggtgaagtgttggagagtagtggaaagcaaagcgggatcgacaggtgggaccagacatacatagtcatgattataaacaatagtaataaatgtttgtggcatgaaagaagacagtgcttttggtttgggccgtattccaagaccataagaagactctcatattcaaatagaattgtcaaaaaatcaaatgtgagtgtaaaaattaccattcaattcagtgcattttttcaccaatgtggataactgasagttgacagcactggctatgcttaatcaattatggaaataatagtcttaaagaagtaacagacatcagtcaccatg

SEQ ID NO: 623965 - DNA, 575 bp, Homo sapiens
  misc_feature 91: n = A,T,C or G
ggaacaagagcacacaaatcgcttgcgagatgaagccaaacgcatcaaaggagaacaagagaaagagttgtccaaatttcagaatatgctnaagaaccgaaagaagtaggtaagtgtaaactactgtttttaattactaaagcttttttttttaaaaaattgttttaagactatctaaggatttaggaatactaataatacttgagagttaaatagcacctattcattctttcattcggtcttctcarcagtcatatagagttgtgataaggtcaatcattattcccattttactgccaagaaaactggagtatgagaggttttagtgacctgtgttaagttcacctcaagagagaaactaatgacctgttcacagactacccctaaatatccagctaaaccttgaatcaagtcttcaaattgagtttaatccatcttaaggtctaccattgtccttaatgcaacacatttaagtccttatataaaagtattttttagaaaacttactatgttgtgtttgccagtggcagcagtgattcattttattatttataagttatttttcatctttaatt

SEQ ID NO: 623966 - DNA, 471 bp, Homo sapiens
acaaaacacaaatggccaataaaaaatactaaaggatgttcagacttactcataattaaagacatatcattcaaaacagtgaggctccagtgctgccatgtgtagttgttcggtttgagcactgtgtaaggtggctggccaaagggcaagtggagtgaaaatggaattctgaatggcagactccatgttctgtcatggtctcagtccgcctaggaggttataggaagcaaagagaggagggagatttttaaattcctttgcccaaagggatttgaaaaatattaatgcgaaggcatgtgtcttagtcagcttatgttgctataaaagaatgcctgaagctgggtaatttataaagaaaagagatttatttgtyttatggttctgcaggctgtacaagaagcacggtgccagcatctgcttctaatgagtgcctcaggcttcttccactcacagtggaaggggcaggggaaa

SEQ ID NO: 623967 - DNA, 552 bp, Homo sapiens
tcccagctacttgggaggctgaggcaggagaatctcttgaacccaggagttggaggttgcagtgaggtgagccaagatagcagcactgcagtccagcctgggcgacagagcgagatgccatctcaaaaaataaataaataatgcacattaaccaaaatggagctttattttccctctttagtgcaaattttagaaaccattgatgacagaagggcttacagatcctaaatccctcttaggttctatggtggcaataaatcattgtaagtatgatggattgagcactgtgctgggggtggaggctgtaccrtgtccttggtaaattcaatttcccactatgcatcaagatttcgtcctctgcaaaatgaagaagctgagagctttcttccctaggtggtgagggtgggcttctggctccagttccttctacctggcgagtgcaacgtggcaccacagtggtgtcagcgaatggctactggagagaaggcagaggctcggagaagagcatctgtcttccagcaattgaataacacctcttctcgccctgctcag

SEQ ID NO: 623968 - DNA, 552 bp, Homo sapiens
tcccagctacttgggaggctgaggcaggagaatctcttgaacccaggagttggaggttgcagtgaggtgagccaagatagcagcactgcagtccagcctgggcgacagagcgagatgccatctcaaaaaataaataaataatgcacattaaccaaaatggagctttattttccctctttagtgcaaattttagaaaccattgatgacagaagggcttacagatcctaaatccctcttaggttctatggtggcaataaatcattgtaagtatgatggattgagcactgtgctgggggtggaggctgtaccatgtccttggtaaaktcaatttcccactatgcatcaagatttcgtcctctgcaaaatgaagaagctgagagctttcttccctaggtggtgagggtgggcttctggctccagttccttctacctggcgagtgcaacgtggcaccacagtggtgtcagcgaatggctactggagagaaggcagaggctcggagaagagcatctgtcttccagcaattgaataacacctcttctcgccctgctcag

SEQ ID NO: 623969 - DNA, 558 bp, Homo sapiens
ctccaaactcagggacaggagatgcagagaggagtgtgccctctccctcacagccaagatccccttgctctgcttccgatgacccagcaatccattcctttactcacctgatatttactgagtacttactatgtgctggatacttgggtgggggctgaagatgaagggatggaacaacatctctgcctcccactgcatgggaagtagctttgtttggtggtctctggggttccttcacaagtcaccagagagtcttgcttctatcataacttattctgatgtttttacaaaagtttctcttccactcgctttggtctctgccccaagtgtcaaacactgagtttaaccctaagaaaagactccgacggctgcttccatttttactgggatggggatgatgggcagctgcactggacggcctgagtttccttagttctttatttatttatatatttttttgagacaaagtctcgctctgtcacccaggctggagtgcagtagtgcgatctyggctcactgcaatctctgcctcccaggttcaagcaattctcatgcctc

SEQ ID NO: 623970 - DNA, 580 bp, Homo sapiens
ctaatcaaaagacaccacatatatgtgattgctctatctcttgctctctctctctctctctctcctctgtttctagtccctgaaatcctggtttctgttgttcttctatccatttttagtttatctcatatccttctaaactgtatgagctaagcatattctcagttttgatttaacctagtttgaatttgattcttgtcacttgcaatgaaatgggtcctgataagtcacttctgtcatatacaaataaagccagccttctagccaacttmcttgttgtgtttttcctttgggactcataattttaaaatctgttgttctctgtggcactcttatcacatgaccaagcccacaaaagcccacattttttttagcatgagaataattacactgcccaagggggtatggtagaggttattggctatatgctatctagaattattataataatttctctagactagtaatggtactcttgatgtggtttcatggctgagattgtacaagtgtatgtgtgtgtgtatttggatgggtgagagtgtttccagaggaaaagagctgaagaacttttacttagcca

SEQ ID NO: 623971 - DNA, 580 bp, Homo sapiens
ctaatcaaaagacaccacatatatgtgattgctctatctcttgctctctctctctctctctctcctctgtttctagtccctgaaatcctggtttctgttgttcttctatccatttttagtttatctcatatccttctaaactgtatgagctaagcatattctcagttttgatttaacctagtttgaatttgattcttgtcacttgcaatgaaatgggtcctgataagtcacttctgtcatatacaaataaagccagccttctagccaacttacttgtygtgtttttcctttgggactcataattttaaaatctgttgttctctgtggcactcttatcacatgaccaagcccacaaaagcccacattttttttagcatgagaataattacactgcccaagggggtatggtagaggttattggctatatgctatctagaattattataataatttctctagactagtaatggtactcttgatgtggtttcatggctgagattgtacaagtgtatgtgtgtgtgtatttggatgggtgagagtgtttccagaggaaaagagctgaagaacttttacttagcca

SEQ ID NO: 623972 - DNA, 595 bp, Homo sapiens
tcgctttcccaccactgtaatgttgaaaaattgtaaattgaaccatggcgagtcaggaaccatatgtacaatagtcttcttttatccacaatttcactttctgtttttttgttttacttatggtacaggacaataagacttttttgagagagagagagagagagagaccacattcacgtaactttcattacagtatattgttttaattgttctaatttatttttagttattgttaatctcctactgtgcctaatttgtaaatcaaacttcataattggtatatatgtataggaatatatatatatatatacataaaaccatatatatatatatawaaaccatatatttatataaccatatacatatatatatatatatatatatatgattcaaaactatccacaatttcaggcatctaatatgggtgttggaacgtatcgcccatggataagggtgaattattgtacaatggtccagctgtaattgtgtcaatgtaaactaagttgaaagttatttgcgactttcatctgaactgcaatgcttttctaagtgcttttgcactcatatcttgttgcatttgcttttatcatctttc

SEQ ID NO: 623973 - DNA, 595 bp, Homo sapiens
tcgctttcccaccactgtaatgttgaaaaattgtaaattgaaccatggcgagtcaggaaccatatgtacaatagtcttcttttatccacaatttcactttctgtttttttgttttacttatggtacaggacaataagacttttttgagagagagagagagagagagaccacattcacgtaactttcattacagtatattgttttaattgttctaatttatttttagttattgttaatctcctactgtgcctaatttgtaaatcaaacttcataattggtatatatgtataggaatatatatatatatatacataaaaccatatatatatatataaaaaccatatatttatataaccatatacatatatatatatatatatatatatgattcaaaactatccacaatttcaggcatctaatatgggtgttggaaygtatcgcccatggataagggtgaattattgtacaatggtccagctgtaattgtgtcaatgtaaactaagttgaaagttatttgcgactttcatctgaactgcaatgcttttctaagtgcttttgcactcatatcttgttgcatttgcttttatcatctttc

SEQ ID NO: 623974 - DNA, 569 bp, Homo sapiens
gaaaaaaataaatttctgctgtttcaagttactggtctgtggtattttgttacggcagtctgagcagactaatacctcaattctctgtttattctgtgtctgcacttttgcagttgaatttggctaaagaaacatacgcaatcacactaaatagctcactttaaattcatggccataaatataaagtatacatttaataatacctggaaatcacagtaaaatttgcaaatgatttaattgtcccattctcttagatgagtatttcatttttctcttactctgcaactcccaaacttcattcttcattaccatgagagctaatatttttgcttcttcacctttgagaaagttgaagcaatcagaaaaaaaatttctacagatcccaccaaaaccatatctacccacctagcaatatctacaactacattctttaycttcctacttgttacctcagataaaatatccatgttgctatctaaagctcatccttccttttgtgtagcagatcctatcccatctctgttactcaagggcatctttccaacagttctcttttacatcattaattg

SEQ ID NO: 623975 - DNA, 595 bp, Homo sapiens
ggctttttgagttttcagcattcttgcactgatcctttctcatcttttgggcttacctaccttcaatctttgagattgccgacctttggattttttttttcttttagcagtcttgccacctttccatagggatgctgcagtttgttgggggtctgctcccatccctagtcaccttgtattttccagtacctggaggcatcaccagtgaaggctgtgaaacagcaaagatggtggccttcacctttttctgagaaatcccttccaggaaagtatggacctgttgccagccaaaatgcacctgtaggaagtggctggagacactgcttggaagctttcaccaagtcyggaggaatgggatcaggaactccttaaagaggaagtctgtccatgttttggtaaagcagctgtgctgtgctgggggatcacttctgcccctggttggtttggactctccaaagcctgcaggctggaatggctgagttgtccaaatagcaaagatgtcagcctgtccctacacccaggaactctgtcccagataggcacaacattgttgttagtagctgctagaattccaagccagtgggtcttatcctgt

SEQ ID NO: 623976 - DNA, 563 bp, Homo sapiens
ggccccaagccctaggagatgccaagcaatgcgttatgaaagatacgaaaaagggtctttctttagattagttaatatatgcatgtcattaactattttttctttttacaatttcatgactgtcatttttttcctcatcaaaagaacatgacttacacaagtcatatgaatawcatttatatccacttgataggaaaagttctgagaaaaacactgtattgaaatctttccaagtagcttgtttctccttgagacattcaataaatggagcaaccatttagaaactactctcttattggtcataatgctccttctccatttaacatcacataagtcgagatgaaagcttggaagaaacatttaagtattgtaatctgatttcactttaattaatactaagtgagacagaaaaaaagcagtaataattgacaactagatatttcaattactgggaccttaaagtgcctggagagagaagaaggtaaattaggcaccacagataattttatgttatacaggtctatccaagattcttctatttttagagtgagcatataattcat

SEQ ID NO: 623977 - DNA, 563 bp, Homo sapiens
ggccccaagccctaggagatgccaagcaatgcgttatgaaagatacgaaaaagggtctttctttagattagttaatatatgcatgtcattaactattttttctttttacaatttcatgactgtcatttttttcctcatcaaaagaacatgacttacacaagtcatatgaataacatttatatccacttgataggaaaagttctgagaaaaacactgtattgaaatctttccaagtagcttgtttctccttgagacattcaataaatggagcaaccatttagaaactactctcttattggtcataatgctccttctccatttaacatcacataagtcgagatgaaagcttggaagaaacatttaagtattgtaatctgatttcactttaattaatactaagtgagacagaaaaaaagcagtaataattgacaactagatatttcaattactgggaccttaaagtgcctggagagagaagaaggtaaattaggcaccacagataattttatgttatacagrtctatccaagattcttctatttttagagtgagcatataattcat

SEQ ID NO: 623978 - DNA, 531 bp, Homo sapiens
gcctctcttcactttcacttggactgaccctgacacccatcaagctcagcaaattacctaggctgtactgctgcaaagcttcacagacagcccccattacttcaatcaagcccaaatttcttcctcatctgttacctatcttggcataattctcataaaaacacacgtgttctccctgccaatcgtgtctgactgatctctcaaaccccagcaccttctacaaaacaacaactcctttccttcctaggcatggttagcacggtcwgaattcttacacaagagccaggaccacaccctgtagcctttctgtccaaacaacttgaccttactgttttagcctagccctcatgtctgcatgcagcggctgccgctgctttaatacttttagaggccctcaaaatcacaaactatgctcaactcactctctacagttctcataacttccaaaatctattttcttcctcatacctgatgcatatactttctgcttcctggctccttcagctatactcactctttgctgagtctccc

SEQ ID NO: 623979 - DNA, 531 bp, Homo sapiens
gcctctcttcactttcacttggactgaccctgacacccatcaagctcagcaaattacctaggctgtactgctgcaaagcttcacagacagcccccattacttcaatcaagcccaaatttcttcctcatctgttacctatcttggcataattctcataaaaacacacgtgttctccctgccaatcgtgtctgactgatctctcaaaccccagcaccttctacaaaacaacaactcctttccttcctaggcatggttagcacggtcagaattcttacacargagccaggaccacaccctgtagcctttctgtccaaacaacttgaccttactgttttagcctagccctcatgtctgcatgcagcggctgccgctgctttaatacttttagaggccctcaaaatcacaaactatgctcaactcactctctacagttctcataacttccaaaatctattttcttcctcatacctgatgcatatactttctgcttcctggctccttcagctatactcactctttgctgagtctccc

SEQ ID NO: 623980 - DNA, 531 bp, Homo sapiens
gcctctcttcactttcacttggactgaccctgacacccatcaagctcagcaaattacctaggctgtactgctgcaaagcttcacagacagcccccattacttcaatcaagcccaaatttcttcctcatctgttacctatcttggcataattctcataaaaacacacgtgttctccctgccaatcgtgtctgactgatctctcaaaccccagcaccttctacaaaacaacaactcctttccttcctaggcatggttagcacggtcagaattcttacacaagagccaggaccacaccctktagcctttctgtccaaacaacttgaccttactgttttagcctagccctcatgtctgcatgcagcggctgccgctgctttaatacttttagaggccctcaaaatcacaaactatgctcaactcactctctacagttctcataacttccaaaatctattttcttcctcatacctgatgcatatactttctgcttcctggctccttcagctatactcactctttgctgagtctccc

SEQ ID NO: 623981 - DNA, 611 bp, Homo sapiens
gatgagaccctaccttccttttcaccttgtttcctccctcacctccttggcttagccaggctggccttctcgaggtccaccaatggtccaggcactcttccctcccagggtccctttacaaaggctgcccttcttccactcttcacctgactaattttaaatcaaataccaggttgcagtttaactccccgttatagagcaggtctttcctgaccctgcattataaactctaatatttttctctaaggcaagttttccttgatgtataattatttgtttgtgtgattatttatttgtctttcgaattagtttaaattctattagagtagggacagcgttttgtatactatttcaattcctcagtgtggcacaaagaaatttctcaataaatgtttaataaataaatgagttaattaacaataaaataataaagtgccaccygagatgggtagaagtgtcaatttaaaaagataagcaaattaaaatgccataaaactttcctatcctgaaatttaggacaccaacacatatccagcttctttaaaacctgtctgaaacccaatcagtgaatattaaatgaatgaatagatgatcaatggcacatttgcaag

SEQ ID NO: 623982 - DNA, 519 bp, Homo sapiens
acagacaattgtagccacactccgaggaacctcaacagtcagacgtctgctcagctctgagttacttaaaaacaactgtcacatgtttaggtcatggcttcaattcttaacaggagacaatgactctgttctgttttcagcttacgatgttaaaattgattaaaagcattagtagtggtgggcatgagaatattttggtctttgaaccttaacagaatcatatcacttcagacttcattgttaatagttaatcagagacattttagcaggaaatatgtggtaattaagagaacagactatgggctagaattctgacttcataacttgtgtgactgtgtgcaagttacctactatttttctgcctcagtttccttatccgtaaaatgkataataatagtaatctacatcacaagttgttgtaaagactgaatgcattagtcatgtacagtataaacaaacagagcccagcacatagttaactgctacagaattgtttgctatcattattgaagtaagatt

SEQ ID NO: 623983 - DNA, 592 bp, Homo sapiens
tctgttatgttcatttgatctgaagttcagtttaagtgtgatgtttttattgattttgtctggatgatttgtctaatgtcgagactggggtgttgaagtctcccrctcttattgtattagaatatatcaccttatttagatccagtaatatttgctttatgaacagggtgctccagtgttgggtgcgtacatacttagaattgttatatcctttttctggattgatccttttatcattatatagtgacctgctttgtatgttttttcctactgttttttacttaaagttgattttatctgctataagtatagctactcctgctcacttttggattccatttgcatggaatataatttcccatccctttactttcagtctatatgtgtctttataggtagagtgtgtttcttataggcagcatatagttggatcactaaaaaaaatcccttcagccacttttgagcagagaacttaacttatttatgtgaacggttattattgatatgtgcagttttgtgcctgtaatattgttaattgttttctggttgttttttatgttctttttcctttcttttttacttattgattgtc

SEQ ID NO: 623984 - DNA, 631 bp, Homo sapiens
cctgccatctgtgcatgagtctgagcacagaggctgattgcctttgggaggggatctcactttccacttgcaagtctgagcacagagcttctggcactgctgatgataaggtcatgtctcatagtctcagatggggaattctcccaggaaytgcatttttagtgcactgcaccatcctttccctgggaggagtactttctgtgggctagagtactggagaccccatagcacctttgggtccagccagatccatgccattgtagccctctgggtggacactggggaatgccactggggactcctgagatgtggggatatgttggctgtggttcccagggcaggatgcagtcctgtgatatctgctctcacatggccaccccactgcagctgcttaggtcttggtgggggcaggggtaggttgaatgatccaacatgagttttctatttggtccaatgcccttttggggtttccaaaacattgcccatgctagtgccaaggctaatgggtacagagaaactctcccatggtttagactgcagcagtccatggactgctaaagttcttttacttacactttgcccacaatacagatcctctttggtctccttgctgatcttggtggatttggcc

SEQ ID NO: 623985 - DNA, 570 bp, Homo sapiens
tgccttttctatacaaatgtactactgggttagtaaatagcagatgaagggacatttttccttatagatctatgttagcctatacctaatgaagatgaaatgacaaaactaaaatatcaatattttgcaacacctaatgaattaatggatctaggtattacatatcagtggttgctaacatcatggaaagagagacaaccaactacaaaaaataataaccttgtgaggtaatgaatttgttaattagctacatataaccattccacaatgcatacttacttcaatacatattgtacacaatcaaaccttgcagtgttacctgtcaactttgaatcttttttttaaacacaagcaaatatacagccccttaatagaggagtgtaccaacttctaagaaaatatccttgccaaaaatatcaaccctgaatctaataaaaccttttacatccaactacaaatttataagaaatatamaagtcagaggaacatatttaaaacaaaacaaaacaaagcttcatgggatacaaccataaaaatccagactatgggaaaatctagagaacaaaacct

SEQ ID NO: 623986 - DNA, 529 bp, Homo sapiens
tcatcagcacaaaggaataatacatcactataaaaataaagaagatctttgagtactgaaacatcattmggtttttaaaagtaggagatcctaattttttgtaaagtataatttgtgtaaaaatgatgaaaaaatgtatatttatatttatttatgcataaaataaaaatgcataacttgtctctaaggaagaaatctagatgatttggggtcaggagtgagaagaattttcactctatgtccttttttaaaaaatagacagttttttatatagcaattttaggtttatggcaaaattgtgcagaagttacagagatttctcctatactccctgtccctacacattgatagcctcccccattattaatatcccccaccacagtggtacatacattacaactgatgagtctgcattgatacatcattatcacccaaagtccatagtttacattagggttcacgcttggtgttgtatattctatgggttgttttcttacaagtttatggtgaaatatatctacttttaaag

SEQ ID NO: 623987 - DNA, 482 bp, Homo sapiens
gttgtctctgggtgctgggattttggaaaattatgtatctatctgtctgtctatctatctatctatctatctatctatctatctatctatctatctattatctacctgcctgcctacctttctatttttatagcaccttgtattattgcttgaattctttttggaattcacaggattataaactataaatatacatggaattgcaaaacatttgatgtaatctaaatgaccataaacaggactgcttaaataaattgtggtycatcagcacaaaggaataatacatcactataaaaataaagaagatctttgagtactgaaacatcattcggtttttaaaagtaggagatcctaattttttgtaaagtataatttgtgtaaaaatgatgaaaaaatgtatatttatatttatttatgcataaaataaaaatgcataacttgtctctaaggaagaaatctagatgatttggggtcaggagtga

SEQ ID NO: 623988 - DNA, 610 bp, Homo sapiens
catcatatgttggccttttcaactgaactgttatcttcacaaataacatcttttaatggcatttccgtgatgtgctgctttgttactctcatacttagcaactcaagctgttgagaaaaacaatgaacaataacaaaatgcatccatgtattcaatggttgaagtacacttgaatgaagtcatcaaggtaatatrttctttggattttagatatatgctagttttgcaaaagtcagtcaatttattggcctctactctatctagatcctcattcctttgtaaaacatactgcctgatgctggcagctagtaaccttcatgctaatagtcttttatttctgcttctatcagctgaggagtatggtaacagttagttctgtttgttcccaaaactttgtacttttcaaggtaattatgtaggataagtgttacatcaactaataaacataagccaagtatttgcctttatgaaaactgttgaatactttaagaagattgaaaaagtaaattgaaataaaagatactcaacgttctataagatagaaaaaatgaaaacatactcaattctgtgcgcattgctttgcagatctcatcaagatactcaattctaa

SEQ ID NO: 623989 - DNA, 642 bp, Homo sapiens
aaattaagaagaaaatctcaattgatagctggcaattctgcaaccaaggacaaaaattattatacctaatatggataggaagcccacaccaataaaatttaaatgaagaaatatgctattaagtggtacaaatacttgttaggaaaaccagaatttcataatattaaagaccaaaggaaagtcacaagttagacatgtaatggaaaatctgaattgaagcctatgtacatactctactagaaaacaaattcaccctttaataatgtttttgctctagtttactggaatgaaaaaagaaagaaaaccagacaaagacaagaaacattttacatacataacacagatgggcaatacaatttagtttaaaaaagttttaaaattaaatatttttcattgtaacaaatatgaagtatattcaatttcacrttaaaaatatgatttatcaaggcagggtgctttaacatgagtagggaaatcagggaaaacacttgataaaaatagaattggaaatctacttagcatttatatatttgaaaatgcaagtaaatttgtggatagtgatagaattatatgtggctctgtcagtagacaagcagaattttacactagacagagtaatttaagtaattcagaaaagaaaaa

SEQ ID NO: 623990 - DNA, 471 bp, Homo sapiens
ctaatgtaaatgacaagtcartgagtgcagcataccaacatggcacatgtatacatatgtaacaaacctgcacggtgtgcacatgtaccctagaacttaaattataattaaaaaaaaaagaaaaatgtctgttcatgtcctttactcactttttaattttttttagtacatttgtttaagctccttatgctggatattagacctttgttagatgcatagtttgcaaaaattttcttccattttgtaggttgtctgttcattctgttgacagtttcttttgctgtaaagaagctctttagtttaattaaatcacatttgtcaattttgtttgcatagttttaactaaatatcttggtgttctgtggagctcacgattttacttttctgctccttacgttagcttataagcacatcctcacttccttttcaactttttactataaattaaaaagaaattctattacacatatt

SEQ ID NO: 623991 - DNA, 568 bp, Homo sapiens
ggtcaatgggctgcatctgatggaggggaccctctacagagtcacaaggcagtacagggcatcatcacatggcaagggggctgaacatagtagctaaactttctcttactcttataaagccaccagtcccacgcctatcataacccattaatctgctaacccattaatccattaagtagactctgccctcataacccaatcatctcttaaaagccccacctctcaaaactgccacattggggattaagtttcgcatgagttttggagggacgaacattcaaatcacagcaggttccctgttgtacctgagcataccatttactgaatctccatatggaaaataattcctaaagtgacttgaggtcactgttgggataaagtctagcatgtagagtaagctgacattgctcctctaagattcctattacacactctgaattacccatsatgctttaactgtttaaaaaccatctgtcctgttggattttatttttatcatgtgcatagattactgttcctaaaacaacaaaaagccagcttttcctagtatataaatctaagtggcttg

SEQ ID NO: 623992 - DNA, 368 bp, Homo sapiens
tgaccaggacatactagtcctgcacatgtggattaagctgtttggccagacgtgtgtccctctaaaaatgtatgttctcaattctggagagtaagtctgaggcatgcttgccatataattgacaatttgtagtgagtctgagggattcaatcacaaagaacattatgagtcaagracaacagaaaatatgttaaaaacaaaatgaactgctgtaattaaggctttaaaaaaatcaagatcagtgaatacttctcaggcaggataagtttattagtcaactcacaatgccataacaaaatatcatagactgtgtagattaaactacagaaatttattttctcacagctctggagactagaagcccaaga

SEQ ID NO: 623993 - DNA, 461 bp, Homo sapiens
agtgataccatcaaataagacagaagaatacaggaggaagtaaaagttataaaaggaaatgaatgtgctcacaatttgaaatgttgagattgaagcacctgtgtggcctccaggtagagatgtctagttggcagatgaatataagtcaaaaagatagaggtttagaatagagacattgacatgagtgtctttagtaaaggttagagacatgagaatggccaagatctctcacatagaacatgaggaggcaattaggggctcwaggaaaatccctagtgaattttttacctttaggaggtagtcagaagaatttcctgggacagaaattgagaagttaacatccatttttcaaaattgtacaaatgatttaaaaggagagtattgataatcctaatagcctgcattttcctttagcagtggctcacacctgtaatcccagcacttcggtaggccaaggcagg

SEQ ID NO: 623994 - DNA, 610 bp, Homo sapiens
agcagttgtagctttggctgagacaatgtacctactgaagctaaagcattaaagcgctaagtaggaaaatttcaagatattagtgtgttggcttcctcttctagcattttttttttttgccatcatctactaactatatatgctgcagcaggcaatattctgtttacttttatcagcttgtttaagactcagaataactgattacacaggtacaatcattatctccattttactgatgaagaaactgagacattcttccattaagtacctagacaaaagaacaatatggactgaaacttaactgtctaaaataagaaaaggaagaatattcacttttcccagggtgatccttttgtcctgtgtcctgtgtctaacaaagtgactgaaagtgargttatatggaactttgcactgaggggaaaaaactatcagccctattctaatattagttacaataaaatctgagaaaaagatactataaaattggggctataaaattggggcctgagagaagtcttattgtctaggcacctctccagtaaactcttgtgcttttactacataaaaacggacccatccccctaattgtaaagatgcacatgaatgaccc

SEQ ID NO: 623995 - DNA, 343 bp, Homo sapiens
gagatggataaaagttcattttgtgtatgtctcaggtaaagtatgttaacttggggagaccagcagtaacctgttctttaaatctcagcttttattgaatctcacacaaaatttttctcagatgtgtcactagactacttaaataagccagattagtatttttgcatactttattaactctgcttctactcagagtaaattagttttyggaatggaatgcagtcaaaaaatcatcaaaataatatcacaaagcactgagtggtccagtcatttgaacttctgacaatacctttgacttagaaacttatttgtagggagtggtatattaatactatacataaac

SEQ ID NO: 623996 - DNA, 343 bp, Homo sapiens
gagatggataaaagttcattttgtgtatgtctcaggtaaagtatgttaacttggggagaccagcagtaacctgttctttaaatctcagcttttattgaatctcacacaaaatttttctcagatgtgtcactagactacttaaataagccagattagtatttttgcatactttattaactctgcttctactcagagtaaattagttttcggaatggaatgcagtcaaaaaatcatcaaaataatatcacaaagcactgagtggtccagtcatttgaacttctgacaatacctttgacttagaaacttatttgtrgggagtggtatattaatactatacataaac

SEQ ID NO: 623997 - DNA, 311 bp, Homo sapiens
ttttaaaatagattttgaattttgaccttatcttttyccagaaagactttaaattgatactggaaaccaaataggatatatttttgggagatttcaggctattaaaacaaaggcaaacaaagaagtgaccttctaaaagtcctagtaatgattaggtccattgtttcaattaaagcataccatgcttgagagataaagtgtattaaatatttgactgtaactttgtgttagaaatatgtttttcaaatctataaaaaagatttacaaatctatctataccatgtttttcagttttatggtatttcttccag

SEQ ID NO: 623998 - DNA, 311 bp, Homo sapiens
ttttaaaatagattttgaattttgaccttatctttttccagaaagactttaaattgatactggaaaccaaataggatatatttttgggagatttsaggctattaaaacaaaggcaaacaaagaagtgaccttctaaaagtcctagtaatgattaggtccattgtttcaattaaagcataccatgcttgagagataaagtgtattaaatatttgactgtaactttgtgttagaaatatgtttttcaaatctataaaaaagatttacaaatctatctataccatgtttttcagttttatggtatttcttccag

SEQ ID NO: 623999 - DNA, 311 bp, Homo sapiens
ttttaaaatagattttgaattttgaccttatctttttccagaaagactttaaattgatactggaaaccaaataggatatatttttgggagatttcaggctattaaaacaaaggcaaacaaagaagtgaccttctaaaagtcctagtaatgattaggtccattgtttcaattaaagcataccrtgcttgagagataaagtgtattaaatatttgactgtaactttgtgttagaaatatgtttttcaaatctataaaaaagatttacaaatctatctataccatgtttttcagttttatggtatttcttccag

SEQ ID NO: 624000 - DNA, 311 bp, Homo sapiens
ttttaaaatagattttgaattttgaccttatctttttccagaaagactttaaattgatactggaaaccaaataggatatatttttgggagatttcaggctattaaaacaaaggcaaacaaagaagtgaccttctaaaagtcctagtaatgattaggtccattgtttcaattaaagcataccatgcttgagagataaagtgtattaaatatttgactgtaactttgtrttagaaatatgtttttcaaatctataaaaaagatttacaaatctatctataccatgtttttcagttttatggtatttcttccag

SEQ ID NO: 624001 - DNA, 514 bp, Homo sapiens
cctgtcactgataaggccaagaaagagcatgttagcagttgatatcacttggaaagacagatgaaaccattagtgaaagccaagtgtcctatgccaaacgtttatggttccggaaagagaactgatgtaaatttagggttgtatcaacaacaaacagagaaattgrtatcttatgttttaaggagataaatagcttttccatttcaagataaatatgctaagtagctcataagcactttgggaaataattatattgactcttctacttattaaatgatgttttctaaacgtcaagtatcataagagagtctaacaacatggaaaacgatttgttgacatcaaaagctttatatacttcatcttctttcttcctgtaatttcacttctaagaatactaaagcaatactgataaatgtgtccaaagattaacataaagatgctcacactagaattcttttgggtctcgtggggtcatattagggaatgtggctcttatcttaatagcaacgggaag

SEQ ID NO: 624002 - DNA, 323 bp, Homo sapiens
tagcatgacagttactaaaagaatataaacaaagactagaacttaaaatgactagagaagaaaaaawatcccaccaattgaaaagaaggcaagaaaggaaaaaaagaaacataagtaggataaatagaaagtgacaaaatgacacaaacacatatgcatgtacatacacaccactcaccatctatacagaatccaagtatgtcagaatacaaatacatgcaaatggactaagtaatccagttaaagatggataaattgttaaaatctcattccatgctatttttaagtcatatttaaaatacaaagatattgaatgattttaa

SEQ ID NO: 624003 - DNA, 323 bp, Homo sapiens
tagcatgacagttactaaaagaatataaacaaagactagaacttaaaatgactagagaagaaaaaatatcccaccaattgaaaagaaggcaagaaaggaaaaaaagaaacataagtaggataaatagaaagtgacaaaatgacacaaacacatatgcatgtacatacacaccactcaccatctatacagaatccaagtatgtcagaatacaaatacatgcaaatggactaagtaatccagttaaagatggataaattgttaaaatcycattccatgctatttttaagtcatatttaaaatacaaagatattgaatgattttaa

SEQ ID NO: 624004 - DNA, 323 bp, Homo sapiens
tagcatgacagttactaaaagaatataaacaaagactagaacttaaaatgactagagaagaaaaaatatcccaccaattgaaaagaaggcaagaaaggaaaaaaagaaacataagtaggataaatagaaagtgacaaaatgacacaaacacatatgcatgtacatacacaccactcaccatctatacagaatccaagtatgtcagaatacaaatacatgcaaatggactaagtaatccagttaaagatggataaattgttaaaatctcattccatgctatttwtaagtcatatttaaaatacaaagatattgaatgattttaa

SEQ ID NO: 624005 - DNA, 601 bp, Homo sapiens
ttgtttgagggactacaagaagaccaatgtgcttgaagcataatacatctaagatcagatgtgtgatgagtttgaagaggcagctagatcaacgtaaggactttggagggcttttggcaggagagtgacatgatctgatttgatgtatattttgaaaggtcactccagcttccaggtagcagtggaagaagacatgcaaaaatcacaatcataacttacacggcatggtagcttggagtacggaggaagaggaagcacatttggggtatattttggaagtggaataaacagacctgctggtggatggagaagggtggggtgagggttgataatgaggagccaaggatgactcattttcaggttggagtaactgggaaggcttgraagactagtggagaaacaggtttggagagagaagtctcagtcccttagtcattcacctcagtttcttagtcactgaaataccttagatctcttatctaccatttctttaaaaacatgcgtgagcccagtaggcagtcctggctactcgggaggccaatggggaaggatcccttgaacccaggagtttgaggcatacctgggccacacagcaagaccc

SEQ ID NO: 624006 - DNA, 312 bp, Homo sapiens
agtgattagtgaaaaggaagattggtccaaagcaatgtttgttaaccawattttcattatcaaagaggaaaaactaaacattccctaacagaaatgaaaaaggaataaaatttttgttagatgatgttgaactttgaaaggccaccaaggacacttttaatatcaaatcttcctcatccccccaactccagaaaactagtttttgctcagatattggctcagtggaaaatgtgtggtctgaagctgtagtctcctagtttgtgagcttattttcgctgcctgaaggtttgagtcaccgtagaaggggaggag

SEQ ID NO: 624007 - DNA, 312 bp, Homo sapiens
agtgattagtgaaaaggaagattggtccaaagcaatgtttgttaaccatattttcattatcaaagaggaaaaactaaacattccctaacagaaatgaaaaaggaataaaatttttgttagatgatgttgaactttgaaaggccaccaaggacactttyaatatcaaatcttcctcatccccccaactccagaaaactagtttttgctcagatattggctcagtggaaaatgtgtggtctgaagctgtagtctcctagtttgtgagcttattttcgctgcctgaaggtttgagtcaccgtagaaggggaggag

SEQ ID NO: 624008 - DNA, 312 bp, Homo sapiens
agtgattagtgaaaaggaagattggtccaaagcaatgtttgttaaccatattttcattatcaaagaggaaaaactaaacattccctaacagaaatgaaaaaggaataaaatttttgttagatgatgttgaactttgaaaggccaccaaggacacttttaatatcaaatcttcctcatccccccaactccagaaaactagtttttgctcagrtattggctcagtggaaaatgtgtggtctgaagctgtagtctcctagtttgtgagcttattttcgctgcctgaaggtttgagtcaccgtagaaggggaggag

SEQ ID NO: 624009 - DNA, 312 bp, Homo sapiens
agtgattagtgaaaaggaagattggtccaaagcaatgtttgttaaccatattttcattatcaaagaggaaaaactaaacattccctaacagaaatgaaaaaggaataaaatttttgttagatgatgttgaactttgaaaggccaccaaggacacttttaatatcaaatcttcctcatccccccaactccagaaaactagtttttgctcagataytggctcagtggaaaatgtgtggtctgaagctgtagtctcctagtttgtgagcttattttcgctgcctgaaggtttgagtcaccgtagaaggggaggag

SEQ ID NO: 624010 - DNA, 626 bp, Homo sapiens
attcaagtgaagtattctctggcctagtgtttgtatttagtacagatttatcaaaacgttattttttgtgtatttgatgttatcactaatgtctattttaaaagtcttaaagacacattacattgactaaatgtagtgtgctctgggaattcttgtgtgtataacctacgtagtgtgtaaggtgggaacagaaccaaaaggagatcttgttctggagaatatagcaaactctgagttaaactggttccataataatgataactaccacttattttctctctctctctytttttttttttgtattttagagttgcaaacaggcttttttttttttagctcctatttatgaaacacctatcatgcgccagccctgtgctaagcctttacacatattatttcgttttattctcatgataacccaatgaggtcaatactattaggttttcttttgtattaaacatgaagaaacataggtataaagataccaagaaacttgtcacaatctactaatatttatgaactgaaaactgaacccaggtcagcctacttccaacgtccatctttttactctgctacccatgtcccctgacactcaaaccacagataccacaaggatgaaaccagtg

SEQ ID NO: 624011 - DNA, 421 bp, Homo sapiens
attatgcaccattaacaccaagtcactgtttctaaagaaggccctgatgttctcctgcagagagagcagtagaagtgagatgcttgaccggacacggtggctctcgcctgtaatcccagcacttcgggaggccgaggcaagcagatcatgacgtcaagagatcaagaccatcctggctaacatggtgaaaccccatctctactaaaaatacaaaaattagctgggcatgatggcgcgtgtctgtagtcctagctactcaggaggctgaggcaagaggatcgcttgaacctgggaggcggaggttgcagtragctgagattgaaccactgcacaccagtctggcgacagagactctgtctccaaaaaaaaaagacatgcttatattaacttccaaagcccaagccctggattagggggtgct

SEQ ID NO: 624012 - DNA, 626 bp, Homo sapiens
attcaagtgaagtattctctggcctagtgtttgtatttagtacagatttatcaaaaygttattttttgtgtatttgatgttatcactaatgtctattttaaaagtcttaaagacacattacattgactaaatgtagtgtgctctgggaattcttgtgtgtataacctacgtagtgtgtaaggtgggaacagaaccaaaaggagatcttgttctggagaatatagcaaactctgagttaaactggttccataataatgataactaccacttattttctctctctctctttttttttttttgtattttagagttgcaaacaggcttttttttttttagctcctatttatgaaacacctatcatgcgccagccctgtgctaagcctttacacatattatttcgttttattctcatgataacccaatgaggtcaatactattaggttttcttttgtattaaacatgaagaaacataggtataaagataccaagaaacttgtcacaatctactaatatttatgaactgaaaactgaacccaggtcagcctacttccaacgtccatctttttactctgctacccatgtcccctgacactcaaaccacagataccacaaggatgaaaccagtg

SEQ ID NO: 624013 - DNA, 587 bp, Homo sapiens
ttttgtctaggtttaatatttgcctttgctagatactgtgagatgtcattgtttggcatagaaggttataaagctattaacccagcgaaaacaaaatcatcttggtttgcgtgccttctttgacaaatgagactaatttaatgttgttagctgagtcttctgagttattggcaaaaatacctatgtatttacttttgaggcttttatttaggtgagcatgtgatggtcactggctatttaaaaaaattgttaacaaggaaataagaaaccttaaatgatagtgtttcatatctcagtttccaaaagtaatctagataaactgttaaaatgaaaaaatgagtacatgtaaatgggataaatgtttaaaataaatttttttgtaatttaaaatcttaaaaattacttttgatgctcattggctatctaggtcatttcccttaagaaagcgttatgatatggggaaatatgtttcyaaaaattgtggaattcttctcaactaaaaagtgctcatatctgatatttctgagattcttgctttttagggcttcagtaaaatttaaggttactaaggataagaattctagttg

SEQ ID NO: 624014 - DNA, 605 bp, Homo sapiens
aatttagccattctcttattgtatgttttacaaaggtactcaatctataaaatatggtttataacactgaggaatatccctattaatatagttttccttaatataaatatatatgaattcatatatatatccttgaacttacaatgtaaaggtataaatctttaagagattttgatttatagctatattatcttccagaaatggtaaattaatagcatccactcacttttccaatcatgatatagagtttaaccatagcctcatcaacagagttttttttattctaatctgtctgtgtttgatagattctaattttttttattgttttagtttgaacttttaaaactatacatgaaagcaaatatatttataagcatattgttctattggatttgcttatattgtctgcttttggtaagaactcttcatagctactgtatatgtacatrgacataattttcatgtattaattgtttcagttactaatttattccctttctgcacaagaagaggtaaacctcatactctttcccaacatggggaaataaaagcttcctctccactgtaaaaaaatagagattgtcaggccgggtgtggtggctcac

SEQ ID NO: 624015 - DNA, 596 bp, Homo sapiens
cataatagccagaagatggatgcaacctgagtgttcatcagtggatgaatggataaacaaaatgtggtatacatatacaataggataaaattctgctttaaaagggaaagaaatcctgacatgtggcaacaggatgaaccttgaaracgtcatgctaagtgaaataagccagccacaaaatgacaaattgtacatgatttcacttacatgagatgcctagagtagtcaaatccataaagaaaaagtagaatggtaattgcagggagtaaagagaatgaaatggggatttaatgtgtaatgggaatggagtttcaatttgggaaaatgaaaaatttctagagatggatagtgatgatggttgcataaaaaagtaccttatcaagattataaagaaaataagcatgattacatatgtcacatcctttcctgactttttgtgataacacttttctcaatcctcagaagcaatgtctttccagtttctttgtaccattgtttctttactaccatctcactccctgacctggagggaaccaaagaccagattacgttctagacttggttggctctctcagccctactggacatcctatata

SEQ ID NO: 624016 - DNA, 528 bp, Homo sapiens
caaatttgaagaaggaagcaatgcattgacctcgggacttcccgtcacccatcctccatggatggcaatggtaatgagaacaaagaagaggagaggaaagaacctgaagtgaatcagtgcagttaaatacctcaagaagaaggctaccatcgcagggtaggttgaagcctgacagaaaggctgtggtggaaagtgctacagacccccaggtggaaatcagacagacatgagtgagatgagttttccagagacaacctaagtgaaatatttaagtagatgacaggatcttgttgttaatgtgagwtttctctcaactctctgaacattaacttcaccctaaaagacttcactattttccaaaaaaaaaaagaacctgaaaattggtaatttccttattttttgttcctatgacatgttttaaaataaaataaggccaattttgtttcacatgaatttttattatttatgattagaagaacaaagaatatatatattaattgtatatatatgaatatatatggctagaac

SEQ ID NO: 624017 - DNA, 528 bp, Homo sapiens
caaatttgaagaaggaagcaatgcattgacctcgggacttcccgtcacccatcctccatggatggcaatggtaatgagaacaaagaagaggagaggaaagaacctgaagtgaatcagtgcagttaaatacctcaagaagaaggctaccatcgcagggtaggttgaagcctgacagaaaggctgtggtggaaagtgctacagacccccaggtggaaatcagacagacatgagtgagatgagttttccagagacaacctaagtgaaatatttaagtagatgacaggatcttgttgttaatgtgagttttctctcaactctctgaacattaacttcaccctaaaagacttcactattttccaaaaaaaaaaagaacctgaaaattggtaatttccttattttttgttcctatgacatgttttaaaataaaayaaggccaattttgtttcacatgaatttttattatttatgattagaagaacaaagaatatatatattaattgtatatatatgaatatatatggctagaac

SEQ ID NO: 624018 - DNA, 528 bp, Homo sapiens
caaatttgaagaaggaagcaatgcattgacctcgggacttcccgtcacccatcctccatggatggcaatggtaatgagaacaaagaagaggagaggaaagaacctgaagtgaatcagtgcagttaaatacctcaagaagaaggctaccatcgcagggtaggttgaagcctgacagaaaggctgtggtggaaagtgctacagacccccaggtggaaatcagacagacatgagtgagatgagttttccagagacaacctaagtgaaatatttaagtagatgacaggatcttgttgttaatgtgagttttctctcaactctctgaacattaacttcaccctaaaagacttcactattttccaaaaaaaaaaagaacctgaaaattggtaatttccttattttttgttcctatgacatgttttaaaataaaataaggccaattttgtttcacatgaatttttattatttatrattagaagaacaaagaatatatatattaattgtatatatatgaatatatatggctagaac

SEQ ID NO: 624019 - DNA, 639 bp, Homo sapiens
aaaaaacattcgttaagacactatgttctrggaagacacttgactaagtatatctaagtatatttcattacaaagcaacattgtaataaggttattatgattatttccattatctatatatatttgcatgggacagggagagcacacttgaaaaatcctttagcctttcttcagcagcaagcatttccttaactgactgttattaacataattttgataggaataaactctctttaccaatatttaggaagcaaaggagaaaatataaaaactgaaaaaggagcagcaattagacagaaactgtagggtaaaaccatgaggcagaaggaacagaatgagtatggtataggcagagtggttttcatttagtgagtgctgaatagatggaaatgaaagcatattacatatatatatattatatataattgtatataatagatataataaataaataaatatatatatataaaataaattcagaaagatgtagaaatttgcccttttagacacacaacgtaagggacagggttaggattctaatcctaccaacctaacacaacattttggttagctcagtcacttcttctgttaccttggacaagccacttaacttttctatgcctcagtttccttataatt

SEQ ID NO: 624020 - DNA, 639 bp, Homo sapiens
aaaaaacattcgttaagacactatgttctgggaagacacttgactaagtatatctaagtatatttcattacaaagcaacattgtaataaggttattatgattatttccattatmtatatatatttgcatgggacagggagagcacacttgaaaaatcctttagcctttcttcagcagcaagcatttccttaactgactgttattaacataattttgataggaataaactctctttaccaatatttaggaagcaaaggagaaaatataaaaactgaaaaaggagcagcaattagacagaaactgtagggtaaaaccatgaggcagaaggaacagaatgagtatggtataggcagagtggttttcatttagtgagtgctgaatagatggaaatgaaagcatattacatatatatatattatatataattgtatataatagatataataaataaataaatatatatatataaaataaattcagaaagatgtagaaatttgcccttttagacacacaacgtaagggacagggttaggattctaatcctaccaacctaacacaacattttggttagctcagtcacttcttctgttaccttggacaagccacttaacttttctatgcctcagtttccttataatt

SEQ ID NO: 624021 - DNA, 634 bp, Homo sapiens
atttcttaacaaaatcctcagcttcagttctcaaagtgtgtttcattcatatacattcggatatacgtacacatatatgccaaccaagtgcttgtcaaatcaaaattataatttatgttctattaagtttacagtactcatttattctgaaagttattaagccaggtggacaaaaatagacatatggcttctgtgactggcaaagagcaatttgtcccattatcttaaagaatgtttccccaactacctgcatcagaatcacctgtgattttaagatgctccaattcctaggatcaaggctgaattttttttaacaattattagaaggcccaggaagctgcataagtgctttagagtaattatttcattaaatcatyatatcacacctatgaagtaggaagcattatactaaatccccattttacaaatgaccttgttacacaactaaaagatcgagagtacaaatccagatatgactttcatcatccaactaataaaccagtacatgattccgtcttgttcctaatttgggtatagacagaggactatctatgttgacatgaaaaaaaaatgctacggtagatgtgctctgtggatgagctggaagacaagcaccacataaattctttctcac

SEQ ID NO: 624022 - DNA, 594 bp, Homo sapiens
tacctgcatcagaatcacctgtgattttaagatgctccaattcctaggatcaaggctgaattttttttaacaattattagaaggcccaggaagctgcataagtgctttagagtaattatttcattaaatcattatatcacacctatgaagtaggaagcattatactaaatccccattttacaaatgaccttgttacacaactaaaagatcgagagtacaaatccagatatgactttcatcatccaactaataaaccagtacatgattccgtcttgttcctaatttgggtatagacagaggactatctatgttgacatgaaaaaaaaatgctacggtagatgtgctctgtggatgagctggaagacaagcaccacataaattctttctcaccttgtattccttctttctacttatggtatattgaaaatgaaaccaaggacaaatggtgaaaaataaaaggaggtaattttagttcaayttgtccttctatgaatcaatcacctaatatctattaataaaaggaaacaatgagaactcacatatcaaaggagaaaatgtctgctaaaaggcatatagcttgtctataaaataggt

SEQ ID NO: 624023 - DNA, 594 bp, Homo sapiens
tctatttgaaacacagtgatgtcaatagtattgtaccctgccagccaccatggggtaaagtacattttgaaaccaaaacaaacttcctacgtgctggcaagtgagatctgagacgcagtgataatgttctacaagacactgacctaattttatgtacaaaatgcaagaattaagtcttctcttctacaaaagtttaagtctaactctcacagctctattcccacccagagcccagtgtaaytgctttattgtatcaaattattgtccaggatggaagagggaaatgacgaaatactgttactgatctctaattaaaatggtgatcttacatagcacaaaacagcacatttaaagaatgctttgtaatatagctgttcatctagaagcagaaaatgaaaatagcaaagcacctttaaaagtggccctactaataagatgtgagttgtataatagctcattttaaggggaatattcatataggaggaaagacattttattaaatggaacaggaacaatctggcccaagaattaattcatccctggaaggcgaatattcataatttgtactgaatatgagcaacctgaaatagagag

SEQ ID NO: 624024 - DNA, 470 bp, Homo sapiens
ttcattatcttaactagattcattgctttaatttgtcaaactctgattgatttgctcaactcaatcttgtgtgttcaagaacttaatgtggatttctgttccacctcatgaaagtcttttccaaaaacttgctaaattcttgactcaagacattccagttagtaatgcatttctctgctcaaatacaatagaagtgtgctctaataaatactcttcaacaatgtgcagttatttctccccaactatcaattccccttaaagcagaattttactaaaaatggctttatccttctgggaataatcagtaaaatggcaattggagggtgaatttaaaatatactaaaagcagatggcagaacatgagtgcagatttttactacaaagcttaggaagaacaaaaggaacctgaatagagaaatgcaggaaagctctccytgggctattaggacgtagagagcagaagtatgttt

SEQ ID NO: 624025 - DNA, 470 bp, Homo sapiens
ttcattatcttaactagattcattgctttaatttgtcaaactctgattgatttgctcaactcaatcttgtgtgttcaagaacttaatgtggatttctgttccacctcatgaaagtcttttccaaaaacttgctaaattcttgactcaagacattccagttagtaatgcatttctctgctcaaatacaatagaagtgtgctctaataaatactcttcaacaatgtgcagttatttctccccaactatcaattccccttaaagcagaattttactaaaaatggctttatccttctgggaataatcagtaaaatggcaattggagggtgaatttaaaatatactaaaagcagatggcagaacatgagtgcagatttttactacaaagcttaggaagaacaaaaggaacctgaatagagaaatgcaggaaagctctccttgggctattaggaygtagagagcagaagtatgttt

SEQ ID NO: 624026 - DNA, 598 bp, Homo sapiens
cactctgtcacacaggctggagtgcagtggtgtgatcttggttcactgcaacctccgcctcctgggatcaagtgattcttctgcctcagcctctacagtagctgggattacagggtacctgccacaatgcctggataagttttggaytttagtacagacgggttttcaccgtgttggccaggctggtcttgaactcctgacctcaagtgattaactggccttggcctcccaaagtgctgggattacaggcatgagccatcacacccagcccatattttttattttgattcattatattcataaaagaacaaccaaaaaactttgggcaacaatcaaaagaattacattttaggtaaatgccctatattttaaaagaaactacaaatattttggtatttatcataataatatagttatttaataataatgtatattttatctatatttagcttttgggaaaaaacattttacattaaataaaatttaaaacagtgtaaataaaggtatatatatttacatatatgaatatcatagtattaatatatatttcattaatactggagagcatattttcaaatacaatctatataaaaagtgt

SEQ ID NO: 624027 - DNA, 664 bp, Homo sapiens
acacttgaaaattgctaagagagtagattttaagtgttgtctgtacaagaagtgaggtaatacatatgttagttggcttgatttaaccattctacaatgcatacacatatcaaatatcatgttttacaaaagaaatatatacaatttttattaataaattgaaagtttaaaataaaatcatatggaaattgtggaaaacaaatgtttcctcaaaaattaaaaacagtattaccacgtgattcagccattttacttctgagtatatactcaaaagacttgaaagcagtctctggaagaggtacttayatacccatgttcctggcagcatcattcacaatagctaaaacttggaagcaaattaagcatccatccatggataaatcaataaacaaaatgtagtatatacacaaaaggaatattattcagccttgaaaaagaaggaaattctgacacatgctacaacatggatcaacagtgaggctggtatgctaagttaaataagccactcatgaaaaaacaaatatggcatgattatacttgaaactgacccaatacttccatatattttttaataaacatagatgtgtactcttctgatctgaaagtttgaaatttaccaaatgatcttcaggcctctcaaagtatcaaaaaactcaccatatca

SEQ ID NO: 624028 - DNA, 602 bp, Homo sapiens
ttgtaaacaacttttcagaaataacctctaccctgaccttccctcacttctgcttcctactgatgtgtggaattagtgttaattgtaaccccattgttttaactctgcaagtttcttgggcattttctgaggagtgagagtgaaatgggaggatagcaggtgatggtttatgggacctaatatttactgagtgtttggctactaaagatacatgagcatttggggctataaatgatratataattctgtctactggtttgcataaaaaataagaaatattaggcaaatatctcaaacaaaaaatgtttacaagacaatagaatacccaacttcctctggttaatgttcatagaagcattatttttttcctcaacttttattttaagcacagggagtacatatgcaggtttgttgcatgggtgtattgcactcaggtggtcagcatagtactcaatgggtagttttttgatccattctctctccttgccccagcagttcacagtctactgttcccaggtttatttccctgggcacttggtgtttagctcccattgaaaaactgatattatgtagtatttagttttctgttgctgcattaattc

SEQ ID NO: 624029 - DNA, 610 bp, Homo sapiens
atgttcttaattttatagtcacagctactaaagcgagagggcttcttagtaacaaattatttttatagtcatcaaaggttaaaataagagagtaagatacctaaggccacatggagaataaatgtcatagctgaaaatttggcaatggttttgtgattctcatcattttgtgttttatcttgtcttttaatatagacttctctgaattattttacttccgacatagagtaatattagactaggcctttaattttacaaagtgtaatatttgtattgtgtaataaataggyagataaataaatatggaccaaaatattgagcagttatcataaatgtttacatacatagaaaattgttttttaatggacaacctatataaaataattttctaataaacatgtatggttcaagaagggcattttaaattaaatgttcaatgccattttaagaaattgattctctaaaagaatatccacaaaatttgataccgcattaaaaaatatgccaaataaatgtatctagaatcctctagaatttatttgttgattgatgaaatcataaggaaaagaattttcatatgtaatttattaaatgataaatgatgtcattt

SEQ ID NO: 624030 - DNA, 610 bp, Homo sapiens
atgttcttaattttatagtcacagctactaaagcgagagggcttcttagtaacaaattatttttatagtcatcaaaggttaaaataagagagtaagatacctaaggccacatggagaataaatgtcatagctgaaaatttggcaatggttttgtgattctcatcattttgtgttttatcttgtcttttaatatagacttctctgaattattttacttccgacatagagtaatattagactaggcctttaattttacaaagtgtaatatttgtattgtgtaataaataggtagataaataaatatggaccaaaatawtgagcagttatcataaatgtttacatacatagaaaattgttttttaatggacaacctatataaaataattttctaataaacatgtatggttcaagaagggcattttaaattaaatgttcaatgccattttaagaaattgattctctaaaagaatatccacaaaatttgataccgcattaaaaaatatgccaaataaatgtatctagaatcctctagaatttatttgttgattgatgaaatcataaggaaaagaattttcatatgtaatttattaaatgataaatgatgtcattt

SEQ ID NO: 624031 - DNA, 610 bp, Homo sapiens
atgttcttaattttatagtcacagctactaaagcgagagggcttcttagtaacaaattatttttatagtcatcaaaggttaaaataagagagtaagatacctaaggccacatggagaataaatgtcatagctgaaaatttggcaatggttttgtgattctcatcattttgtgttttatcttgtcttttaatatagacttctctgaattattttacttccgacatagagtaatattagactaggcctttaattttacaaagtgtaatatttgtattgtgtaataaataggtagataaataaatatggaccaaaatattgagcagttatcataaatgtttacatacatagaaaattgttttttaatggacaacctatataaaataattttctaataaacatgtatggttcaagaagggcattttaaattaaatgttcaatgccattttaagaaattgattctctaaaagaatatccacaaaatttgataccgcattaaaaartatgccaaataaatgtatctagaatcctctagaatttatttgttgattgatgaaatcataaggaaaagaattttcatatgtaatttattaaatgataaatgatgtcattt

SEQ ID NO: 624032 - DNA, 523 bp, Homo sapiens
tgtatcatacatggtgagagggcagcacatagtgagagggcaagagcacccaagtcagctcacatctttcttttcttctaaagccaccagtctcaacatgggggactaactctaaagaccttatctaatcttgattacctcctgcaaaggccccacctccaaatatcatcaacatatgagtttgggcatttagtttccaatacacaaaacttggggggttcatgcaggtctcagcacattcgaacatggtttcgttcacattgtatgaaaacagctgaatagactgtaaatagttatagcagtgaataccactatagtattttgggtaagaggttgataatgtacacagtaaagaccagctacctgtagcttttttttaatatcatatgtccctggggaaagaatcttctagttcctcatcttcaacaggatgtttttatgtgaagtctgcaatatcagttagggataytagttactaaaaacaatataccctaacttcttcaagctgaagggacttattaag

SEQ ID NO: 624033 - DNA, 617 bp, Homo sapiens
aaaccggaaaaatagttccttcctaacttcccctgcagccttgtcttgtggagcttgtattttacttcatgagaaatgccaaagatatgtcatttaagctgaaacctccagcagaattagccagaatatttgggraaaagatgtttccagaaaaagagctagtataaatgtccttaagcaagacggagctcatgatgattgaggaacaacaacaacaaaaagattatttcacccaagaaaagtgaattgggagtacagatataaatgatgagatctgaatacgattcatggagcaggtcaaactaggatgtttgggtgtggtctaaatgaatgggtggcatgagttgttttaaggagaggagtgacatgatttgacaagttcttaagagatccctttgattactctggggagaatagaacataaagtagcagaaatgaaagcaaaggggagatagtgggaaataattgcacatttataagcaagagatgatgttggctgggactctgattatagcaacagatgaagaaaaaaggaaatactgagaatagttgattggatttgctgacattctcaacataaatggaaatcagtatttttttctaataaatatgatatg

SEQ ID NO: 624034 - DNA, 617 bp, Homo sapiens
aaaccggaaaaatagttccttcctaacttcccctgcagccttgtcttgtggagcttgtattttacttcatgagaaatgccaaagatatgtcatttaagctgaaacctccagcagaattagccagaatatttgggaaaaagatgtttccagaaaaagagctagtataaatgtccttaagcaagacggagctcatgatgattgaggaacaacaacaacaaaaagattatttcacccaagaaaagtgaattgggagtacagatataaatgatgagatctgaataygattcatggagcaggtcaaactaggatgtttgggtgtggtctaaatgaatgggtggcatgagttgttttaaggagaggagtgacatgatttgacaagttcttaagagatccctttgattactctggggagaatagaacataaagtagcagaaatgaaagcaaaggggagatagtgggaaataattgcacatttataagcaagagatgatgttggctgggactctgattatagcaacagatgaagaaaaaaggaaatactgagaatagttgattggatttgctgacattctcaacataaatggaaatcagtatttttttctaataaatatgatatg

SEQ ID NO: 624035 - DNA, 617 bp, Homo sapiens
aaaccggaaaaatagttccttcctaacttcccctgcagccttgtcttgtggagcttgtattttacttcatgagaaatgccaaagatatgtcatttaagctgaaacctccagcagaattagccagaatatttgggaaaaagatgtttccagaaaaagagctagtataaatgtccttaagcaagacggagctcatgatgattgaggaacaacaacaacaaaaagattatttcacccaagaaaagtgaattgggagtacagatataaatgatgagatctgaatacgattcatggagcaggtcaaactaggatgtttgggtgtggtctaaatgaatgggtggcatgagttgttttaaggagaggagtgacatgatttgacaagttcttaagagatccctttgattactctggggagaatagaacataaagtagcagaaatgaaagcaaaggggagatagtgggaaataattgcacatttataagcaagagatgatgttggctgggactctgattatagcaacagatgaagaaaaaaggaaatactgagaakagttgattggatttgctgacattctcaacataaatggaaatcagtatttttttctaataaatatgatatg

SEQ ID NO: 624036 - DNA, 590 bp, Homo sapiens
cagccaaagaaatgaatttgaggctaatctcccatctttttggctgaagcacctgattaaatcctkcttttctggcaatgtttgttgcctcagtgattggctttctgtgtggtgagcagcaggacctagaccaaagccctggcatttcggtaaaaattacctctatggtgagctaactattatgcatgtagttgggcagggtgttcatcttcatgggtcccatttcattaccttttagagttttttcataaatttgtgggattctatagaaaagttattaaaggttatatattcagtcaattataactttttataaccatataatcacatctgctttttcagccattgaattttgatcctacatcatcatcatcatcctatcattctattcttcatcctatagctattattttgtaagtaaggtcttttacagtgtcccctcatgatcaattaaagggcattttctggttgctaatcttacaaagtttgaatagaataaaaatcagaacttgtgttgatttgaattgacaaatttatcatagggaaagtgcccatctgtgaatagaatgaagtttaaaagtatgtttatt

SEQ ID NO: 624037 - DNA, 590 bp, Homo sapiens
cagccaaagaaatgaatttgaggctaatctcccatctttttggctgaagcacctgattaaatccttcttttctggcaatgtttgttgcctcagtgattggctttctgtgtggtgagcrgcaggacctagaccaaagccctggcatttcggtaaaaattacctctatggtgagctaactattatgcatgtagttgggcagggtgttcatcttcatgggtcccatttcattaccttttagagttttttcataaatttgtgggattctatagaaaagttattaaaggttatatattcagtcaattataactttttataaccatataatcacatctgctttttcagccattgaattttgatcctacatcatcatcatcatcctatcattctattcttcatcctatagctattattttgtaagtaaggtcttttacagtgtcccctcatgatcaattaaagggcattttctggttgctaatcttacaaagtttgaatagaataaaaatcagaacttgtgttgatttgaattgacaaatttatcatagggaaagtgcccatctgtgaatagaatgaagtttaaaagtatgtttatt

SEQ ID NO: 624038 - DNA, 590 bp, Homo sapiens
cagccaaagaaatgaatttgaggctaatctcccatctttttggctgaagcacctgattaaatccttcttttctggcaatgtttgttgcctcagtgattggctttctgtgtggtgagcagcaggacctagaccaaagccctggcatttyggtaaaaattacctctatggtgagctaactattatgcatgtagttgggcagggtgttcatcttcatgggtcccatttcattaccttttagagttttttcataaatttgtgggattctatagaaaagttattaaaggttatatattcagtcaattataactttttataaccatataatcacatctgctttttcagccattgaattttgatcctacatcatcatcatcatcctatcattctattcttcatcctatagctattattttgtaagtaaggtcttttacagtgtcccctcatgatcaattaaagggcattttctggttgctaatcttacaaagtttgaatagaataaaaatcagaacttgtgttgatttgaattgacaaatttatcatagggaaagtgcccatctgtgaatagaatgaagtttaaaagtatgtttatt

SEQ ID NO: 624039 - DNA, 590 bp, Homo sapiens
cagccaaagaaatgaatttgaggctaatctcccatctttttggctgaagcacctgattaaatccttcttttctggcaatgtttgttgcctcagtgattggctttctgtgtggtgagcagcaggacctagaccaaagccctggcatttcggtaaaaattacctctatggtgagctaactattatgcatgtagttgggcagggtgttcatcttcatgggtcccatttcattaccttttagagttttttcataaatttgtgggattctatagaaaagttattaaaggttatatattcagtcaattataactttttataaccatataatcacatctgctttttcagccattgaattttgatcctacatcatcatcatcatcctatcattctattcttcatcctatagctattattttgtaagtaaggtcttttacagtgtcccctcatgatcaattaaagggcattttctggttgctamtcttacaaagtttgaatagaataaaaatcagaacttgtgttgatttgaattgacaaatttatcatagggaaagtgcccatctgtgaatagaatgaagtttaaaagtatgtttatt

SEQ ID NO: 624040 - DNA, 426 bp, Homo sapiens
tttcttatttcaaaaatataactagaaatataattagaattgacatgacatacagttattccataaaagaaggtggtaaaaacaaaaatacagttgtcccttrgcataggcagattattagttctaggattcatgtatataccaaaatctgcacatactcaggtccttaattgaccctgtaaaacccacacaggtttcacatccatgaatattgtatttccatctatgcttagttgaaaaactgcatgtacaagtggaccctcacagttaaaattcgtgttgtccaagggtcaactgtaaagtttaataaaatatttcctcaaaaagaaatgcttcatggtgaaaataggtgtattttacttttagaataatattttaggaatcatgattggatgaaagcagaaactgctggatataattagaaag

SEQ ID NO: 624041 - DNA, 529 bp, Homo sapiens
gcccatttacttaagcaaccttacatttctaaagccaggacattgccccctttctgatagtcgtggatattctctttaaaatacaaactaacattggcttttttgggtgataagaatttaagtgctgactacctgcactgtattaatgagaaaaatccaattatggttaaatgatttaatacccacacgccccaaacacttggcctccattaagaaaggtccactcactactttctgacagttcagtgacaacaactgtcaaataagggacaattctccatttagtaaaataagggcatarggcagtttaagcaatttatcactatcacagatatgggaagcagggtaggagacagctgtaacatccacgccacacacattcacattcaataatggagagagaaggaatgttgaggctctagcaactctgtgtttcccaagatgattccatccccccagaatcccctttactaatatgggtttgcaccagtttagataaaacggcagctctctgaaaggaggtgttgaa

SEQ ID NO: 624042 - DNA, 598 bp, Homo sapiens
gggaagccaaaagattagacagacacctctgaattagttcagtgcattatgaacactcttactttgtattaccatgaaggcattaaacaaamaaaaaaaatcagcagtattttacaataactgtgatgagtacactagaaattgcatagaaattaaatgcccctcattaaaggcctgacaacatatattgtccagtacatatttttacatattgtctactaccaagttccaacagataattcaagtggtacttaataaacaaaaggtgaccaaatgagaaaatgaacttatacaaaagaaagaagaatgcttcttcttctgaacaatagtgcagactgacaaagattctttgcctggccaaacttgatcaggcttctgaatcttctcctaggctcatctgtatacttcctcataaaatcactttttaacaaagaaccatactatatcactttaccaagaactcctctacctttgatgaatgatctatcttgaaaattcatcaggtttctcatcctgcaccaccccttaggtgatgtctgatcaccctgacttgtcttcagcaacaatcgtattagcgtgttttagccagaattcccct

SEQ ID NO: 624043 - DNA, 598 bp, Homo sapiens
gggaagccaaaagattagacagacacctctgaattagttcagtgcattatgaacactcttactttgtattaccatgaaggcattaaacaaacaaaaaaaatcagcagtattttacaataactgtgatgagtacactagaaattgcatagaaattaaatgcccctcattaaaggcctgacaacatatattgtccagtacatatttttacatattgtctactaccaagttccaacagataattcaagtggtacttaataaacaaaaggtraccaaatgagaaaatgaacttatacaaaagaaagaagaatgcttcttcttctgaacaatagtgcagactgacaaagattctttgcctggccaaacttgatcaggcttctgaatcttctcctaggctcatctgtatacttcctcataaaatcactttttaacaaagaaccatactatatcactttaccaagaactcctctacctttgatgaatgatctatcttgaaaattcatcaggtttctcatcctgcaccaccccttaggtgatgtctgatcaccctgacttgtcttcagcaacaatcgtattagcgtgttttagccagaattcccct

SEQ ID NO: 624044 - DNA, 598 bp, Homo sapiens
gggaagccaaaagattagacagacacctctgaattagttcagtgcattatgaacactcttactttgtattaccatgaaggcattaaacaaacaaaaaaaatcagcagtattttacaataactgtgatgagtacactagaaattgcatagaaattaaatgcccctcattaaaggcctgacaacatatattgtccagtacatatttttacatattgtctactaccaagttccaacagataattcaagtggtacttaataaacaaaaggtgaccaaatgagaaaatgaacttatacaaaagaaagaagaatgcttcttcttctgaacaatagtgcagactgacaaagattctttgcctggccaaacttgatcaggcttctgaatcttctcctaggctcatctgtatacttcctcataaaatcactttttaacaaagaaccatactatatcactttaccaagaactcctctacctttgatgaatgatctatcttgaaaaytcatcaggtttctcatcctgcaccaccccttaggtgatgtctgatcaccctgacttgtcttcagcaacaatcgtattagcgtgttttagccagaattcccct

SEQ ID NO: 624045 - DNA, 598 bp, Homo sapiens
gggaagccaaaagattagacagacacctctgaattagttcagtgcattatgaacactcttactttgtattaccatgaaggcattaaacaaacaaaaaaaatcagcagtattttacaataactgtgatgagtacactagaaattgcatagaaattaaatgcccctcattaaaggcctgacaacatatattgtccagtacatatttttacatattgtctactaccaagttccaacagataattcaagtggtacttaataaacaaaaggtgaccaaatgagaaaatgaacttatacaaaagaaagaagaatgcttcttcttctgaacaatagtgcagactgacaaagattctttgcctggccaaacttgatcaggcttctgaatcttctcctaggctcatctgtatacttcctcataaaatcactttttaacaaagaaccatactatatcactttaccaagaactcctctacctttgatgaatgatctatcttgaaaattcatcaggtttctcatcctgcacyaccccttaggtgatgtctgatcaccctgacttgtcttcagcaacaatcgtattagcgtgttttagccagaattcccct

SEQ ID NO: 624046 - DNA, 589 bp, Homo sapiens
ttgtcatctgaagactaaataagttttatccttggactagttctactttgagtactgatactcaaaatatgaatattatagtacaacaagggagatagtgagkcattctgaccaaaaatttgcccatactctctgaaaatacttttggatataaatatttttcaacaactatgtccacctacagagtgaatctccaacttaacccaggctgccagagccagaaaaaacctgctatcaatttttgcatgtagagctaggactcaaatgtatcttaattttatttactcttcctaaattgtatctatatacttaaactgtttaccaaaaacgtttttgtgtatattcaacacatgcaaccagttaatatttgtgcagagcttagcatagttcattacgaacagaacattctatacaacctctagacattatgatcacttacgttattaccccaaattgaaagtataatctggtctctagcattaaactgcataggaatgagagagatgctcagtctgtaatctggagaggaaaggaaggtcaatgattctttataaaattaagtttgtacactctgcttttcaagcagcag

SEQ ID NO: 624047 - DNA, 589 bp, Homo sapiens
ttgtcatctgaagactaaataagttttatccttggactagttctactttgagtactgatactcaaaatatgaatattatagtacaacaagggagatagtgagtcattctgaccaaaaatttgcccatactctctgaaaatacttttggatataaatatttttcaacaactatgtccacctacagagtgaatctccaacttaacccaggctgccagagccagaaaaaacctgctatcaatttttgcatgtagagctaggactcaaatgtatcttaattttatttactcttcctaaattgtatctatatacttaaactgtytaccaaaaacgtttttgtgtatattcaacacatgcaaccagttaatatttgtgcagagcttagcatagttcattacgaacagaacattctatacaacctctagacattatgatcacttacgttattaccccaaattgaaagtataatctggtctctagcattaaactgcataggaatgagagagatgctcagtctgtaatctggagaggaaaggaaggtcaatgattctttataaaattaagtttgtacactctgcttttcaagcagcag

SEQ ID NO: 624048 - DNA, 626 bp, Homo sapiens
  misc_feature 100, 138, 150, 345: n = A,T,C or G
gttttcctacaccaataaactcttttcacgttagaaaaaccctgaaaaaaatctgtaattcccagtgcagaagataagggtcacaactcatagttggttntaataataaactaaacattatttgtcacttgggttttntcatttaccttnccactcttcaaacccaggtgttccttatggggaataaacaaagaatccatgaaaaatagataactgcattaaaaattcagggatagagccttaataacacatatatcctgggtcctaggtattacccatttcaggctttttttttccagtgtttgttttgaatctaaaattaactccttcttccatgtatgctgncccgcaaagaaacagaaaagtgaggcaataattgagaaaactaaagcaaaatgaggaattgyctctaaaataaaatttaggaacaacttactcaggtttgtttatttagtctgtttcttctttaacccactgggttatttctccattttctacttttttgcaaacaatacctaacatacaataacttttataggttttcttcatccagaacactaagccccctaatgtgcttaaactcaaaatctgtaccttcacactctatccctctgttcttctttgcc

SEQ ID NO: 624049 - DNA, 626 bp, Homo sapiens
  misc_feature 100, 138, 150, 345: n = A,T,C or G
gttttcctacaccaataaactcttttcacgttagaaaaaccctgaaaaaaatctgtaattcccagtgcagaagataagggtcacaactcatagttggttntaataataaactaaacattatttgtcacttgggttttntcatttaccttnccactcttcaaacccaggtgttccttatggggaataaacaaagaatccatgaaaaatagataactgcattaaaaattcagggatagagccttaataacacatatatcctgggtcctaggtattacccatttcaggctttttttttccagtgtttgttttgaatctaaaattaactccttcttccatgtatgctgncccgcaaagaaacagaaaagtgaggcaataattgagaaaactaaagcaaaatgaggaattgtctctaaaataaaatttaggaacaacttactcaggtttgtttatttagtctgtttcttctttaacccactgggttatttctccattttctactyttttgcaaacaatacctaacatacaataacttttataggttttcttcatccagaacactaagccccctaatgtgcttaaactcaaaatctgtaccttcacactctatccctctgttcttctttgcc

SEQ ID NO: 624050 - DNA, 626 bp, Homo sapiens
  misc_feature 100, 138, 150, 345: n = A,T,C or G
gttttcctacaccaataaactcttttcacgttagaaaaaccctgaaaaaaatctgtaattcccagtgcagaagataagggtcacaactcatagttggttntaataataaactaaacattatttgtcacttgggttttntcatttaccttnccactcttcaaacccaggtgttccttatggggaataaacaaagaatccatgaaaaatagataactgcattaaaaattcagggatagagccttaataacacatatatcctgggtcctaggtattacccatttcaggctttttttttccagtgtttgttttgaatctaaaattaactccttcttccatgtatgctgncccgcaaagaaacagaaaagtgaggcaataattgagaaaactaaagcaaaatgaggaattgtctctaaaataaaatttaggaacaacttactcaggtttgtttatttagtctgtttcttctttaacccactgggttatttctccattttctacttttttgcaaacaatacctaacatacaataacttttatakgttttcttcatccagaacactaagccccctaatgtgcttaaactcaaaatctgtaccttcacactctatccctctgttcttctttgcc

SEQ ID NO: 624051 - DNA, 544 bp, Homo sapiens
aacaatgctaagtgaaataagtcaggcatggaagataccacatgttctcccttatatatagaatctaaaacaactgaactcagaagcagagaacagaatcatcattctaccctgcggaggctggggatggggagataatggtcaaaggatacaaaatctcagatgagaggaatttctgtttctagttctatcacacagcatggtgaatatagtttatgatagaatactgtacatttacaactggatgagaaagtaattttcaaatgttcttaccacaaaagatattaagtatttgaggtgatggatatgttaactacctggatttaagtattctgcattatattcagaaatcataacaccactttttaccctacaaatttatacaattataaattgccaattaacaagtagtagtagtagcagtagattagttggtcaactttttgatcctataaagggtgaagaaacattttaagactctmcagctaccaaacccaacgctgttcctcccaaccatactttcttctccagtggtattattcaa

SEQ ID NO: 624052 - DNA, 585 bp, Homo sapiens
cttcatgatgaacttaaaaagaatagttactttaaaagatgtagaaacaacatagataaatttaaagtttttaggggaaaaaatccttaaacccacgtactaaatttttaatatttccactacagaagttaaatgcccaaactgatttggtatcaaaattaaagtgtcagaaatagaattaagttataacttttatttatcaccattttaacatatacttaaaagtggaatttattgttttgctggaatacttaataacattaatttgaaataaagcttctaaatatttccggggctrtaattccattcttacaacataatttttaaaataataaatcattccaaaaaaggatgatcataaagagattagcgtttggggtagttaacccagttcctatttatctatccattcaagaggtaactcagttttaaggatgttgttagaaacattatttcacagtgattcaaacctttcagcctatgcacaacctacaaatgcataatcgtttgaaataaaaattgcctttccatcattaaagaaaaatcatctttgttttctttttcagtccttctgaacttattacc

SEQ ID NO: 624053 - DNA, 509 bp, Homo sapiens
tgctgctctactcgctgccattcgcccgcaggtcggcgcgctcgcccacctgagccgcgccggggctgcgggaccgtgggacagcgcgctcagcccagcctaggaaagaggcagcagtctcagcgcggagatggggagcgggcgaagttgacgagtctcccgcccacgctgcgcccctcctgcccagaggtgcgctgcccctccccgaggtgctcgcgcgctgccctgaccccctcctgcgcgggacacccctcccctacccacgggacctgataacttcaccccaagtccagagagtgggctgcgagggcggtgcccggactggacaggactctgcttaaggggagcggtcctggaggctcgccaggagtcggagggcggagacccgctggaaactttatcatcgccgtaattactacgttttactgtttctctcccsgcaggggctgcagccagcggtctgtcgcgcgtgcctgtgtgcccgaggagccgccccggggagaagaccc

SEQ ID NO: 624054 - DNA, 500 bp, Homo sapiens
tccaaagtcatacgagctgccagttagctagtacaaaaatcacagttgtccgaggaaaagattttaatacgaaagatacatagatgttaagctgttggtactgaccaagagtgattacaagtgcattcagagcagaaccagtggggcagtagcagtctcagactcaggacaacatattaacagtgtgcatatccatccagtagatccatgttgtctgtatgcctaaatcacaaggtcttaattaaccgtgtaaacgagatttacgtagtctctgtctaacatcttagcacctagatgttttgaaaccgctcagtcttgcataaagcrgtggaactaaatgtgttctttaaaattccttgttgctgtgagaacccaaaagagccagcataattagctttagtgtttagtcaaaggctaatgggaagaaatggattatgattttccatcagattagttcaggcagatatattcctttgtaaaccaaaagaaaaaaaaaagaa

SEQ ID NO: 624055 - DNA, 584 bp, Homo sapiens
caaaggctaatgggaagaaatggattatgattttccatcagattagttcaggcagatatattcctttgtaaaccaaaagaaaaaaaaaagaaattatgatgctgttctaaaaactgtgctgtaaatatttggctttagagaggcaagagtggttgcccattgtaaatagggcactggactttaactttacrtatttggattcagtttcaggcaccactgtggacattttgttatcaaccagtagatctttgccttagtttttttctttaccattgtgttttcttttctttctttttggagacagagtctggctctgttgcccaggctggagtgcagtggggtgatctcagctcactccaacctctgcctcctgggttcaagcaattctcctgcctcagcctcccaagtagctgggattacaggcacgtgccaccacacccagctaatttttgtatttttagtagagacggggtttcaccatgttggccaggctggtcacgaacttgacctcaagtgatcgacctgcctggcctctcaaagtgctgggattacaggtatgagccaccatgcctgacctgttcctg

SEQ ID NO: 624056 - DNA, 615 bp, Homo sapiens
tgtggtaattggcacagtggtacctagccctttgagggtccaggattgttttaatggtgagtgatttaaaaactgagtttaaaagagcaaggaggatccaattttgcaaaatttcattaactctgcttaagaaaacagtatattatattagcttagatcaggagttgggaatcyatagcctgctaccatttattgtgtagcctgcaaatggtttttacatttttaatacattggaaaaaaaattaaagaagattattatttcgtgatgtgaaaattatacatgttgaaaggaaaactttagagtttaattgagtaaagaatgatctgtgaattaggcagcccccagaaccagagtaggtttggttacagctgagcatttgccttatttgaacctggtttgaagagttggctgcctgtggttggctgaagttcagctgctgtgattggctgagactcactacttgttacaagagtaggttacatatcaagttttacatatcaagttgaaatatagttttttatgtactgggaaacctttagggtaaacttaaaatatgtaaggaggcagctttaggccacaatgaatttaacaattcctccttttggtcaacctgt

SEQ ID NO: 624057 - DNA, 615 bp, Homo sapiens
tgtggtaattggcacagtggtacctagccctttgagggtccaggattgttttaatggtgagtgatttaaaaactgagtttaaaagagcaaggaggatccaattttgcaaaatttcattaactctgcttaagaaaacagtatattatattagcttagatcaggagttgggaatccatagcctgctaccatttattgtgtagcctgcaaatggtttttacatttttaatacattggaaaaaaaattaaagaagattattatttcgtgatgtgaaaattatacatgttgaaaggaaaactttagagtttaattgagtaaagaatgatctgtgaattaggcagcccccagaaccagagtaggkttggttacagctgagcatttgccttatttgaacctggtttgaagagttggctgcctgtggttggctgaagttcagctgctgtgattggctgagactcactacttgttacaagagtaggttacatatcaagttttacatatcaagttgaaatatagttttttatgtactgggaaacctttagggtaaacttaaaatatgtaaggaggcagctttaggccacaatgaatttaacaattcctccttttggtcaacctgt

SEQ ID NO: 624058 - DNA, 535 bp, Homo sapiens
tcaaacttgtagacatttgctctctctcttatattatataagtacctacacaatgtcctcaaatttgctttttgatctgtaaagactaagatatttatcatctagttttacagaaragtttgcagatcttctggtttaaaagagcaggagatttagtgtcaggcaggtttggattgagcccaagggctgccatttactgattgtatgactttgagcaaggtatttatcttttctaagcctcaatttcctcatctataaaatgggcacacaaatagtatttaccttggagagttaaatgggataatgcatttaatgtgcttaacacagttgcctatcagatgcttaggggctcaaaacattactattgttgttgttgttgttttaccctaaagtaaatgagacaaaatagcaaagctaaatgaggaggaatttttaagttacatcagaaactgtaatagattctaaaatattataattaagaaatttcatacttatttaaaaaggcattttcaatttaacaatttaacaatttaac

SEQ ID NO: 624059 - DNA, 529 bp, Homo sapiens
agactataaagaggatattcatggaaggttaattattatcttttgtgattttttagcttgaggtccccaatatcttcccattgrtacttttggctgctcttctgggttgacagaggtaattctgttggtttcccaggcctttactcaggcatagtgaattcaagaatctattccagtggccttcattgccgtaggagtataaagaagtacagtgtaagttccctcccagtctggcttatagagggagaaagggaagggactacttttaccagtactaggtctcctgggttgaatagagatggtcgtagttcatggggttgggcatctgacagttgtttcagttcctgttggaaataggccaaagaagttatatgtttaatcaaatcagaggtttcttggtctagtaagaaatcattggtgtgaaaatgctatccatacatcacttcaaagggactcaaacctagccttgaaggcatatttctactatgtagtagggttatggggagacaggtagtctaggggagatgag

SEQ ID NO: 624060 - DNA, 388 bp, Homo sapiens
gacctgacccttactgtggccaaattcaccaggcatctgttggaggggcaagagtgagactggggcttgtctagggtgaagatttcagggggcaagcaagagagagaaactggataggaaggatggagtggacctggaaaagcaggctggagggagctggcctccctgctggagatgcctctggggtttgtttctttagttccctgggattgcccttgcagcctcttctgagatagcaartaagaggactggatcaatcctacactgttggcaaaggtctggattaccctgcaaggtaaagaaagcctgcacatatggggcctcaggccatttgccctcacatctacagaaaaggtcttactgcatagaaatgagtggttccttcctg

SEQ ID NO: 624061 - DNA, 596 bp, Homo sapiens
gatcatgtgatttttgtttttaattctgtttatgtggtgtatcacatttattgacttgtgtatgttaaaccaatcctgcatcctaggtatgaaatccacttgatcttggagtattatctttttgatatgccgttgaatttggttggctagtattttgttgaagagttttcatctatgttcatcagggatattggtctgtagttttgttgttgttatgtcttttcttgcttttggtattaggttaatactggcttcatagaatgatttagggaggattccctctttctctgtttttttggaatagtttcagtaggattggtaccaattcttctttgaatgtctgatagaattcagctgtgaatccatctgatcctggacttttttttttttggcaatatttttactaccatttcaatcttgctacttgttattggtctgttcagagtttttatttcttcctggtttaatctaggaaggctgtatatttccaggaatttatccataacctctaggttttctagtttgtgtgcatraagttgttcatagtaatcttgaataattttttgtatttatgtggtattggttgtaatatctcc

SEQ ID NO: 624062 - DNA, 512 bp, Homo sapiens
atgaagccagaaaccatcattctcagcaaactatcacaggaacagaaaatcagtcactatatgttctcactcataagcgggagttgaacaatgagaacatatgggcacagggtggggaacatcccacactggggccttttgtgtgggttgggggaagaggagggatagcatcaggagaaatacctaatgtagatgatgggttgatgggtgcagcaaaccaccatggcacatgtatacctgtgcaacaaatctgcatgttctgtacacgtatcccataactwaaagtttaaaaaaaacccaaacactgtggaaaaaagttgacattaactagaagagttgaatagttttataaagcattttactataaacatgcaaggcccaagctgcactttcattaatacgcttaggaatttcgtctgctaaatatctaaattttattgcttgtaaattttactttccacaaaacactagaacataaacacaattcagccaaattatttgctactttctaa

SEQ ID NO: 624063 - DNA, 580 bp, Homo sapiens
ccacatgtcaagggagagacctggtgagaggtgattggatcacgggggcagtgtctcccatgctgttcttgtgatagtgagttctcatgagatctgatggtttcataaatgtctgacagttccttctctacactcttgcctgttaacatatgagacatacctcttccccttccaccctgattgtaagwttcctgaggcctccccagccatgagaactgtaagtcaactaaatgtcttctctttataaattccccagtcttgggcagttctttctagcaatgtgagaacggactaatagattattttggacaaatattttaaggccttttgagatttcatcttactgaatccattttacttaatacttaaaattgtttataatatatagttgtcatccttttactaaacgtgtgaataagaatgtagtttagatttaaaattaaaatcttttaggatggagtacatttaaaaaaacactcattttaacctgaattttcaacagtcttttgacaaattcaatttttagagaggatggaaaaatatgcataagtcagacccaaaagtaaataatataaatagt

SEQ ID NO: 624064 - DNA, 585 bp, Homo sapiens
tgtatatgaaaagggatggcaattgttaaagtcaaaattaatgacttttgcttctgggtcagataaagtamcaccgactagattaaccttcgcacctcaaacaactaaaaagacatacaaaatgaaaaacaggtttcatacattgtgcgtcaagcagtgtaaggacattgatccctaagagagggaagacaaatgaggtgagccctctgattgtgccagctttctgcctggagaagtgtcagcctgaaatgcagcgagtgagggaactcaggtaaagcctgggaaaataagccaatataaccaacagaaaacaagtggcaagatgataagagtcaaatccaaccatatcattaatcacattaaatgtaaatcatctaatcatctcaattgaaaggcagagattgtcagactggattaaaaaaaaccaagacgcaactatgtgctgtttagaaaaaccctactttgaatataaagaaaaacaataagttgaaattaagagtatggaaaaagatatgccattcactcactaatcataagaaagctggagtctctatattaatattaggcaaagtagatttcagaaca

SEQ ID NO: 624065 - DNA, 595 bp, Homo sapiens
ttgctgctttgttgcactggactttcaggctaatcttgcaccaataaattaaaaatagtagagtattaaaaattctggaaatctgtctttttgcacaagattattgaccagtgtaaagcagattttctttccttaattcatccccttccccactaagccttgtgatttaacctgaggacctgctttcagttctttcctgcattagcccttcctctttccttccctcgattatggatagattaaccaatagagcaaaactctagcaggmgacatagtgtccctcaaggaaaaacaatgatggaaggcatgtatacagtgatgggaagtttcactggaattaagctccatcacccaatttgaagatcagcttccagagttttgttaacactcaatgtgaaaaataattccttctgcttcctgccactgcagtcctgcactttttagtgtccagagaaaggtagcgaaaaaacaaaaacaaaactgctaatttttttgactgatggagttcttgtcaggggagtgcagtattaagttttgaaaggtgatcacaaaggtgaaaacacaatgctcaaatttatacagactggactgggtt

SEQ ID NO: 624066 - DNA, 595 bp, Homo sapiens
ttttgggcattaaaaatgagtattttattcacaccattttctcttagattataaatttcaaaatgatcaattttatcaggctaaaatctcatgatttayggtctgaaacacatgcctaacttcaaatggagttttaacttgtaaaaaggccttttgcagttatagttctgcatgatatttaagtagcattttaaagctatttgtattcttccacttcaccttttccaactcattaacatggatagaaagtattaatataggaacatttctaatgtcatgcaaaaagaaatgatgacctttttaaacagattgaattttaaatgaattgtcaacagcagaatggactaaatgtattaacatctagagtcctgtagaaattaaaactgaattaaatcaaacctgtaacacaaacgtgtttacccatggtgccaagcttttaagtaatggaacactgagagaattctacagtcagggttatcaggtctcatgactcagccataaaatttgaatgtaagtgactttcttgaaggattcaataaactctttgagatgagttttattaggaaatttagccattaaaaggaaaacaaacaaa

SEQ ID NO: 624067 - DNA, 359 bp, Homo sapiens
ggacaacaataaaaatgaatttttggccrggcatggtggctcacgcctgtaatcccaacactttgggaggccgaggtgggcagatcacctgaggtcaggagttcgaggccagcctggccaacatggtcaaaccccatctctactaaaaaactgtgcgtggtggcacatgcctatagtcccagctactcggaaggcttaggcaggaaaaccgcttgaacctgggagggagagattacagtgagccaagatcgtgccactgcattccagcctgggcaatagagtgagactatctcaaaaaaaaaaaaaaaaaagaattctcttaaaaaataacattccccttattttgtccccttattttg

SEQ ID NO: 624068 - DNA, 553 bp, Homo sapiens
ctcttagttcacttgttcttatttatgtttcaagatgattaagcaaattatgtggaaccccagaattttttatttcgacaaagtgttttgtatatatgctttataagtactgttttttaacttttatgtgctcatatcttttatttactaaaacaactctttaatatagacaatgtaagattgaacaataattgagtccctttattcctgattatgaaagttgtaatagaaagttatggtcaccagacaatgcttaacaaacttgaatatcaaattttattttagatactaatttaaagcatcgattttaaaatattgattgcaaacttttacaattttgaaggttcatagacttaygttaaaatcatctcttatttcaataatatagtttgagagaaaaagcctttagaaattctgtaaaccagcatgattgtccttagtttctttccttaataaatgattcatttgattatatatgtaaatgatattttcaacatacttttcactttggcattcttttaagaagagatatagcttttaaaatgagtgttag

SEQ ID NO: 624069 - DNA, 570 bp, Homo sapiens
agaatcattaaaatatggagggtggtgaaagcagtggaaaattatcatcaaaggtaactgagaagaataggaaagattagtgtwaaagaagcaaagtgagtttcagaaaaaaaaggaaaaggcaacaggaaaacatattacagaaaatccaaggtctttaatatgccacaaaaatgactgcatctctagaagtcaagagtttaatgtataaatgacgtgttatattaagcacaaacaaaatgctgctgagaaaccaagtccatgaatcttagctcttaggaaattagcagaagtactgaggaatgtatttttaccagaataatgaaaggcaaaggtctttagcaatgtattgacaaataaatataaaataagcattaaggttagagttagggttagggttaattagaagactgcagaatcatagaatgttgttacatgttgaaaattcatgaaaaaggggcactgaaagacagtgatgggagggaaaaataatttacttgaataaagttagggttaagattgggaaaaagagtatctgacaaagtggatttcctttgggaattagcaaaa

SEQ ID NO: 624070 - DNA, 606 bp, Homo sapiens
gtgttatattaagcacaaacaaaatgctgctgagaaaccaagtccatgaatcttagctcttaggaaattagcagaagtactgaggaatgtatttttaccagaataatgaaaggcaaaggtctttagcaatgtattgacaaataaatataaaataagcattaaggttagagttagggttagggttaattagaagactgcagaatcatagaatgttgttacatgttgaaaattcatgaaaaaggggcactgaaagacagtgatgggagggaaaaataatttacttgaataaagttagggttaagattgggaaaaagagtatctgacaaagtggatttcctttgggaattagcaaaatatgtgatctgctaatagttaagaggagtggctgaagggcttctgaagactggtgatgactgagaatttgctatggagaatctgaaagggtgctaagtggaaacaaacaaaaraattaccaacgtacatcaacaattcaactggatgtttgaaagagtttggaaattatgtataattgtgtctggcaattccatttgccaattttcagtgacgcttgatagatatatataagggtaaagaagcatgaaattt

SEQ ID NO: 624071 - DNA, 604 bp, Homo sapiens
gttatattaagcacaaacaaaatgctgctgagaaaccaagtccatgaatcttagctcttatgaaattagcagaagtactgaggaatgtatttttaccagaataatgaaaggcaaaggtctttagcaatgtattgacaaataaatataaaataagcattaaagttagagttagggttagggttaattagaagactgcagaatcatagaatgttgttacatgttgaaaattcatgaaaaaggggcactgaaagacagtgatgggagggaaaaataatttacttgaataaagttagggttaagattgggaaaaagagtatctgacaaagtggatttcctttgggaattagcaaaatatgtgatctgctaatagttaagaggagtggctgaagggcttctgaagactggtgatgactgagaatttgctatggagaatctgaaagggtgctaagtggaaacaaacaaaagaattaccaacgtacatcaacaattcaactggatgtttgaaagagtttggaaattatgtataattgtgtctggcaattccatttgccaattttcagtgaygcttgatagatatatataagggtaaagaagcatgaaattt

SEQ ID NO: 624072 - DNA, 596 bp, Homo sapiens
gcaatacatgcctataataaaacagaaagttctcaaatcaatgacctcaggttacaaattaagaagttgaaaaaaaagaacaaattaaatattatcactttaaaaattcgtagttacaataaatgaaataaataataagttacaataaatgaatagataataatagagtaaaattaacamaacagtagttcttagagaagatcaataaaatttataagccttctgtgagacttgtaatgaaagaaaaggaaagataaaaactaccagtaacagaagtgaaagaaatgacatccttatagattctagagacatttaaaggaaaataagagaatatcataaacaatgctgtgtctgtaaattgaaaacagaaaacgtggacaaattcattgaaaaacaaacaaccattctcaacaggaagaaaatgatcatttgtacagtcctatatcattaaaaaaatgagcttttagttaaacattttctcaaaaaataagtcaagatggcttcaatagtgaattctatcaaacacttaaaatagaagtaatgctaattctacaccaattcttccaaaaagttgaagtagggcaagaaacacccat

SEQ ID NO: 624073 - DNA, 583 bp, Homo sapiens
gctatttaatagtgaaataaaacatggcagtaaacatgattgcagggagtaagggtaccatcacaaatatatgcaaagcaaataatattccaatatcagttttgttacctgaggctatgttctaaacatgagataaactcctggtttaatgtaattataaattatggtatttartgatatggaatatgatatgaaaacatgagcaattacattttagcagtctaagaaaatatctgaggatccagaaatttcagaatgagggaaatgctactgttttaagaactaactcactttacaaaagctgaaatattgctctaatataacaatctctaaagtatgttgagatgaaattagataacttcctgaacaaggactacttggccaaataaatatgcaaacattggattgaaaaagtttagcttcttcactgcagcactcctcagagtctttaaatggtaattagggatgtgactctatgaaaggggaacactgaagaaagcattttgtaaacttaattgagtacaggggccctctcactctttcttttccaatagaacactctgtgaaataagtgttccaaata

SEQ ID NO: 624074 - DNA, 521 bp, Homo sapiens
taaggtgctctttatttaaagaagggaatgacaggttaggtcttatgcctcacagggcctgtattatacatattcagcatgttttgggggaaaagctatatgtatttatgagagggcatgcccagtgggtaaacatgtgtataacatacatcccatgttcactctgacgtgaggttttagcattgaaatgacatggaattcagctctttatgtcaaaaggtgaactgtagtacacaaagacagtttgtgtgcagwccctataagctggctgaaactggcttaagttctgcaatagctaatcagaaaagaatatttgtaaagtcagtcctctgtcctgcagagttgtggtggtttgggctgtaaatcagcctgagagctctgttgttaagaagtttagctgaggtgtagttttccttatagtggtaggaatttggaaatttgccatgccatctgggtcctgaacactggactcctaagtaacttttgtttccttagccttaggcccatcttgtttgataaat

SEQ ID NO: 624075 - DNA, 521 bp, Homo sapiens
taaggtgctctttatttaaagaagggaatgacaggttaggtcttatgcctcacagggcctgtattatacatattcagcatgttttgggggaaaagctatatgtatttatgagagggcatgcccagtgggtaaacatgtgtataacatacatcccatgttcactctgacgtgaggttttagcattgaaatgacatggaattcagctctttatgtcaaaaggtgaactgtagtacacaaagacagtttgtgtgcagtccctataagctggctgaaactggcttaagttctgcaatagctaatcagaaaagaatatttgtaaagtcagtcctctgtcctgcagagytgtggtggtttgggctgtaaatcagcctgagagctctgttgttaagaagtttagctgaggtgtagttttccttatagtggtaggaatttggaaatttgccatgccatctgggtcctgaacactggactcctaagtaacttttgtttccttagccttaggcccatcttgtttgataaat

SEQ ID NO: 624076 - DNA, 591 bp, Homo sapiens
aaaacataattaatgttatttatgttaacttttctgccacattttacatcttgaaattctaaaaaatgcaaatctgcttgcaaaatgaactgggtctggatctgaattggctgaagctatttaagtcttctaaccacagtttcataatctgaaacatgtgaatatgtacaaaatgattttgattagagatgatatgtataaaatacttagtatacattaacaaaatatatggatcacatattgatttgctgtacacctgcactgaattaaccaggtttcaataatggcttgggcacaataytaggaaaagtctcttccaatagaaatgtattaggttggtgcaaaagcaattatggtttttgccattaaaaataatgccattaaaagcaattaatggcaattgcttttccaccaacctagtattattggttaaccagaagttacgtagcccatgcagaatcaatgccagcaaaatgttaaaccaccctttaatattcccctgttgacaaaataaataaataaaggcagcaagcgatagaaaagctgtgggtataaggcttgctgataatctgggctggtgagaacatagac

SEQ ID NO: 624077 - DNA, 624 bp, Homo sapiens
gacaaaagaattattattgccttggggaaaatttccagcctgttggtctccattcacacactgtagtcttttatttatttatttatttatttatttatttatttatttatttatttattttttaagatggagtcttgctatgtcgcccaggctggaatgcaatggaacgatctcggctcactgcaacctccacctcctgggttcaagcgattctcctgcctcagcctcccgagtagctgagattacaggcacatgttaccatgcccagctaatttttgtatttttagtagagatgrggtttcaccacattggtcaggctggtctcgaaatcttgacctcatgatccacccgcctcagcctcccaaagtgctgggattacagatgtgagccaccacacccagacacactatagtcttttcaaaacaaatagagtgtcaagggtcaataaaacacctttaatttgaacatggctaattttaaatctctagtacttttgggaggtgaagtattaaagttttcattatatttgattatttatcttaaaaatacaggttagaattgtaaaataaattttttgatgagtaacgagaaacaggatataaaatcctaaactaatatatgctt

SEQ ID NO: 624078 - DNA, 623 bp, Homo sapiens
agccaccacacccagacacactatagtcttttcaaaacaaatagagtgtcaagggtcaataaaacacctttaatttgaacatggctaattttaaatctctagtacttttgggaggtgaagtattaaagttttcattatatttgattatttatcttaaaaatacaggttagaattgtaaaataaattttttgatgrgtaacgagaaacaggatataaaatcctaaactaatatatgcttcaataatgttgatgcactcctctctttatattctataaagaggtaagcaagtattgccactattgtattttatactatttctttctttcatagttcagacaccaggattgccacatatggttgtgagagttgtgtcttgtgcaactctagggggtaacatttacaccatagtttgtgaatagtactacctaggaccatgaatacaactttcctatttctaatccttctcagtatgttacttcaaaatgataacactgttttattttcctaaattggcttattctcaccttcaattcaattgaattaataagttttactaatgcttaattattaactcatgactgaaacatagtacattgtctcataattagaaattatgaagtgt

SEQ ID NO: 624079 - DNA, 665 bp, Homo sapiens
cagtaagcacaaagccacatgtatttatgtaattattasttgctcagaaatatttcctgtattgctatagtgctatagcactatgataatagtctgattttcttggaagacatctgtaatcatctatggagtatttcttcttatctgataagttgtaatagataatacagatctattagaacaaaactaaaattcttattagttcttagaatagaataatagtaagaatcatgattattattattgaaatccaggactactgtatcattgctaattgattgacataacttggaagacagataaaagaagcagttggcataataatcatatgtcaacactgacctgcaaatagcttttagatgaatgtgactcaaaaagactcatgattactggagattgagcagaaaaggtgcccagtaatcagaatctgttaagtaaggtttataatttttatctgagataagaattggaaataggtgaatagatcatactaattaacacaacaaatatttctggacaccaaatatatgccaggcacaattctagcaatgtatggtacatgagccactgacctagtagaatttaagaaccagaaaaactatttctaaaatgtaaaagataaagattataaagacttatttgagagctactggaaatgggaaacc

SEQ ID NO: 624080 - DNA, 610 bp, Homo sapiens
attgtaccaaaaatataacttctatctcatctttagtatttttgttgttattgttgttcccttctcattcactccacgccagtctttctacgtagtgtatgtaaggatgcatatataacaatgccttaaaatacaagtacaaatggcttactggatggtctgtactcaatgtgatacaaataggacttggctttatttttcttaacaactgtcattctccccttcttattcttaatttcagcttgaacaaataacatagttttctactccttcttctataagaagagtctcaatttaggcatttgaggttttaagaagcccacttatttccaatttataattgccatttcaaatctaatacaaaactcttctcctcccacaggcttagaacaaattacagcttggggagtagcagtgggaagagggcatgttatactcattcatctccttgtacagtctccagcttttagtgctccaagagctttgtgaaaaggtcatgaagaatgagactggtaggtgatgtgaacatagagcaagagaggcgtaacactggtcctgtaataatctrgttggccttgttggtttgagtcttaatttcaaatattttccc

SEQ ID NO: 624081 - DNA, 637 bp, Homo sapiens
aagggatacttaagctcaaaacaattaacaggtttctaaggcaatataaatattaatgtttggaagaaaatacttgaaattcattatttttttctttcttttatttttgtcaatcctctaaagaattctcagaagccacagagctccaaacagggttatttraaaaccacaggtggaatctaagcctcattttaccagtgaggatactaaaggccagcatggttacttaaactacccgaggtcaggcaacaaaaaaggcctgatcagatgcctcctcatcaaggatattatcaaaatatgcaggcccagatgctgtaagttttctcatgctgtattgaagggcactaaataagtaacttgcaggtggcatggtttgtgtaattagtattaggcttctctgtatttagagaatcatataatgcctatttatggttacatagacaactctggacttattaccattcagcaagcacttgccaatattgcttttagtggtaacacaggtgcaatttttcctgcacattcttagatactcattaattcaataatatattcataaggctgttctatttggggacctcttgttttcactttcttattttcatggcagaaacatattacacccattcgtgaaatc

SEQ ID NO: 624082 - DNA, 620 bp, Homo sapiens
aggtttcttctcattttgaaagtgatctctaagtgatcagtgatctacttgaccacggaaaatacaaattacacaatatcttaagaagccaaaatccagcagcccaattcttcatgctgtcactagtcacatggcattccacagcaccccaaaactattctaacttctaactgtaactttattgttgttattattattttttggaatacgggttttgagagtcttaagcttccataaaaccactaggatcaggttagcttcctggctcagacatttctttttattttccttctttttttctgcctctccctatcatgcacttagagaaaacctctccttaaacagtacaatagtcagaaatgctcattcattcatatatttataatcctaaaaatgagsctaatttaaactaaaaacattcagtcgatttattttaaaattcctaattatgtttaataaatgaatgggatagttttatacactgagatctacaaaaattatgtatatttttaactgagataaatttaaaaaaatagaattatggtagtttcctttataattttaaaattatcttgttcatttaaagtcatacaaatataacaagacacatgaaattacaa

SEQ ID NO: 624083 - DNA, 617 bp, Homo sapiens
cctgttttttctcaggacaaagtggtttatttgtatctactagattgcctatctagctgaaacattttgaagagtacaaatgtcttttcactaaatgaaccactagatggtagtgtaaactcttctgatggtggactgttcaattgagccaaggtgaattctggtttgtgtattgcacatttatcttataatgctgtagaytgctattctctatgtataagttgagctttatgcccatcttgaagaaactgttttacattattttacaagcaggatacattttgttatttggtatatctttttttcatttgtgtgaaagagagatttagaaaaacaaacttaagtcttagtgcagtggctcacacctgtaatcccagcactttaagaggccgaggcaggaggatcacttgagtccaggagctcaagaccaacttgggcaagaatagggagatccctgtctctacaaaaaattaaaaacaaacaggctgggtgcagtggctcacacttgtaatcccagcactttgggaggccaagacaggtgggtcacctgaggtcaggagtttgagactagcctggccaacatgatgaaaccctgtctctactaaaaatacaaaaat

SEQ ID NO: 624084 - DNA, 617 bp, Homo sapiens
cctgttttttctcaggacaaagtggtttatttgtatctactagattgcctatctagctgaaacattttgaagagtacaaatgtcttttcactaaatgaaccactagatggtagtgtaaactcttctgatggtggactgttcaattgagccaaggtgaattctggtttgtgtattgcacatttatcttataatgctgtagactgctattctctatgtataagttgagctttatgcccatcttgaagaaactgttttacattattttacaagcaggatacattttgttatttggtatatctttttttcatttgtgtgaaagagagatttagaaaaacaaacttaagtcttagtgcagtggctcacacctgtaatcccagcactttaagaggccgaggcaggaggatcacttgagtccaggagctcaagaccaacttgggcaagaatagggagatccctgtctctacaaaaaattaaaaacaaacaggctgggtgcagtggctcacacttgtaatcccagcactttgggaggccaagacaggtgggtcacctgaggtcaggagttygagactagcctggccaacatgatgaaaccctgtctctactaaaaatacaaaaat

SEQ ID NO: 624085 - DNA, 569 bp, Homo sapiens
gggattaatacccaaatcatgtagtgctggggacataaaggaaagtgctaggactaggaattaggcctggatttagccttcattttattaaagactagttctgggtctttggaagtaacttacctctttagacttcagttttctcatctgtgaaatgaggtaaatgggctagctggtcactagtagtgtggacttcaactggagtcactgcccagtttacagcgagtcccctttctgcaggaacagcttgcttcacaagcgtggcaccccagtagccatgtctgattgatctagtggaagtcatttgttacaagacgagtccatcaaaactcttctctaggatttttgagtttgaaccacagagaatatgagcagttcttctcttatggtgggaacatgtgagaagtgaaacttggtagccactggtaaccatatcaccagtttagtgaggctctagtgtagagaggaaaagtatgggattccctgtgatatgggttagtgggggagtaatcacataaaagaagagctamctctaatgtcatatggtatcctggattcttccctggaac

SEQ ID NO: 624086 - DNA, 449 bp, Homo sapiens
gaaaaaaataaaatgaggaaaaaaacagagcataaaagatacaagttcctgttaaaaatgtctaataaatgtttaattgttgtctcaaaagaagagaaagtatcacaacttaaattattaaatttaataaaacacatcaaaccaatccctcaataacttcagtrggataaaagtaataaaagccacacctacttaaacacattatagtcatactcccaaaaccacacctacctaaacacattataaacatactcccaaaactcaaacacagagaaaattttaaaagcagctagacaaaaaagtatgttcctttaaaaggagcagcaataggatggatgactttcagaacaaaaatctgcctagacaaaaggagtgctatcagcaagatgggtaattagaaagacctgccacacatttctccttataaaaaaggaccaagtaagtaaatt

SEQ ID NO: 624087 - DNA, 584 bp, Homo sapiens
gacagagtgaattttttaaaagatgcaaccagatgtaatctacaaaaaacacactttagtttcaaagattaataggttgaaagtaaaacaatgggaaaatatgtaccatacaaacagtaaccacaagacagctgaagtggytgtactaatagcagacaaaatagactttaagacaaaagtgctattgaacacaaaaggaacattttataatgataaagtgtccatctattaggaaggtatgttttataaacctatgttcatctaacaatagcaccccaaaaacacaggaggcaaaaattgacagtattgaaggtggacataaataattcaatgataatattatagttggagactacaatatctcactttccataattggtagaacaactagacagaagttcaatcaggaaacagcttgaaaaatgctataaaccaactagatttaacagatatctatggaacactccattcaacaagaggagaattcttctcatgcacacatggaacatttccccaggataggacagactatgtgctatgccctaaaacatgcctcgataaaagtaaaaggattaaaatcacac

SEQ ID NO: 624088 - DNA, 584 bp, Homo sapiens
gacagagtgaattttttaaaagatgcaaccagatgtaatctacaaaaaacacactttagtttcaaagattaataggttgaaagtaaaacaatgggaaaatatgtaccatacaaacagtaaccacaagacagctgaagtggctgtactaatagcagacaaaatagactttaagacaaaagtgctattgaacacaaaaggaacattttataatgataaagtgtccatctattaggaaggtatgttttataaacctatgttcatctaacaatagcaccccaaaaacacaggaggcaaaaattgacagtattgaaggtggacataaataattcaatgataatattatagttggagactacaatatctcactttccataattggtagaacaactagacagaagttcaatcaggaaacagcttgaaaaatgctataaaccaactagatttaacagatatctatggaacactccattcaacaagaggagaattcttctcatgcacacatggaacatttccccaggataggacagactatgtgytatgccctaaaacatgcctcgataaaagtaaaaggattaaaatcacac

SEQ ID NO: 624089 - DNA, 524 bp, Homo sapiens
cccagtttaaaaaaaaaaaaaagactctttgcccggttaacttttttcattgaaattactaacctttaagtgagctgttgttacttgcttctggaagatacrggaagaatggggtcagtgaggaatctaaaggaagggagggaagccttctgtgtatgtctcctttttaacccaaagctgttcgttgtcattcttttgaccatttattcattcattcactcattttcctgtttgtttctattctgattctatccaaaaaaagtttgacaaaatgtgcagtaaagagcttatatattgtacataaaatataagtcaagtcaggttttagagaaggaggaaacagagattccatccacgaattgtcatatgaaatctgtgtcaaatatccagttttactctgatctttctagcaaccaggatttaaaaaggaatacacaatttctattatcagaaaggaaaaaaaaatccaggttcttcaagagactaagcgttgctattctgtggcacatgcaattagcaaacac

SEQ ID NO: 624090 - DNA, 524 bp, Homo sapiens
cccagtttaaaaaaaaaaaaaagactctttgcccggttaacttttttcattgaaattactaacctttaagtgagctgttgttacttgcttctggaagatacaggaagaatggggtcagtgaggaatctaaaggaagggagggaagccttctgtgtatgtctcctttttaacccaaagctgttcgttgtcattcttttgaccatttattcattcattcactcattttcctgtttgtttctattctgattctatccaaaaaaagtttgacaaaatgtgcagtaaagagcttatatattgtacataaaatataagtcaagtcaggttttagagaaggaggaaacagagattccatccacgaattgtcatatgaaatctgtgtcaaatatccagttttactctgatctttctagcaaccaggatttaaaaaggaatacacaatttctattatcagaaaggaaaaaaaaatccaggttcttcaagagactaagygttgctattctgtggcacatgcaattagcaaacac

SEQ ID NO: 624091 - DNA, 431 bp, Homo sapiens
gtgttcgacacttctttttttttttttttttttttgagacagagtctcactctcgcccaggctggagtgcaatggcgtaatctcactcactgcaacctccacctcccaggttcaagcaattctcctgcctcagcctcctgagtagctgggattataggcatgcaccaccacacccagctaatttttgtatttttagtagagacagggtttcaccatgttagccaggctggtcttgaactcctgacctcaggtgatccacctgcctcggcctcctaaagtcctgggattacaggcgtgagcaaccrtgcctggcctagaagtgcttttatttatcattcaccctcacatcatattggaggaagaggaaggaatctttcctttttcccaatttactgtgtcagggagaagttacgtaaccagccaaaggccac

SEQ ID NO: 624092 - DNA, 595 bp, Homo sapiens
atgttgcccaggctggagtgtcagatttattaactcaacaacttagtttgctctgaggaaaaggaggttatgacggagggtagggatgggaagagaacagaacgaacaggcattttcagatgtggcagacccgtgaggctttgccctgacccagggaaacatccacacaccagctcacaggcatcttctgggatcaggaaagggggcacgaggaagtagatgggggaggtggagccattctaagccaacacttctgccttgacattttcmtaggtccttggtggctgccattcctgctccaacaccacaggaaagtgtgcacaatgattattttctataagcagagaaaatattctttaagtttcagtgactgacatggagcttcctcaagttcactgagaaggaggtgtctgagcaaaggtgagaaagggagtgagtggtgtggctctctagggataagctttccaggaaaagacaacacgagtagacaccctgcggggagcaagcttggtgagttagggaggacataagaaatgggaagattgggcttggaaggaaggtcagatcttgaagagtcctggatgtgatggtcagg

SEQ ID NO: 624093 - DNA, 334 bp, Homo sapiens
gtggagccattctaagccaacacttctgccttgacattttcataggtccttggtggctgccattcctgctccaacaccacaggaaagtgtgcacaatgattattttstataagcagagaaaatattctttaagtttcagtgactgacatggagcttcctcaagttcactgagaaggaggtgtctgagcaaaggtgagaaagggagtgagtggtgtggctctctagggataagctttccaggaaaagacaacacgagtagacaccctgcggggagcaagcttggtgagttagggaggacataagaaatgggaagattgggcttggaaggaaggtc

SEQ ID NO: 624094 - DNA, 595 bp, Homo sapiens
atgttgcccaggctggagtgtcagatttattaactcaacaacttagtttgctctgaggaaaaggaggttatgacggagggtagggatgggaagagaacagaacgaacaggcattttcagatgtggcagacccgtgaggctttgccctgacccagggaaacatccacacaccagctcacaggcatcttctgggatcaggaaagggggcacgaggaagtagatgggggaggtggagccattctaagccaacacttctgccttgacattttcataggtccttggtggctgccattcctgctccaacaccacaggaaagtgtgcacaatgattattttctataagcagagaaaatattctttaagtttcagtgactgacatggagcttcctcaagttcactgagaaggaggtgtctgagcaaaggtgagaaagggagtgagtggtgtggctctctaggkataagctttccaggaaaagacaacacgagtagacaccctgcggggagcaagcttggtgagttagggaggacataagaaatgggaagattgggcttggaaggaaggtcagatcttgaagagtcctggatgtgatggtcagg

SEQ ID NO: 624095 - DNA, 560 bp, Homo sapiens
tataaatatcagactgtccttaattgaaattttgtctttggtttccaacaccatgatgaagctcttgctttttaaaaagtagttagtaaattctgcatgaattttagtaaactttaaaaaatagattttttccctaagaaagaatgtttgtagaatttaaagtggacagatgcctgttggrgtaaaatcaactgcaactttttgatgttaatttttttccctgtgcaattataaactataagcaagttaagtgacaagcaaatgtaataaagactagttttaatatggtggtttttattaccttctgttactggatgtcagattctgagtcatctcttaaaaaaacaatgtatagttcacccactgactctagagcgcttgtgaacaagccattttgggagacctaaaggataacatgtcagcattcttctatgtaagtcgtcaaatgaaatctgttccaggcaaggggagctggaaacataagatgaagttcaaaatttttaaagtaacaaaactggagtcaggcagtagatgaatgcctaaactctcacagatttaac

SEQ ID NO: 624096 - DNA, 610 bp, Homo sapiens
gtgttgctaaatcagttctctttctgtcccatgtttacatggcctgttctaaacactggtgagaactgacccagtatagacaggcactccaacttccccttcctgacattttctagtaatttaatagttgaatatcttcttgggaggctgaggcaggagaatggcatgaacccaggaggcagagcttgcaaccgtctcaaaataataataattaataataataattctcttcattatctattgtttttctgacctaaatctctactaatgaagcaaatcaaaccatccctaaactacctaaagaataattaagtaataattgggtgtgtctcactcatcacaaatgtgtttgcttttcgaagtctatgggtcccctaatgagtggcacacgctggaaatctgattgctctgggaaaatctgtgatacccccacccctccatctcaggaatacagggtgagcagtgatattccagagaagagctgatctgggactattttaaggtctccctaagttaggacctctgagaccaacagtaagcccagagagcrcaagctgatgccaaatttctatggatctggaactttctattccatacttaaaagttacag

SEQ ID NO: 624097 - DNA, 497 bp, Homo sapiens
actcattcaaactcagtaaatcacaagaaaaagaaagaaaaatggggaggagggaatgggatcaatattctaaaagtctaggattctagtttagtttaattttatagttatatgatgaagaagagaggagaagcctggctagaaaggtggatgtttgtcactcaattaatgtttttttgcttttacccaattcatgttcttgaagctgctacatttactgacctacaataagtgtacagaggatgaactatattgataatcctgtttattgaccagattgaatactcaggtttgatttttgcatttttggatatgttttaaaggtagaagatcttaaattcatattcaaaatacctttyatcctgcctttcacttaaggaaaattatctggaaattgaaagtcctccaggcaaaggtctggctgtgatattacttctgggcgacacttctcacaagagggaagataagtaaattgctctgactgctttttattcttg

SEQ ID NO: 624098 - DNA, 607 bp, Homo sapiens
taaggttgtactttaagtatttttctctctcaggaatgcatagcttttggcattatgaatgyttagaagtgatttgcttctccattcataaagttcacttaactgatgtacaacatctgtttccaagagggatcctaaaagtcactgtgcacacggaggcaggtatacatttgcatttgataagcagaaccatgtttgcttctaagaaatgtgataaagaagaaaactcagaaatttatcttggggggcatcctaattatgtttaatttctagaggaacacacattctgtgggagtctctaactccagcccatttgtaaatggcttagtttgtccttgcagaaggcaggcatctaacaacaaaatggaacatgatggtgcaagtcaccatttggcttacaaatgagcaattgccattctgtcctaacaagtaaagctgatcaactgaaaaaccaacaactctctttagatgcatcagagaaaggtatacactgtctcagacattggagagacagcaggtagactcagacaatcacaacttaccagagcaaaagcccagtagcagaaacctctgctagaaccagtcagtggaaggttaagaaaatctg

SEQ ID NO: 624099 - DNA, 607 bp, Homo sapiens
taaggttgtactttaagtatttttctctctcaggaatgcatagcttttggcattatgaatgcttagaagtgatttgcttctccattcataaagttcacttaactgatgtacaacatctgtttccaagagggatcctaaaagtcactgtgcacacggaggcaggtatacatttgcatttgataagcagaaccatgtttgyttctaagaaatgtgataaagaagaaaactcagaaatttatcttggggggcatcctaattatgtttaatttctagaggaacacacattctgtgggagtctctaactccagcccatttgtaaatggcttagtttgtccttgcagaaggcaggcatctaacaacaaaatggaacatgatggtgcaagtcaccatttggcttacaaatgagcaattgccattctgtcctaacaagtaaagctgatcaactgaaaaaccaacaactctctttagatgcatcagagaaaggtatacactgtctcagacattggagagacagcaggtagactcagacaatcacaacttaccagagcaaaagcccagtagcagaaacctctgctagaaccagtcagtggaaggttaagaaaatctg

SEQ ID NO: 624100 - DNA, 609 bp, Homo sapiens
cttttcaggcccatgaggaaccccaagggccttggattcctgaacaccatggcaccagctgtcttagctccaccaagaagggaagccaggctctcttgcaaccacagtgttgagaagcagacagactacaggcctcactttcaccaacaccttgctgggcaaagcccactggcctgggaccccgacacagccaccccacctccacctgggcactagggccagtagccactctgcatttctctgggatgctgatcccagaggtaaccaacaggcctgccctttttgacactgctgcagcccccaccccttctgccctcaggctgcagttagagcaaagrgtctaagacttgcaggcctccagcataccacagttgccttatggaaaagtggccagacttccacaggggtccctgtccctgctactcctcactgagcagtgcctcctgacctgggtgtacagaacagcctccttgtcccaacctgggcacttaggttggtggtggctctgcatttctctggggaggaaatcccagagacaacctagaatctcagccatgctgctacagaggaactacccttgctacccttgggctggaaagagaataaaga

SEQ ID NO: 624101 - DNA, 576 bp, Homo sapiens
tagatctcaaaaacttatttctcatatcagtgcatgggtggttcggtggtagaattctcatctgccaaaaatttatttctcctgtctaactgaaactttgttcccttcgaccgatatctctctatttcccttccctcccaacctctggtaactaccaatctactctgtgtttttatgagtttractgtttaactcatccaaataacagaattatctttttttaaggctgagtagcattccattgtgtatatataccacattttctttatccattcattcactgctggatacttaggttgtttctatatcttgacaattgtgagtaatgctgcagtgaacataggagtgcaggtctctctttgacatactgatttcaaatcctttggatatgtacccagaagtaggatacctggctcatgtggtaattttatttttagtattttaaagatcctccataatggtttttcataatgcttctattgtgtcctgtgcttgcatacttaaaagaatagcaagagacttgagcggaatttatacacaaaacttggagtcctctttctcaggctctctccttta

SEQ ID NO: 624102 - DNA, 519 bp, Homo sapiens
aaggaatatcagggttttagttttctggaaaatacattatgaataattttacctaattagataagctagacatggttatgtataatttcttagaaaaattttacaaagtgaattcattcatctacctagaagagataaatatgcactaaatttcttagatcagataaggtaacaaagttgtagaaatggggataaatagagtttgggacctggatggtctatctacataaatatttattgcaaatggtttaacaatcatacaatgagattttgcaggaaaatttattttcactttaatcactgaaataactaagaccaaaacagaaaaacctattattcctcaaatccaatgggaagaattaatgagaagaaaaagrgccaaaaggccttttgtcaaataaataatgataccataaataataataataacagctacattttactgagtgcctgccataaacctggcactgtgcttggtacctaacattgtcctcattcctcacagcacacaagaaactg

SEQ ID NO: 624103 - DNA, 416 bp, Homo sapiens
gcctgggaatctgcccagggccttttgggctctcatttttgctgttttgtatttgatatttcatttatatgcatcaaactaataccaactttcatatttgggcaaggaaaggaagagagaatggttgctagaattaaagaactccaaggaactctctaaggaacatagctcctaataaaggtttcagagttccatatttttagaaaacatgtatgtattgattatctacaaagacattcaacacacctccttaattctagaaataatgytaccagttgtggatatcatgaaaatattttaggaggcataatttactacagcatatctgagttgaaagagtagcgaacaatattcttttggttatgtaatatgctgggcagccctgagattcagaaatgttgaggaaaacaagaatt

SEQ ID NO: 624104 - DNA, 339 bp, Homo sapiens
tactctttttaatttagtggaagaacaatttattgaacacctrctaggcacttgtgttaaccaccaggcacttatacaaagaagcagctcttaaaaaggaatgagatcatgtcctttgcagggacatgaatgaagctggaagccatcatcctcagcaaactaacacaggaacagaaaaccaaacaccatatgttctcactcataagtgggagttgaacattgagaacacatgaacacagagaggggaacagcacacaccagggcttgttggggggtagggggtgaggggagaaaacttaggggatgggtcaatagatgcagcaaaccaccatggcacac

SEQ ID NO: 624105 - DNA, 586 bp, Homo sapiens
ttctacatatggctagccagttttcccagcaccatctgttaaatagggaatcctttccccatttcttgttttttgtcaggtttgtcaaagatcagatagttgtagatgtgtggtattatttctgagggctctgttctgttccattagtctatatctctgttttggtaccagtaccatgctgttttggttactgtggccttgtagtatagtttgamgttaggtagcgtgatgcctccagctttgttcttttggcttacctcttataaagccaaattcttctcaactggtaattagctttggtactactgaaactgcatatagaaaactattgcacttttctatttacagattattgtatcagcattgaatacatgtgcatatgtaatacacacatggtagtaatcaaactattggccaatcacatcaaggtttagatacttaatccactgaagctggtagttattttgatctgtaatcatagtgagtaataagcatgtttgaattatgggggactagtttcttatttgtcttttattatatttttagagatggggtcttgctctgtcatccaagctagagtgcagtg

SEQ ID NO: 624106 - DNA, 611 bp, Homo sapiens
tcatccctgaagtcagccacacttgagagatgaataaacaacaggtgctgcccaagattacaatgtaggttgactttgatgcttcaattatttttggccgagatattatatttgtacatctctatgtttgtaaatattgcatatatgtatatatggataattgtggaagtaagagctatacacatcattagttaatctgataaataaactttagttagttttaggagaatatctctggattataagaataagccacttcataaaacatttgtaaaactttgtaaaaacaagtacataaacaatatagaaatgtataacttagaaagtcaaagtccctaataatcattgtctacacctttgccttcctctttcaaataatcaatatcatcaatttgggagatataatctgaatttccccctcctcatcacatgttctgttttttttttcacttatttctttaaaagtctatcctcctttgagattcttttcttcaccygtctagatcataatgatatttctcttctctacactttcagtactttgagtttgcatgttaataataaaatgtctcacacggttctctaattcagtattccccagactgttttcc

SEQ ID NO: 624107 - DNA, 521 bp, Homo sapiens
cacatcacataagcatatcatatcagaagacagtagaaagaattgtgaacatcaagattgacaccaaacatctggcccttgtaaagagaacatgtagccctcccaagggagttccagtaattggaatggaatgaactctatccaagtatctgcaaaactcctaaatcagattaacaaattattgtccactgttgtggaagaattttgggaaatgggaaaggtgctggaagactagagacagacaaattttattgttgattctactatgttaggcaatttcaagagccaacaagcttcatattgatcaaaagcaatattccagaatggatttaataggtgggtatatgagtactttgaaaagcaagtgtccttgggatcctgtctgtgctcaccaataacaaatcacattactcttactttaattccttgtttgacagatttactatgtccataatgctagtattgcacagttaaattcagatttcagtaaagtagttsacaaaatctaacatgaaagtctt

SEQ ID NO: 624108 - DNA, 639 bp, Homo sapiens
tacccacactagcacatgggaggcactgtatttgtcaaatgaatgaatgatgaatgaatgaaaccagtcatttatatattgaagtaaatcagtgtcatggaatgttttatgtttaaatgaagagagaaaactttaatcagattaaatataggaaggatatttgggatctagaaggccaacccagttgttcaatcacagttgcctccatgggggtcaaccttaagcgttgtgcctgcaagcaatcacacttctctggtggaaaagccattcygattctggggccctttttccaccatttcccttcatccacagcaaggagcttcagctctggagactgtaatttgcacaaagcaattcagggtataaaagcaaaactacacacttgcaaggtaaagataccaattcattcgactctaaccatcaaaagatacatatacacatatatgacatgaggaatactttagtcaccagttacccttcctgcaagattagtcattagatcccatgataggccttgttaatgccatggagagaaaagagataattataatgagttaaatttagaaacaacagtcattttttgtggattagaaatagtgaaagtcagtgtctttctatcagtctttcacatcaaaagct

SEQ ID NO: 624109 - DNA, 616 bp, Homo sapiens
tattattattattagtagtagtagtagtagtagtattagtattattagtattatttttagagtctcactcttgcccagcctggagtgcagtggctgatcatacctctctgaagtcttgtgtgttgaggctcaagcaatcctcctgcctcgaccttcccagtagctaggaccacaggcatgtcccactgtacttggttaattttttttttttaagagaaggggttttgccatgttgctcargctggtctttaactcctgtcctcaagtgaccctcccacctcagcctcccaaagtgttgggattacaggcatgagccaccatactcagccagaatctccagttatttggaaacagctgctctattacctctgcaatttcttttctttgggttaaacatcttgagttccttcaactatacctctttgtgaagttttaaaaatcccttctccttcttgttggctctgtttggaatatgcttccatttatctgtatttttcttcaagtatgccctaaacacacacagcactaatgcaggttggtttcaccaatgtggatttataattctccttgttctacaacattctgtgtttcttttaaggcaccttaagaccaaaga

SEQ ID NO: 624110 - DNA, 615 bp, Homo sapiens
attattattattagtagtagtagtagtagtagtattagtattattagtattatttttagagtctcactcttgcccagcctggagtgcagtggctgatcatacctctctgaagtcttgtgtgttgaggctcaagcaatcctcctgcctcgaccttcccagtagctaggaccacaggcatgtcccactgtacttggttaattttttttttttaagagaaggggttttgccatgttgctcaggctggtctttaactcctgtcctcaagtgaccctcccacctcagcctcccaaagtgttgggattacaggcatgagccaccatactcagccagaatctccarttatttggaaacagctgctctattacctctgcaatttcttttctttgggttaaacatcttgagttccttcaactatacctctttgtgaagttttaaaaatcccttctccttcttgttggctctgtttggaatatgcttccatttatctgtatttttcttcaagtatgccctaaacacacacagcactaatgcaggttggtttcaccaatgtggatttataattctccttgttctacaacattctgtgtttcttttaaggcaccttaagaccaaaga

SEQ ID NO: 624111 - DNA, 561 bp, Homo sapiens
aagtaaacaaatgagaaagaagtctagttaaactttcaaattatgtggagttttttttttaagtttgtagcacttatatttctaaattagtcaagcctaaaattgtgctaagacttttaggaccctgtgtgtrtgtgtatgaaattaaattatgtagtgatgttattattgagagaaactagcatctccaaataattctgcatggcttcataaaatcaaattcactcaagctttggctactgctaacattttaatatttaataaaaatatcagagtgttttgccaataaccaggctaattccacagtgggggaaaatgagataaagaaaaaacaagtggcttaactaaggccatgtactgacccagattttctcagtgaacaaacattgcttctgggcaaagagtttgccgttttggaactggcattaagttaggaaggctgctaggacagtacttagtaatttagtttttgtaaactccttggctttgtgtcttgagtagtactaatggcccattattactttaatgataataaaaagaaaagtggaagggtagagagtc

SEQ ID NO: 624112 - DNA, 561 bp, Homo sapiens
aagtaaacaaatgagaaagaagtctagttaaactttcaaattatgtggagttttttttttaagtttgtagcacttatatttctaaattagtcaagcctaaaattgtgctaagacttttaggaccctgtgtgtgtgtgtatgaaattaaattatgtagtgatgttattattgagagaaactagcatctccaaataattctgcatggcttcataaaatcaaattcactcaagctttggctactgctaacattttaatatttaataaaaatatcagagtgttttgccaataaccaggctaattccacagtgggggraaatgagataaagaaaaaacaagtggcttaactaaggccatgtactgacccagattttctcagtgaacaaacattgcttctgggcaaagagtttgccgttttggaactggcattaagttaggaaggctgctaggacagtacttagtaatttagtttttgtaaactccttggctttgtgtcttgagtagtactaatggcccattattactttaatgataataaaaagaaaagtggaagggtagagagtc

SEQ ID NO: 624113 - DNA, 556 bp, Homo sapiens
cacattttcttgatccattcatctgttgtggtacacctcagttgatgctgtatcttggctattgtgaatagtgtggcaataaacatgggggtgcagaagtctttttgatacaatgactttctttcctttggataagttcccagtagtggcattgctggattatatagtcattctatttgtggttttatgagaaacctccatactgttctctagagtggctgtactagtttatgttcccaacaasaggtataatatacagttcccttttctccacaccctcaccaccatttgttattttttgtcttttttataatagccatcctaactggggtaagaagataccacattgtggttttgatttgcattttcctgatgattagtgatgtcaagcatttttaaatacatttgttggccatttgtatatcttccttttataaatgtctgttcagataatttgaccattttttactcatattatttgggtttttgctgttgatatgtttgagttccttgtatattctagatattaatcccctattgaatgagtagcttacaa

SEQ ID NO: 624114 - DNA, 538 bp, Homo sapiens
aaaaacaagtggcttaactaaggccatgtactgacccagattttctcagtgaacaaacattgcttctgggcaaagagtttgccgttttggaactggcattaagttaggaaggctgctaggacagtacttagtaatttagtttttgtaaactccttggctttgtgtcttgagtagtactaatggcccattattactttaatgataataaaaagaaaagtggaagggtagagagtcaggtagcattggaggtagtgttcatgggatataggcatggctggcatgcatgctgcatttcaggtaggtgtagagtacaagggaaagggcataggaataaaaagcataagtaaaagtaaagcatataaaaaattgataccttaagatacaagaatttatgacatgggcagcagggtacagactcagacagtttcaatatttggtyattgagctacttgccgcggggaggctgcaatccctctgcaatgccaataagaaggggatgtatatggactgaggtacaaactgcctctgccatggagcc

SEQ ID NO: 624115 - DNA, 416 bp, Homo sapiens
gaatgagttattaagaaaagacatttggatcaaagaaaaacgtatttctaaagtgagtgtgatttatggtgttaggatgggacatcttgccttctgagaaacagacttgcttgacccagtttgtgttcagctatctggtaacttgttaaaaaggattaacatgtaagggtctggaaaaactctagtctctaagtggctatttagtatgggcaggaaaaggctgtttttttcctagaagcctggggccatacttttcctatgttcccatctaacacatttaaggcacacctgttgctgagaaatgcatcctctacactttacagggtaygtttatacacacagtagcaactgagtcatttagtctgccataagctgcttccagtttttagcctattttctctggaaaataatacaat

SEQ ID NO: 624116 - DNA, 572 bp, Homo sapiens
ttcccaacaagaggtataatatacagttcccttttctccacaccctcaccaccatttgttattttttgtcttttttataatagccatcctaactggggtaagaagataccacattgtggttttgatttgcattttcctgatgattagtgatgtcaarcatttttaaatacatttgttggccatttgtatatcttccttttataaatgtctgttcagataatttgaccattttttactcatattatttgggtttttgctgttgatatgtttgagttccttgtatattctagatattaatcccctattgaatgagtagcttacaaatattttcttccattctataagttgtctttttgctctgttgatgtttcctttgctgtgcagaagctttttagttttatataatcccagttgtttatttttgcttttgtttcctgtgctttcgaggtcttgatcataaaatattttcccagtccaatgtcctgaactgtttctcatatgttttctcctagtaattttatcatttcaggtcctacatttaggtctttgatccattttgagtggatttttat

SEQ ID NO: 624117 - DNA, 554 bp, Homo sapiens
tagactcgtaaaaattgcaaaactagcatcgaaagcttctgtgtagatttcatccagcttctgccatggcaacatcttacataactataacacttcatcaaaaccaagaaaccagcattgacacaatgaaattaactaaactatagatattaattaaatttcaccagtttttatgctcttttgaatgtgtgtgyataattttatgaaattttattacatgcatagatttataaccaccaccacaatcaagatacagaactggagaacatcttggaatggaagcgttagacaacagagaatgctatatataagaaagttattcttagaaagacaaataaacgggatataaaaccagaatgtttaaaataaaataatggaaaaattaaatataaagaaaaaatgtactaaactgaaaatataaatatgagggttggagagcaacaatgttaaaaaaaatcacatttcgaaggttactattttcagaaaaatgttttccaatatttatattggaaaaatataaatatatataaatatgtatacatgttccacaatag

SEQ ID NO: 624118 - DNA, 554 bp, Homo sapiens
tagactcgtaaaaattgcaaaactagcatcgaaagcttctgtgtagatttcatccagcttctgccatggcaacatcttacataactataacacttcatcaaaaccaagaaaccagcattgacacaatgaaattaactaaactatagatattaattaaatttcaccagtttttatgctcttttgaatgtgtgtgcataattttatgaaattttattacatgcatagatttataaccaccaccacaatcaagatacagaactggagaacatcttggaatggaagcgttagacaacagagratgctatatataagaaagttattcttagaaagacaaataaacgggatataaaaccagaatgtttaaaataaaataatggaaaaattaaatataaagaaaaaatgtactaaactgaaaatataaatatgagggttggagagcaacaatgttaaaaaaaatcacatttcgaaggttactattttcagaaaaatgttttccaatatttatattggaaaaatataaatatatataaatatgtatacatgttccacaatag

SEQ ID NO: 624119 - DNA, 474 bp, Homo sapiens
ccctctgcccttatttctatgcagtcaggtgtttattcttgggctgcagattcctgagagaaggctcttccagtgcctggtgggtttttgggagtcaagtgagggagagcttacctgtaatgtattaactttcattttacctgcctgttttcagtccagtattcctccctcaactctagcctttggggactacaatctggaagctctctctggcaggccttccagagaatcgtcctccaatttttgccaaagtgtgaggcaaagtgtgaggcaattacctcgcatgcagagttgggaaggggccctgggtgtctaaatgcctctwaaggaaatttacaagaaggcttttgttttagcctcacttcgcttccacttccagaggtgcctggagccactagttcctcgccttttggtctgcaatataaatcaggtttcttggctttcccacctgctgacttaggatttaactttcta

SEQ ID NO: 624120 - DNA, 545 bp, Homo sapiens
ttcaatgtccctattactttaagtatgactaacagtgattaaaataggaattacatgatcattgattcccaagtgtcttttctaatgtattaagacacaggacagcttgagatagcagatttaatttaaacaagtaaaccaatggtttactcgttcatttattgccttcaatcacttccacagctggtgcgaacatttgttaagttttaaatgaacagaagccaaagtgtgttgcagtaattaacttatgaaagcaattaatgtaagcaacatatgcatgcacattatcacgcagtagtgcatatggttaattaaagtttaacataaattagatctatttaaccttatttcaaggaccatttgmgcggttttttttttttttttttttggtaaaatgtccatatgtcttaactcaggtgattaacttcatcatgttaatgacctcaaaaaattagctaaatcctcttggtttattacttagttaacagcaaacatggcacaaatggtctgtttgttttcaacatgatttagaaagccaagactgg

SEQ ID NO: 624121 - DNA, 496 bp, Homo sapiens
aatccatgcactttgggaggacaaagctggcagatcacttgagcccaagagtttgagacgagactgggcaacattgggaaacctcatgtccacaaaaaatataaaaaattagccgggcatggaggcacttgcctgtagtcccagctgcttgggaggctgaggtggaaaaatcacctaagcccggcaggttgaagctgcagtgagccactactctccagcccgggcaacagagtgagaagctatctcaaaaggaaaaaaaaaaaagatccagagaagaaaactttaggccrggtacagccgctcacacctgtaatcccagcactatgggaggccagggtagcaggatcacttgaggccaagagtttgagaccagcctaggcaacaaagcaagacccagtttctacttaattaattaatttaaaatgttttagccataattgttttccataggggaaaagatttagagtatctactttaagttagattatgaagccca

SEQ ID NO: 624122 - DNA, 496 bp, Homo sapiens
aatccatgcactttgggaggacaaagctggcagatcacttgagcccaagagtttgagacgagactgggcaacattgggaaacctcatgtccacaaaaaatataaaaaattagccgggcatggaggcacttgcctgtagtcccagctgcttgggaggctgaggtggaaaaatcacctaagcccggcaggttgaagctgcagtgagccactactctccagcccgggcaacagagtgagaagctatctcaaaaggaaaaaaaaaaaagatccagagaagaaaactttaggccaggtacagccgctcacacctgtaatcccagcactatgggaggccagggtagcaggatcacttgaggccaagagtttgagaccagcctaggcaacaaagcragacccagtttctacttaattaattaatttaaaatgttttagccataattgttttccataggggaaaagatttagagtatctactttaagttagattatgaagccca

SEQ ID NO: 624123 - DNA, 417 bp, Homo sapiens
acccacattagggaggacactgggcttttctcaatttcctgatttaaatgttaatctctttcaaaaacaccctggcagacacacccagaataatgttgggccaaatgtctggatgtcatgggaccccgtcaagttgacatatatacttcactttcactatgatatctttaatctcacttgcaattttaaattccagctagaatggcagcaagactttttgctgatagattaaggggaataaggggtatgtktgtctttttgtctgtctccctatctccctcctcccccatctctgtctgttagagcagctgtctaagaactgagaaggatctaagattttatcctacttgcaagctaacaagttagcctgcctcagtttcatggttgctgacagaagacctgaggctcctaggtcag

SEQ ID NO: 624124 - DNA, 511 bp, Homo sapiens
aaaatataaaatttttctccartgttggacttcctgtcctaatatagatggcttggtaaattcccaatgtgtgcacctatgaattatgttgaaaaaagttcacaataaaatcaccattgtcaaatttatgtaatagaaaagatcaacctaacaaattatatgtatacataaattatacatataaacctctaagaaacagattaaatacattttacttagttgcatttggggaacatattaccacagagattcctaggcatgattttactttaattagcaaaacatttacagagcttctagtaggtgccaaagactatgcctccatcattgtgtttggagaatctgaggatctcttaactgttctaatctggctaataagtccattgatctcagtcaggtatctttatcgttattcaaatgattttgaaaagccaacttttaactattaataatagtgaactctttaatgaaaagacagtggccgagattataaatgaaggtagattcttgg

SEQ ID NO: 624125 - DNA, 511 bp, Homo sapiens
aaaatataaaatttttctccagtgttggacttcctgtcctaatatagatggcttggtaaattcccartgtgtgcacctatgaattatgttgaaaaaagttcacaataaaatcaccattgtcaaatttatgtaatagaaaagatcaacctaacaaattatatgtatacataaattatacatataaacctctaagaaacagattaaatacattttacttagttgcatttggggaacatattaccacagagattcctaggcatgattttactttaattagcaaaacatttacagagcttctagtaggtgccaaagactatgcctccatcattgtgtttggagaatctgaggatctcttaactgttctaatctggctaataagtccattgatctcagtcaggtatctttatcgttattcaaatgattttgaaaagccaacttttaactattaataatagtgaactctttaatgaaaagacagtggccgagattataaatgaaggtagattcttgg

SEQ ID NO: 624126 - DNA, 580 bp, Homo sapiens
ctgcaacctctgcctcccggattcaaacagttctcttgcctcagcctctcgagtagctgggattacaggcacacagcatsacgcccggctaatttttgtatttttagtagagatggggtttcactacatcagctctgctggtctcgaactcctgacctcaagtgatctgcctgccttggcctcccaaagtgctaggattacaggcatgagccaccacgtctggccctgattttatttttagatcccacaaataagcgacatgtaaagtgataggtaatgttctcacttatttgtggaatgtttgtctttctgtgtctgggttatttcacttaacctatgatctccagtttccctcatgttgttgtgaatgacaggatctcactctttttagtggctgaacagtactccatcatgtatatgtaccacattttctttatccgttcatctattgatggacacttaggttgcttccaaatcttggctattgtgaacagtgctgcaacactgcagatatctcaatatactgattgcctttctttagggtacacacccagcagtgggattgctgggtcatatagta

SEQ ID NO: 624127 - DNA, 684 bp, Homo sapiens
cgccatacacttttaatgactagatctcacaagagctcagagctagagctcacttatgaccaaggtgatggcccaaatcatttgtgatccaaacacctcccaccaggccccacctctagtattggaaatttgggcaaggacaaatatccaaactacatcagaaaatgagaatcttgttccaaactcagccctatcacccactagttttgtgaccttgggcacgttgctcaattgcttcaacttcagtgtcctcgattataaaatggaaaagtgattatatctacttcataagaaatttgtaaggattaaatgaggtagaacgagtaaagctcttggcacaatcacwagcataaaacaagttctcaaaaattatagctattattattatcattctttattataggcgtgtagttaatgtcatggattgtacttttatggatatgaacttgaaggaagtgtttatccagggacaaatagtagtcactgacatagaactgttccactttgcttatagctgcaaagtgtccaatatccaacatacccactctgcttacatatggctttaactttgcattcagagggatgtgctctataatgtcctagcaaactactattgctggcttccccaccaacttaagagtcccccgccagctccattccaccctgatgacacaatcagtccca

SEQ ID NO: 624128 - DNA, 548 bp, Homo sapiens
ctttgtgcttttaccttattattgctcataaaccagaaaaaatattctgttgcttccagtgatttacactttgctgtgaatgcttttaaaactgaaactgtcycagacagaaatgatggaggtctgcttccaaaaatgtctggggccaaataaagacccattcaagtgtgtcatgaatttctgacttcttaccatcacgatccctgcatgggtagcttcatctgtcattctgatttaataatttatttagggcgatctcatatactataagtgagtccaaatacatggtgagtccaaatacaaccaaaacatcattttcctctaatgactatataactgtatttttagatttaggcacatttagagagagttttatcgtgtattactgatttttttttctccaaaacaaaattaaatgtaataatgctgtaactgcatcagatgctatcaagaggaacgtgtacattagcttcttcctttggaaacaggaattttctggtacatgtttgtttgaatatcaatcggcacaaatcaaatatccaaaatgt

SEQ ID NO: 624129 - DNA, 660 bp, Homo sapiens
ccactgctagtgagaatactgagaaacaggtactctcaaatggtgttggcaaaaacatgaagtgctatcaaaataaaagcactagactttgggaggccaaggtgggcagattgcctgagcccaggagtttaagaccagtgtaggaaacgtggtgaaacaaaaattagccgggcatggtggcatgtgcctgtagtctcagctacctaggaggctgaaatgggaggatcacctgaccccgggaggtcgaggcagccagtgagccatgatcacaacactacactatagcctgggcaacagagtaagaccttgtctcaatcaatcagtcaatcaataaataaaaataaaagcactggctgggcacggtggcttacacctgtaatcccagcactttaggaggctaaggcgggcagatcatgaggtcaggagttcaagaccatccagaccaacatggtgaaaccctgtctctactaaaaatacaaaaaaattagctgggtgtggtggcacgtacctatagtcccaactacttgggagggtgaggtgggagaatcacttgaacccgggaggtggaggttacagtgagcygagatcatgccactgcactccagcctggcgacagggagagactctgtctcaaaaaaataaaaaataaataataaagta

SEQ ID NO: 624130 - DNA, 578 bp, Homo sapiens
ccaggcctgcagacaagtcctcactacacagaggtagtgagagagtgtatgcaggaggccttgtctttatgcataacctgctagcaatgtagcaagacagtgctgggggcacagcaataaaattacacttcgtgcccagattatagatccaggtgaggtgacttgctagagaaagggcttccccattccccccagctatataaggtaatgaattatgctagggtytcaggatttcctgattggcagggtaggaggcttggttttccccctctgctcccactcagggcttcctgtgatatggcaggcggaaaaccaccaccatgaccactcatgaaaatgggagacgggccgggcacagtggctcacacccgtaatcccagcactttgggatgctgaggcaggtggatcacatgaggccaggagttccagaccagcttagccaacatggtgaaaccctgtctctactaaaaaaaaaaaaatacaaaaattactcaggcatggtggtacacatctgtaatcccagatactcgggaggctgaggcacaagaatcgcttgaatccgggaggtagaggttgca

SEQ ID NO: 624131 - DNA, 557 bp, Homo sapiens
tcaataatgttgtattgatttagatctgcatctcaccacaaagcagctagaagagatgtttttccrtggaacttttcgaggcctgagacacagtttccacacagcatctttttagaatcctgaagtgtgctagcctacaacccaaaagtacagatggccttccaggctggagcgccacctgactggctacctggctgccccagatcgaattcccacattcccactgacatgactcagaccgaatgtgggtgatttctattcccatggttagcgtgttcactggaaaagaaaaaggccctgaaccaagagtctgatcatagttaaaacattaaagaataagagaaaaaacaggaagagggtattctaaaccaaaatggctcaaaggagtttcacacctaagtaaccagacaaggagaggtaaagaaaattttaaaaaggcaagaaggggccaggcgtggtggctcacacctgtaatcctagcacttgggaggccaaggtgggcagattgcttgagcccacaagttcgagatgagcctgggcaacatggtggaacccca

SEQ ID NO: 624132 - DNA, 539 bp, Homo sapiens
tcttggaaacctggactccagttcaactatcacagaaaatgttaaatcatattcaccacctaattaaagaagtcctcattgaaataccgaagcagtaagtcatgagaaaggctttctgtgagtcacccagcttgattagcgtagtcagttcctcaggttgttcaaaagttattaaattgctcatccgacatttgagagcaccagctgcttttcttcatagcccaacaaaaccttaatcctagtggcttcatgggattcrggacacctaactactgtgactcacaaaaaaccacctgttcttactgatcttgggagatatcagctgaggaaacctccatgacattccctggcagtaccgtcttaatggaggtttgtgatgcagcagaatgcataccattgggaagcaccagatccatcattaactacattacttccctgttctgcccttggcctcagttttcccacccacaaagagaaggacaagagttgggcaagatgattcctaagctctaatgggaaatgcctcctggtgggtggta

SEQ ID NO: 624133 - DNA, 539 bp, Homo sapiens
tcttggaaacctggactccagttcaactatcacagaaaatgttaaatcatattcaccacctaattaaagaagtcctcattgaaataccgaagcagtaagtcatgagaaaggctttctgtgagtcacccagcttgattagcgtagtcagttcctcaggttgttcaaaagttattaaattgctcatccgacatttgagagcaccagctgcttttcttcatagcccaacaaaaccttaatcctagtggcttcatgggattcaggacacctaactactgtgactcacaaaaaaccacctgttcktactgatcttgggagatatcagctgaggaaacctccatgacattccctggcagtaccgtcttaatggaggtttgtgatgcagcagaatgcataccattgggaagcaccagatccatcattaactacattacttccctgttctgcccttggcctcagttttcccacccacaaagagaaggacaagagttgggcaagatgattcctaagctctaatgggaaatgcctcctggtgggtggta

SEQ ID NO: 624134 - DNA, 546 bp, Homo sapiens
acttcttggaggctgtgttcgtattttcttattcttttttctttgtctttatggagtgsgttaactgaaagaccttgtcttagagctctgaaattctttcttctacttgttcaattctattgctgagactttccagagcattttgcatttctataagggtgtccaaagtttactgaagttttgactgttttttatttatgctatctatttccttgaatatttctcccttcacttcttgtatcattttttggatttccttaaatcgggcttcacatgtctctggtgctccctgattagcttaataattaacctcctcaattctttttcaggcaaatcagggatttcttcttggtttgggtccattgctggggagctagtgtgattttttgggagttgtaaagaactttgttttgtcatattaacagaatcggtttctggttccttcttatttgggtaggctctgtcagagggaagatctagggctgaaggctgttgttcagattcttttgtaccacagggtgttcccttggtgtagtactctccccc

SEQ ID NO: 624135 - DNA, 546 bp, Homo sapiens
acttcttggaggctgtgttcgtattttcttattcttttttctttgtctttatggagtgcgttaactgaaagaccttgtcttagagctctgaaattctttcttctacttgttcaattctattgctgagactttccagagcattttgcatttctataagggtgtccaaagtttactgaagttttgactgttttttatttatgctatctatttccttgaatatttctcccttcacttcttgtatcattttttggatttccttaaatcgggcttcacatrtctctggtgctccctgattagcttaataattaacctcctcaattctttttcaggcaaatcagggatttcttcttggtttgggtccattgctggggagctagtgtgattttttgggagttgtaaagaactttgttttgtcatattaacagaatcggtttctggttccttcttatttgggtaggctctgtcagagggaagatctagggctgaaggctgttgttcagattcttttgtaccacagggtgttcccttggtgtagtactctccccc

SEQ ID NO: 624136 - DNA, 597 bp, Homo sapiens
ctacgatgtcttgggctaaggaaaaatgtcacattatttatgacagatccaaaacttttctttaaaaatacaatggccaagtgcagtgcctcatgcctataatcccagcactttgggaggccaaagagagtggatcacctgaggtcaggagttcgagaccagcctggccaacatattgtgaaaccccctctattttaaaaatacaaaaattagttgggcgtggtgctgcatgcctgtagtcccagctacctgggaagctgaggcaggagaatcacttgaacctgggaagcagaggttgcagtgagctgagatcacaccactgcactccagcctggaygacagagcaagactccatctcaaaaaataaaaaataaaataaaatacaagccattaatctgaagaagagctttttaaatatagctcaactgagcaatagtgaaaatctggttgatcagttctttttggtacattcaggtacaaattactgttagtctcaactgagcctgctgttttttcctctactccaatcataaaatacttctttagcatcatttaatcactcatttcttttcctctgaattcccactaaaacagtac

SEQ ID NO: 624137 - DNA, 597 bp, Homo sapiens
ctacgatgtcttgggctaaggaaaaatgtcacattatttatgacagatccaaaacttttctttaaaaatacaatggccaagtgcagtgcctcatgcctataatcccagcactttgggaggccaaagagagtggatcacctgaggtcaggagttcgagaccagcctggccaacatattgtgaaaccccctctattttaaaaatacaaaaattagttgggcgtggtgctgcatgcctgtagtcccagctacctgggaagctgaggcaggagaatcacttgaacctgggaagcagaggttgcagtgagctgagatcacaccactgcactccagcctggatgacagagcaagactccatctcaaaaaataaaaaataaaawaaaatacaagccattaatctgaagaagagctttttaaatatagctcaactgagcaatagtgaaaatctggttgatcagttctttttggtacattcaggtacaaattactgttagtctcaactgagcctgctgttttttcctctactccaatcataaaatacttctttagcatcatttaatcactcatttcttttcctctgaattcccactaaaacagtac

SEQ ID NO: 624138 - DNA, 370 bp, Homo sapiens
tcctgtttaactgaggctttgtgtcctttgaccatcatctccccattcccccaacccccagcctgtggtaaccagcatactactctcttctaccatgggtttcattgtttcagattccccatgtagtgaaaacatgcagtatttacctttctgtgcctggcttattgcagatcatctcatkagatgcagaaacatcatttgatcaaattttatttcataataaaaatcctcaacaaattaggtacagaaggaatgtaactcaacacaataaaaagcatatattataagccaatagctaacattatactccacagtgaaaaattgaaatcctttcctctaagatccagaacaaaataaggatgcccacttg

SEQ ID NO: 624139 - DNA, 404 bp, Homo sapiens
tctcatatatatatatatatacacacacacatacacatattgttcctgtttaactgaggctttgtgtcctttgaccatcatctccccattcccccaacccccagcctgtggtaaccagcatactactctcttctaccatgggtttcattgtttcagattccccatgtagtgaaaacatgcagtatttacctttctgtgcctggcttattgcagatcatctcatgagatgcagaaacatcatttgatcaaattttatttcataataaaaatcctcaacaaattaggtacagaaggaatgtamctcaacacaataaaaagcatatattataagccaatagctaacattatactccacagtgaaaaattgaaatcctttcctctaagatccagaacaaaataaggat

SEQ ID NO: 624140 - DNA, 559 bp, Homo sapiens
aacaatgccctgttctgctccatcacttaatgatcaattacctttcatcaagtaattcataagacatattagataattccacgagccacacaactgctaacctttgcatggccttgctgacatggttacttagtctgaacaatgcatggaccatttgctaaaaatacatgtgtttcagtttgggagaggaggaacaaatccaagactgtccaaatccaagactgtacattaagttctgacttcattttataaaaaggaaccaagcagtagttctaccaagcaatgaagcacagagawtggaaaatgacccatcaagcactatggacacaaatgttgccatctacctattacattgacatttacctgaatgaggttggcagctgggttccttcttttctcaaagtgtttctggcggtgttgttcttgtacttttaatgcaaaacctgagccaagaatgccctggaacaaaatacaaaaatggcactcaaaaatttcaaaagcactgttaaataatacaaatattaaaaagtcactaaaatgagtctgagagaagacaaac

SEQ ID NO: 624141 - DNA, 559 bp, Homo sapiens
aacaatgccctgttctgctccatcacttaatgatcaattacctttcatcaagtaattcataagacatattagataattccacgagccacacaactgctaacctttgcatggccttgctgacatggttacttagtctgaacaatgcatggaccatttgctaaaaatacatgtgtttcagtttgggagaggaggaacaaatccaagactgtccaaatccaagactgtacattaagttctgacttcattttataaaaaggaaccaagcagtagttctaccaagcaatgaagcacagagattggaaaatgacccatcaagcactrtggacacaaatgttgccatctacctattacattgacatttacctgaatgaggttggcagctgggttccttcttttctcaaagtgtttctggcggtgttgttcttgtacttttaatgcaaaacctgagccaagaatgccctggaacaaaatacaaaaatggcactcaaaaatttcaaaagcactgttaaataatacaaatattaaaaagtcactaaaatgagtctgagagaagacaaac

SEQ ID NO: 624142 - DNA, 488 bp, Homo sapiens
  misc_feature 488: n = A,T,C or G
cttacattcatttatcacagtatgaagaactgctccttaatgggcaatactttcatttgtttcttgacccaagtggtaaaatatacatttcgttaacttctgcttgttaaaaaaattttcatagaaaaacagaaaaagcagaaacatgatttctatgaaaataagatgtcatttaagacagcatggtctaatttaatgctatgaaacattctaggcatttcaacattttattttatgatttatttttaaacttttatttcaggttctgtggtacatgtgcaggtttgttatataggtgaattgtatattatggggggtttgatgtttagattatttcatttacgcaggtaaaaagcataatacctgatagggtagtttttttatgctctccctcctcccactttccatcctcaaataggcttacgcgtctgttgttctcttgtttgtgmccatataactcaatgcttacctctcactggtaagttggn

SEQ ID NO: 624143 - DNA, 552 bp, Homo sapiens
cactgtcttccacaatggttgaactagtttacagtcccaccaagagtgtaaaaatgttcctatttctccacatcctctccagcacctgttgtttcctgactttttaatgatcaccattctaactggtgtgcatgggatggcattcttttttttattgcacatcactcctttattatactgatctggaaaaaggatttagtacagttatgctcaaatgaacactagacctatgtggcagggccaagcaactgcaacatgattcagaaatcagtgaaaaacacacttggagaggaccaagaggcatttcactgccatgaaacaaggcagggagggattctaaaacacacagcatgaagcactcctgcccctcaaaggtcaaggagcttaccccatattggtatgaggaatggcttatgttctgatgaccacatgtgggactatttcaaccaccacgagaaacccttagaagggttawtgttttgtattatttatatacactatacttttttttttttaaataaaagtaaatgtaacacataaactaaattcagg

SEQ ID NO: 624144 - DNA, 505 bp, Homo sapiens
ctagagcccccaggcagtggcctgactacagacaagcacaggactagctcctgggggcagacaggctctcttgcttctcctcattggtcgtagctcagcatggctcctcctcacaagtccttagtaaacaaagcacttgcaaaaacccaagtcactatctttgaactctcttggataasgggggcttttccacagcttagactgagaacctgtgccctagaagtgctattctgactagaatgtatgaagggagtgggtgcagaacacaaaatggctaaaatgaaaatgggagccaccggtccccatctgcagctgcaactcaagatgtctatagatgtggtcagtgtgacatgttcaggagggagggacagatggatgcaatgggcagggagggtgcctgtttgctggccttcactttttggttttgccctgggcagccacaacttccagggctttgcacatggtctcttcatcccctaggaactgcgtgggctgggcttgatgg

SEQ ID NO: 624145 - DNA, 569 bp, Homo sapiens
aaccactagctacatgtagctttttacatttaaattaattaaaattaaaaaccaagtttgccaatggcactagccacttctcaagtgttcaatagctacaggtggctatcggctgccataccatacaaragaaatatagagaataactgcaggaaatctcctgatctaacttgtcattattgactactaaactgtgcaacaataatttccaattgaacttgaaaataaattgttatttctacagcaaatcattggagcagaggcatttatatgtctacagtcaaaatgaggcaaggcctccctcacaggtaaccctgtggaggacaggctaattgaacagttttacctggaggcctacaattttattttatggaactgggttatgtaacatatattgtgatcagtaattgaacttgtacaaatgcaggtaacaatgaagtaaaatcgtgagtttttattttacttaaaactccaacttaaatgttgttcttaacaaaaataatgcaaaatggaatgcttgaagcattcaagagtacttttaaaatctaatcatagtttcattaatcaaa

SEQ ID NO: 624146 - DNA, 569 bp, Homo sapiens
aaccactagctacatgtagctttttacatttaaattaattaaaattaaaaaccaagtttgccaatggcactagccacttctcaagtgttcaatagctacaggtggctatcggctgccataccatacaaaagaaatatagagaataactgcaggaaatctcctgatctaacttgtcattattgactactaaactgtgcaacaataatttccaattgaacttgaaaataaattgttatttctacagcaaatcattggagcagaggcatttatatgtctacagtcaaaatgaggcaaggcctccctcacaggtaaccctgtggaggacaggctaattgaacagttttacytggaggcctacaattttattttatggaactgggttatgtaacatatattgtgatcagtaattgaacttgtacaaatgcaggtaacaatgaagtaaaatcgtgagtttttattttacttaaaactccaacttaaatgttgttcttaacaaaaataatgcaaaatggaatgcttgaagcattcaagagtacttttaaaatctaatcatagtttcattaatcaaa

SEQ ID NO: 624147 - DNA, 629 bp, Homo sapiens
ataccacataagataaatttaaatacacacatacacacatgcacacacacacacacacacgtamatataggtgctcctcaacttacaatgaagctttctcccaataaactcgttataagttgaatatattgtaagtcaaaaatgcatctaatacacctaacccaccgaacatcatagcttaacctagcctaccttaaatgtgcccggaacacttaaattagcctaaagttgggcaaaatcatctaacaaaaagcctattttataataaaatgttgaatatctaatgtaattgattgaatactgaaagtgagaaacaaagtggtctccaggctattctacaaaagcctcttcagtggcagatccactttactggaagttgagcctgaagcattatcttttaccaacacgtaacttccattttagacatcatttctatagtaaaatccatcccatattttcagttgcacatctccaaacaagagctatgtggggagggctgggtaaacaaagaccctgggtatttatttacagggatatattgatgtgctcatcattttcctgagaggacacctcaatacacctgaccaggtatctctgagtcaaactctgtagatcagtaagtgttttag

SEQ ID NO: 624148 - DNA, 584 bp, Homo sapiens
caggtgctgagttaggtggtcacagagggccttctctatagaggacatttaagtagaaatataaaaccatggttctcaaagtgcagtccctacggtggttctcaaactgtggccctaggaccagcagcctcaaagtcacctggaaacttggtcaaaatgcaaattctgaggccctaactcagcatttctgaatcagaaacttgggggttgtgtctcggatacctgtattctaaaataagatctccgaggtgattctaatgcataatcgagtttgaggctataaatatttttccaaatattgatttacagtattctacaggaatttctatgtgttttcacttatttaaaataatatgtagtttcaattttaatctgtcttaagattaatacagatacatgttctaaaattccaagttggatttttttttattgctgatttccagttttttttttaattgcatttagataacatgacacgggtgatctttagtttttgggttwaactgaacatttccttggggccatccagaccaattttgcaatgtttcataggttttttatttatttattctattattattatt

SEQ ID NO: 624149 - DNA, 429 bp, Homo sapiens
tgtaaggttttttgtaattcctcttctttccctatatgatttaaaggacaaatacatgaaacaacaattacaaatatatgctaatgggcatacaatatataaagatgtaatttgtgacaataataaggaaggaggaatagaactgtgtaagttcarggtttttgtatactattgaagttaagtcagtattaatgaaaactagaacattatattaataagtttaaggtgttaattgtaatccccaaggaaaccactaagaaataactaaaacatatacaaaaatgtaaatgagaagggaaccaaaatgatataccaaaaaacaaaaaaaaaaaaaaaaacaccttaaactaagcagaaggcagtaatggaaggattgtgaaacaaaaaaaaagaaacatttctaaaaataataaaatggtagtagtcttt

SEQ ID NO: 624150 - DNA, 429 bp, Homo sapiens
tgtaaggttttttgtaattcctcttctttccctatatgatttaaaggacaaatacatgaaacaacaattacaaatatatgctaatgggcatacaatatataaagatgtaatttgtgacaataataaggaaggaggaatagaactgtgtaagttcagggtttttgtatactattgaagttaagtcagtattaatgaaaactagaacattatattaataagtttaargtgttaattgtaatccccaaggaaaccactaagaaataactaaaacatatacaaaaatgtaaatgagaagggaaccaaaatgatataccaaaaaacaaaaaaaaaaaaaaaaacaccttaaactaagcagaaggcagtaatggaaggattgtgaaacaaaaaaaaagaaacatttctaaaaataataaaatggtagtagtcttt

SEQ ID NO: 624151 - DNA, 578 bp, Homo sapiens
gctactaatttgtatacatttatttcctatcctraaacttcactgaattcatttattagatctaggagcttttggatgagtctttagggttttctaggtatacaattttatcatcagccaacagtgacaacttgacttcctctttactgatttgaatgccctttatttctttctcttgtctgattgctctggctagaacttttagtactatgttgaatagaagtggcaaaagtgggcgtccttcttttgttccagttctcggagggaattcttccaactttttcccattcagtagaatgttggctgtgggtttgttatagatggcttttttttttttttaccttaagttatgtcccctttatgctgattttgctgagggtgttaattataaagtgatgctggattttgtcaaatgctttctctgtgtctgttgagatgatcatgtgatttttggttttaattctggttatgtggtgtatcattattcattcacttgcttatgttacaccatcctatcgtccctgatatgaaacccacttaatcatggtgtattatttttttcagtgtgctgttggatt

SEQ ID NO: 624152 - DNA, 539 bp, Homo sapiens
ctgattttattctcagctagttattggtgcatagaaacaccactgattttgtacactgactttgtatcctgcaactttacccaattcatttatcaaatctaacagttttttggtggagcacatgtttttggaaaaatcgcactgatagacttgcttgatgcagtgttgccacaaacctgcaatttgtaaataaaaatgcaggtatctgcaaaatgcaataaaatgaagcacaataaaatgaggtatgcctgtaaatgactttctgggaaaggtaaaaccctggagacagtgtaaagatcagtggttgctggggctagggagaagagaggggaatttaagtacggcaccaatttctaaggcagtgaaataattattctgtgattctataatgctggatacatgtcatcatacatttgtcaaaatctatagaatgtacaacaccatgagtgaatcctaatgtaaactatggactttagttaataataatgtattattggctcatcaactstaacaaatataccacaataatgcaagatgtt

SEQ ID NO: 624153 - DNA, 422 bp, Homo sapiens
tgctcaagagaatgtccactagcatatactactgctcaaaattgtttaaacaccaatatcatttgagctattyataatggaagtctgccagcttgggagggattcagtcatgagccaggctcaaagataggctgctctcatggagctcaggataacctccaggcaggtccaatttccccaatttgtggtacactactgaaggggctctgtggggctgttgcacattctacaggtcaggttgaaaccttatgggttgacccgtatccccagtgcccaacttaagtacaagcaaactaacaaacacagccaaagggagtaccaatattttattcatttggcagagactgtaccctggacctggggcagttgtagtaacaccagtggggaatcttggagtcttaaatacatctgtaggtcctagc

SEQ ID NO: 624154 - DNA, 480 bp, Homo sapiens
accattagcaggaacgtagattcgtgtagccactgtagaaaacagtatacaagttccyaagaaaattaaaaatagaactctcatatgatccagaaatacccccatgaaatgtatgttgggttctttgaatggtaaaggaggctgtgactgattattgataagtactgaatagaacatggtggccagatccacacagtcaacacacaagttggtcattggagatcttcaactaatttcattatgttaagtattgaagccttgatggtggaaacttgagcactgggatttcgataattaatagttcagtgcctttcattggtgaaatccttttaagactggccaaataaaactactggaaggagaaattgtgataacaatcaccttttcttcgagtaaatcttgaataccaggtcaaaggccagcagtacgttgtttcaagagatattgtggtatgttcactacctttacccacagggccag

SEQ ID NO: 624155 - DNA, 323 bp, Homo sapiens
tcccacaagtaagtgagaacatgtgaagtttatctttctgtgcctggcttatttcacttaaaattatgatctccatttccatccatcttgttgcaaatgactgaatcttgtttttkttgttgttgttgttgttttccatgttatcagggtacaggtggtatttggttacatgagtaagttttttagtggtgatttgtgagattctccacattgtttcccatagtggctataccagtttacattcccaccagcagggtacaggtgttccctgatcactgcgtccacaccaacatctactgcttttttgatattttgattatggt

SEQ ID NO: 624156 - DNA, 407 bp, Homo sapiens
cggcctgggttatccaggtgcacccaatctaatcacataagtgatagagaagagaggccataacacaaaggatgcaggatgcgggctgtgggctgcgggatgcgggatgtgggctgcctcctgcagatggaaaaagcaaggaaacagattttcccccrgagcctcaagaaagggccatagccctgccagacaccgtaaaataataaatttgtgttgttttaagtcaccgaggtaatttcatcagcactaatagaaaatgaatacctatgggatctgtttttaaatgcttaagaaataaaagtggtggagaataaatgaaagattggaaaaatatcgatgataactgttgaaatgggagaggagtgctctgagtttcattatactattctgtctacttatatatttga

SEQ ID NO: 624157 - DNA, 630 bp, Homo sapiens
cctcctgtcactatcttatttctttttccatgcagaagctttttagtttaattaagtcccattgtctattttttttttttacctgtgcttttgaggtcttagtcatgaattcttcacctagaccaatgtccagaagagttttcctcaggtttactttgagtatttttttatagtttcaggtcttatctttaagtctttattccatcttgagttgatttttgtatatgataagagataggggaccagtttcattcttctgcatatgctgatccaattccccagctcctttttctgaagagggtgtcctttccccagtgtatgctcttgttaacttaggcaaagtttagttggctgtaaatacatggttttatttctgggttacctactctcttccattgacctatgtgtctatttttatatcagtaccatgctgttttgttactatggcctcacagyataatctgaagtcaggaaatgtaatgtcttcagctttgttgtttttgcttaagattgttttgcctatttgagcacttttttggttccatatgaattttaggatttttttttctaattctgtaaaagatggggttggtattttgatagagattgcactggatctgtacaatgctt

SEQ ID NO: 624158 - DNA, 509 bp, Homo sapiens
agaagggcaaatggaccttcctctgtctctccagtccaattggtggtgggagtgactgggtaagctggtctcaccactttcgggactgcctggcctcctgtgcatgcagccagtctcttgttcagcagacccgtgggaggtgagaggaggtaagctaatgcacaagtagctgccagaagaaaagatgggagaaaaaagcaaaagaaatatagtatttcaatcaaagtctaaaatttgtaaaagtggttttggtctccatatagtaaaaatatttatccaagaaactcctactcgggtgtgaacatcctacttctagtgggattttgtttggcaaaggtctgtgaaagagtggaagctaatacagaacatgtctataaacaaatttatttagttagtacagattgacacattcactatargatttcagcaattacatgtgtaaaactatttcctatagtggtttccttttgtgattttgctaatttattcaatctaggccattttcatgc

SEQ ID NO: 624159 - DNA, 419 bp, Homo sapiens
ttttgactttgtatatggtattamtacaagataagagttgaggttctatttttttgttttttttgcatatggatgtggatgtcagatagtttcaataccactcgttgagaaaactatcctttctgtgttgaattaccttgacacccttgtctaaaattaattgaccatataaatattgctctgctttgcatcctgttttgttccattagtctatttgtttatcctgatactaatgctggttgtcttgattactatgacttctatactaagtcatgaaatcaggtcttaagagtttctcagctcttctttttcaaaattgctttgcatattttagattctttgctttttcatatttctacaaaacactttctgaaattttcactgggattgcttacaatgtatagcttaatttggaaaga

SEQ ID NO: 624160 - DNA, 523 bp, Homo sapiens
cagagcaagtctccatcttaaaaaaaaaaaaagctatgaaaaaaaaaaaagaaaaaaaaaaaaaagaattatcatctgttctctttgagggctgctatctgtgggatttcctctgcataacaagatcacctttgttagccacgactccctttcttccccccaaataacctatcttgcctccataacctgctgttccaccatagtctggtttgggccatgctctgagcccccattctctctgtaactgtaggatgggatgtaagcttctatacctcaatgcagaatggtgggggtaatcactccacggttctcccccatgcgcatattgatctgtatgcctttattccaattaatctccttttgtgagttgatttttcagcaaaccttcagaggaagaagggggatktttttctttgtcccctacagcattctgtccctcagagcaccccctgaacctgcctcagtaagaccagcatgtggaaaggggagaaatctagtacacagcctcattcagtgcctgtcc

SEQ ID NO: 624161 - DNA, 605 bp, Homo sapiens
acagtagactttcccagaggccctggggagttagaacattttggaatttcactcttctgagccaactttattttctgaggttgaagaggctgggactcactactggaacagtatggtgtgcgctgcttgtggttggatgagaggggtttcccattggccaaaatttgagttgactgtgtgcctccaatgtcaccctttggagaaacacctgctgggaatttaataggtcctggaagaggtggagcatcaagattttgaaatttggctcgaagttccttgaagtttcttaccccttcctaaggcaragaataatcaaacaaacaaacaaaaacaaaaacaaacaaacaacaacaacaaaaacaagtgtctcattattccaagaaaaaaagtcagtgtgattagatctcactgatctcaccatgttaagggactctaactgctgatataacgcaattgcttctgggcaatgttagccagcaatgctattgtctatatgagatacaatgaaaacactatctctttcttaaacactccagggatgtttaattttcacacagcacataaagaacacctatatacagtactaaaaacagtggagaaacccc

SEQ ID NO: 624162 - DNA, 636 bp, Homo sapiens
tactagagatagaaggctgttgtattataaaatcaaatgccacatgttctcacttgtaagtgggagctaaacaataggtatacatggtcataaagatggaaataaccgacactggggactccaaaaagcgggagggtgggaggaagaatgaaggttggaaagttccctattgggtaaatgttcactgtttgggtaatgggtagactagaagcccatacctcatcattaggcaatatatttatgtatcaaacctgcacaggtacctctgagtccayaaaaaaaataaagaaccagaggctttgttttcatgtccaaaacacatctcactcaagaaagagcaagaagatgccttattgagttctatgcttttctttgtttagatgtgatatgaagttgcacacaccagtcaactatgaagggagtaatgatatttcaagacaaactactgcaagtaatctctattttgcagattttatgaagcagtcttccctttagaggaaaagataactcagggaaatgtactttacaaactgtgctagaaatacgttatagaaaatcctgactcttgaaattcttatcattgatttttaatttactgaataatatagcagtgatggtacattgattacccagctg

SEQ ID NO: 624163 - DNA, 636 bp, Homo sapiens
tactagagatagaaggctgttgtattataaaatcaaatgccacatgttctcacttgtaagtgggagctaaacaataggtatacatggtcataaagatggaaataaccgacactggggactccaaaaagcgggagggtgggaggaagaatgaaggttggaaagttccctattgggtaaatgttcactgtttgggtaatgggtagactagaagcccatacctcatcattaggcaatatatttatgtatcaaacctgcacaggtacctctgagtccataaaaaaaataaagaaccagaggctttgttttcatgtccaaaacacatctcactcaagaaagagcaagaagatgccttattgagttctatgcttttctttgtttagatgtgatatgaagttgcacacaccagtcaactatgaagggagtaatgatatttcaagacaaactactgcaagtaatctctattttgcagattttatgaagcagtcttccctttagaggaaaagataactcagggaaatgtactttacaaactgtgctagaaatacgttatagaaaatcctgrctcttgaaattcttatcattgatttttaatttactgaataatatagcagtgatggtacattgattacccagctg

SEQ ID NO: 624164 - DNA, 550 bp, Homo sapiens
atttactttagagattatgttaaaaatgtagctctaatcacaccattgaaacaaacaaaaatcccaggaagccaatttgcattggcttttaagacactttctcagactttttatttatttataccgacatgagcaaaacattttacttaatataactggcatagttttaaaaattttaataaattacatggccattgtgaccatgtatcttgggtttttcaaggtagttttgatttaatgtaatttaaaaggtgatgggaaaattcagaaccaaagaacaaaactcagtattataccctttcaaagtaaatttggaaatgataataaattctgtgtcaaatcacgttttgatctctgctttataaagcatggcacagacagttatttcatcctctcctgagtttaccctgctgccacgggctgctaggtaaccctctctatgtcaccgctctctgccttaacatctacaatggcattcattgcacygcacagcaagctgccttggacaaggactgcaggtgctcaataagttaatagtgacttggtgagt

SEQ ID NO: 624165 - DNA, 575 bp, Homo sapiens
acaaattttggattggagaattttgattatatcaacaactatgaatattagtctaggattttatccttttcatagtactttcaaatacattattctatataattttgtagacaagtagttattattagacacacttagagatgggaaatctgaaactcacagaagataagtgatttgctcaaggtcatatttcaagtagatgacagacctagactcaaattcaggtttccagtttaaagatttttttaaaaacctctgtcctatatgccattcaccatgactatggtaaaaagaaccaaactaacggttaggaatggggactctggagttagacacagtttgaatttgaatactgatyctactctgtctgtaaaatggggaagatgattaacagtaacaataccatgaagagtaataagtaaaaccaccactttttccagtattatgatacaaaattgcttaattattatttctgaagcactttatttgtaacttctctgtatttaataggtcctaacaaaatgtttcattattttgattaatctttaaaaatctccccaggggcttgttatttc

SEQ ID NO: 624166 - DNA, 575 bp, Homo sapiens
acaaattttggattggagaattttgattatatcaacaactatgaatattagtctaggattttatccttttcatagtactttcaaatacattattctatataattttgtagacaagtagttattattagacacacttagagatgggaaatctgaaactcacagaagataagtgatttgctcaaggtcatatttcaagtagatgacagacctagactcaaattcaggtttccagtttaaagatttttttaaaaacctctgtcctatatgccattcaccatgactatggtaaaaagaaccaaactaacggttaggaatggggactctggagttagacacagtttgaatttgaatactgattctactctrtctgtaaaatggggaagatgattaacagtaacaataccatgaagagtaataagtaaaaccaccactttttccagtattatgatacaaaattgcttaattattatttctgaagcactttatttgtaacttctctgtatttaataggtcctaacaaaatgtttcattattttgattaatctttaaaaatctccccaggggcttgttatttc

SEQ ID NO: 624167 - DNA, 575 bp, Homo sapiens
acaaattttggattggagaattttgattatatcaacaactatgaatattagtctaggattttatccttttcatagtactttcaaatacattattctatataattttgtagacaagtagttattattagacacacttagagatgggaaatctgaaactcacagaagataagtgatttgctcaaggtcatatttcaagtagatgacagacctagactcaaattcaggtttccagtttaaagatttttttaaaaacctctgtcctatatgccattcaccatgactatggtaaaaagaaccaaactaacggttaggaatggggactctggagttagacacagtttgaatttgaatactgattctactctgtctgtaaaatggggaagatgattaacagtaacaataccatgaagagtaataagtaaaaccaccactttttccagtattatgatacaaaattgcttaattattatttctgaagcactttmtttgtaacttctctgtatttaataggtcctaacaaaatgtttcattattttgattaatctttaaaaatctccccaggggcttgttatttc

SEQ ID NO: 624168 - DNA, 545 bp, Homo sapiens
agggcacctctaagtatcgtgacctcacatgactatattcaagaacatgaagggaaatgaggattctccctgcacatctctttgtttccatgccttcagaaaccagaagagaagtaggcaccagtttctataagttcccaaacttatagggtggtagttttccttagaagttacccaacagattttcctctgtatcttatccaccaggacagagtctcatgtctatcttcaaatgaatctctggaaaagtgaaagcgatgaccatggtgggctcagaaaaatgcttgttgagtgaattgatttttatggaaacaagcaatcttcgtttaggttgctaaacgaagtgtcacttctgagaacaagcaaaatgcatgcccaggttagggtaactaagtaaaaggaaatgaggagggaagagtaggaagaaggatcctgctttatgtttgttgccagctcatctactgaaacrcaattgtggtttcagtaacacagagtgataatatgctcagagtttgagggctacgcgagagcttcccaagcctggg

SEQ ID NO: 624169 - DNA, 541 bp, Homo sapiens
gtagagacagagtttcttaacacattggtcttggagataatgcatgcaaatgattaattagggtataatgtgatgagtgttatttacagcagtattgctcactgtcttggaaacagagaggatgaggaggttggttctcttggctgggagatgggttagagaagacctcgaaaagcagattttattaaattgtattttccaaatgtcagtaggagattgacagagtggataaaggagtatctggcagataaatcagcacaaaaaaaaggcacaggggatttggggaartgttcgtgtccttataagggtagcaaggaggctgctgataaggtaagagttgaaggaaaaagataagggaagacagcctggcgatgaggttgaaaaggtaaatgagaatagggctgagttatgaagggtcttgcatgcaaagcaaagagtttgggctttatttcttaaccattaggagtcaggccagggaaaaccctgatcacatttacatttcaaaatgttctggatagactgacaggacgagaccctggag

SEQ ID NO: 624170 - DNA, 587 bp, Homo sapiens
acaagataagagggggaggcaaggcaggatcatggatcacttcctctgtactaggcaccttgcaaggtgccggggaaactgaaccaggctagctcagtttggaaacatagctggcccatagaggaaaactagttcagtcatcagaaagtcagtgcttggacaggtgcttttcttttkgaagataaaactcacctaggttctggatagggaaaattcttcccaggctgaaagtaaagtggaaaatggttattttcataaatcaacctgaatcaggctctgttgtttggttacagatcattagagactacaccaaaaggtgagggggatgaagcctcagtagagagcaaaggcagacactgaccacagaaagttccaggaactgttgcagtggggctgaagatcaatcagaaatgaaaacaagcatttctgaagttataggtcatgcccaaaggaatgtatgatgtgactcagaaaaattgttgtatgcacacctttcccaaaatgcatcggaaacgtaaataacttctaaatcctatgagaaaatatgaatttgtgggatttaagcaatattttactgggcaaattgg

SEQ ID NO: 624171 - DNA, 587 bp, Homo sapiens
acaagataagagggggaggcaaggcaggatcatggatcacttcctctgtactaggcaccttgcaaggtgccggggaaactgaaccaggctagctcagtttggaaacatagctggcccatagaggaaaactagttcagtcatcagaaagtcagtgcttggacaggtgcttttctttttraagataaaactcacctaggttctggatagggaaaattcttcccaggctgaaagtaaagtggaaaatggttattttcataaatcaacctgaatcaggctctgttgtttggttacagatcattagagactacaccaaaaggtgagggggatgaagcctcagtagagagcaaaggcagacactgaccacagaaagttccaggaactgttgcagtggggctgaagatcaatcagaaatgaaaacaagcatttctgaagttataggtcatgcccaaaggaatgtatgatgtgactcagaaaaattgttgtatgcacacctttcccaaaatgcatcggaaacgtaaataacttctaaatcctatgagaaaatatgaatttgtgggatttaagcaatattttactgggcaaattgg

SEQ ID NO: 624172 - DNA, 504 bp, Homo sapiens
gtattttttcctcattagagaaataatatgtgtgtctggccaatatggtgacctaagcatatatgggaggcacactacccctactccaaatgcataagaattctagatgaaagatggcaatgcaaagacttgtgtaaagattatacagtccacacagaaatcaataaagcaaaatccccaggtgccagacatacagaggaaattcacaattaaagatgcaagtgagaactgcagtcaaggaacacaaagggaaattgagaccagataaagagaaatcttaatgactgggcagctggggatttaatgtctgagtcagaaggtaagtctgaaccataagcctcatctgaataggaaactgaaatggagctatcagcatcaagtccagagttacartatgctgttccatctgtaaaacgagtactaaacgtatccgtccactctcccagggaatgagcttggaagtttgctatctgactatggccataggaactgaaagagtcacca

SEQ ID NO: 624173 - DNA, 611 bp, Homo sapiens
agagtcatttttagactaagttcccatctttctggaattgaacaaatatgctatactgctagaatagtgagaggtcttttcttaactcctaggggggagaaacagcttaatagaacagtaatgttgatttttcttccatggtttttatttcaaatcattggcaattgctcctatacaataatcttgcataatgttgaatctgactcagtgcataataataattaggcattttcattttaggatattcacattccttggcactctacatagaattacatgattttcatttgattcaccactgaacaagtttgagaccttctagtataattattcataattattcactcccttattttattaaataccttcaaatgtgggtggggayacaatgcatgcctattctaggtcagcttttttcttttaaacacagaccaaggatatgttgagatgtgggattttatcaggtatatataattgtcatttgtcttttagttcagcaaactcatatttatgaaatataatatacttttgaattgtcaagttcgagtgacatccaggtagccacatagctagaacccctaaacaaaaactaacaaacaacagaacacatg

SEQ ID NO: 624174 - DNA, 625 bp, Homo sapiens
tgtgtaaagttcaaatcagggtgattgaaatatctatcacaattttctttatgttaagaacattcaaattattcacttctagctattttgaaatgtacaatagattattgttaattattgtcactctactgatctatcgaacactagttcttatttcttctatttaactgtttaattgtacccattaatcaatcagagaggcctttcttgaccatcctaagctttatttcactctcaaaccctcattattatcctaatactcttaaatttttgtttatagtacttattacgatgaaaataagtactstaaatgcatttttttggttacagtgttgttgtaatcatcattattttacttgaaggcctttgataaggcatctattcctcacttccacaggatcagccactccccactgcctgacacgggtcctagagacagtcacatgatctgcccagccctagaagacattgtgtttcccactctgcttggggtagaaactgcaaaaacacaaatacaaatatgtgtttccaagtactaggcataaaagaagtcatcggaaagattcaaaataagcttatcagcttttaataaaagctgatagacttattttaaaagcttatgagc

SEQ ID NO: 624175 - DNA, 612 bp, Homo sapiens
attatagatgagctttacttagtgatagtattattttgctaaaggcacatgtataaaactatagcattatgctataggtcatgactcacttgagactaaataagcatctttttccttttccttctcctacccctttctactttttcttcttagtctttaaaaaaatcttcctcatcttctttmttctctctcaaccaaaatgcttcttttaaaaaaatttatgtagaagtaaaaatgagcataaaatttccggtataaaatacaattattagtctaagagctagtattattgtaacttcagtttgagactctgcattttgttttctacatcattttagagactaatacattttaaaaaacaactattagtctatgtttttggacacacaatgtataaagatattttatgatatcaatagctgaaaggggtggggagtcagcagtataggagcagagtttttgtatctattgaagttaagttggtataaattcaaattagagtgtcataacttcaggatgtgaagtgtaatccccatggcaaccttaaataaaatggttatagaatatacacaaaagggaatgagaagaaaagtaaaacattacgctacaaaa

SEQ ID NO: 624176 - DNA, 584 bp, Homo sapiens
atttattcccggatgtaataatggattaacatatgaaaaccaatgtaatacaccacactaacataacgaaggggaagaaaaccacataattatctcaattgatgcagaaaaagcatttgacaaaattcaacatactttcattataaaaacattccacaacctgggaatagaagaaaattaccacaacataataaaatcatatataaagaattcacagtgaacgtcatactgaatagtaaaagactaaaarcttttcctgtaagatcaggtacaaggcaaggatgcccgcttttgccacttctactcaacatagtactggaaattctagccagagcaattaggcacaaagaaagacagaaaaaaaatccaaatttgagaagaagagcaaaattttctctgtttgaagatgatatgatcttatatgtacaaagtcctaaagattctaccaaaaaaacctgttagaactattaaactaattcagcaaattagcaggatacaaaatcaacacaaaaacatcagttgaatttctatgaagtaataaacagaataaacactctgaaaatgaaattaatgaaaaagaaatc

SEQ ID NO: 624177 - DNA, 584 bp, Homo sapiens
atttattcccggatgtaataatggattaacatatgaaaaccaatgtaatacaccacactaacataacgaaggggaagaaaaccacataattatctcaattgatgcagaaaaagcatttgacaaaattcaacatactttcattataaaaacattccacaacctgggaatagaagaaaattaccacaacataataaaatcatatataaagaattcacagtgaacgtcatactgaatagtaaaagactaaaaacttttcctgtaagatcaggtacaaggcaaggatgcccgcttttgccacttctactcaacatagtactggaaattctagccagagcaattaggcacaaagaaagacagaaaaaaaatccaaatttgaraagaagagcaaaattttctctgtttgaagatgatatgatcttatatgtacaaagtcctaaagattctaccaaaaaaacctgttagaactattaaactaattcagcaaattagcaggatacaaaatcaacacaaaaacatcagttgaatttctatgaagtaataaacagaataaacactctgaaaatgaaattaatgaaaaagaaatc

SEQ ID NO: 624178 - DNA, 257 bp, Homo sapiens
atcctatgactgtgtcattatgcctkattttcaagggaaagtcctgtgtatagtgacctcagccacagaaagttagtcacaaacatcttcttgtaggctttttggagaagggaagaatcattgcaaagcctttgtcactactggaaataaaaacagaatcttcctgatcaggcttcctcctcaaatatgaacattaattaacagttttctttccttcttggagaaactgtgcacaactttaagctttcattgaaaac

SEQ ID NO: 624179 - DNA, 563 bp, Homo sapiens
tgcaagcctacttcatctgatgcccaactgcagaaacagtgctctattcccgggctgaaaataaacctggaagttggatctattgagaaactgtatgtcagcctccaaaatgacatctttttaatgtatttccaaaggtaattttgctttatgtaacatttgccttataatctgtctttaagacttaacctcagcrtaaaatattatttcattctgctaccaaactgagattggtccaagatctttgaagcttatctctctgacctgtacagatgctgtcagcatcctcccatatgctctctgcattcaccactactgtacataccttctaacacaaactgccagcatctgcagctctacctgagggctcccctctggccaccaaggtctgctttgctcatctgtggggcaggccagaaatgctgagaaattagtgaatactagaaacagcccataacaatgactgacaggaagacggcagatgacaggctaactctcaggtgcatatttcacagtgtaccccagagttccctatcgggatgaaggtagagtttcccagagtg

SEQ ID NO: 624180 - DNA, 545 bp, Homo sapiens
tgttcctggaggagtgtgagtgctctttgtttatgcctcctccatgctgaaacattctgtgtrccaactgatgtgcagtgttcttggcaccctcaagacctgaaatgactggctctggaatatattgtattgatctcgcagtgacatttgtgcctctagcttgttccctggctggggtctgagatagatccacacacagggctgccttaggcttgaggtagtctgttgagtttgtacctctaaacattatttatcatttgattctctttagatgacctgtaattgttaattttcagtttaaaaaataaaataaaataatctgctttgtgtgtttcaggaaaataataaaaacagagtctgaccacattgattttatgtagactctacacctttttttaaggaataattattttatgctcagataaaaataatgtaaaaataatcggaaatattcatactcaggggaaacatgacctgtttcattcaaatggcagaaaatagtttctaaatcactttaaatcataagggtatacgcatagaaagga

SEQ ID NO: 624181 - DNA, 559 bp, Homo sapiens
cctccctgtgatttagaagtggaagggtctgaatttcattatagatacaacttccatgttcttctccttggctggggcacagggattttcttggaggggtcttgtcattactatgcagattgctttcctatcatttgaytgaaatttcaggaagaaggaaggtcattaatgtaacttcttcctcaatttctcattttagaaaatctggaagcagagccagtataattcagcattactgagcccactgagctctccagggaagtataaattgagcacagaagctctgaaatggattgtaaccacaacatcagaggtattctcaaaagatccattctcttggaaaaaagtttgccaagtggagctggatccacagctgccactcaaggcctgttttccgcagagcgctgttaaagagattttacctgcttcataacccatccagttgtgtaaagcagagggtgtgagggcagccactgcaggggtgagtgcgtgggtcattctatgggtctcttcagaaagagagctgctgttatatcagacctacaagaagcaaggcatg

SEQ ID NO: 624182 - DNA, 560 bp, Homo sapiens
tagtaataacttttagtccttcaccaagatagccatataacctggtttttcttaaatgcactactggcattatgaggaggataattcaattayttattgtgcacaaccaccaaggcaccatgggatgtttagcatacccagcccacatataattaaatgcaatagtgccctcatccccatcattctaacaaccaaaaaatgtccccatgtttccaagctgcctctcaggtgaacagtaccaacccctactttaaacccctgaacagaaagtgctgaaaggatagagtctagaaagtctatttatatctacatttctaaatagcacagcacaaataaaaacttcatccccttattttattttaagtcactgtaataaaatgtaggattcctttcggtttcctttatgttgcttaagctgccaaaacattcaggaattaattagtataatggtaacagaatccctcctcttcctacagaagtcagaaaaattcaagatacttaatcttcctaacatctagcagcaagggtattgcctatcacctatgtgtaagcaatgagat

SEQ ID NO: 624183 - DNA, 572 bp, Homo sapiens
caaagggaagactgatttttctagttccaagaataaaacttgagcaggttccttctctctacatgagtggactttacacagccttggatttttgagaaggtacagtacgttaaaaacataagccagctggccaggcgccatagctcacgcttgtaatcccagcactttgggaggccaaggcaggcggatcgcgaggtcaggagttcgagaccagcctggccaatatggtgaaaccccatctctactaaaaatacaaaaattagccgggcatggtggcacacrcctgtagtcccagctactcgggaggctgaggcagaagaattgcttgaatccgggaggcggaggttgcagtgagctgagatcacgccactgcactccagcctgggcaacagagcgagactctgtctcaaaaaaaacaaaaaaacaaacaaaaaaaacaagccagctttaatatggtctccccacaactgaccctcattgggaaggaaaagaggaagactcctggctaaaatagaaagttaaaagttacagttacttagccaattagacatacacattttaaacatagcatt

SEQ ID NO: 624184 - DNA, 390 bp, Homo sapiens
caggcatgagccactgcagcaggcttaatctttttygaaatgcaaagattaccagagtcatattcctttaaggatgtcccacaccagagccacctgggcctcaaagtgttagagctctttgattatgctcccctctttcaactatccctctttctcactctgacacacaccccacgaacactgagattctatcacaggcaaaggtgactagactgggttgggtcaatgacaaacactgagattcccttacaaagcaaagatgactaggctggggttggtcaatggacttcctaaactccggtcttcctattgcaaagcttcagcataatgcagaaagtctcattagaaaataatttaaatactagtggaactatggagaatagaagcaca

SEQ ID NO: 624185 - DNA, 529 bp, Homo sapiens
ggaaaatgtagggagcatgtttatgatagaaacttttctcttcctagccaaagccaaacaaaccagcatacaaacccctcgattacatgmaagctgtgggaagacaaggaggatgcaaaatggtatgattacaatggtgaggaggtgatggtgcagggcagacatgattgcaattcctgctggagaagctgtggcagctggggagcaagtcagttgcccaggtccagtgaaaaacgggcatgctaggatgaaggatgtcctggcagcagaggctctgatgattggaactctccatctgtccattgagtttcccctccaatgactacagatttgtggagttgcgcatgcacccctagataggggttctgggagacttttagctttgatcatttgaaacctatggatttaatgtttgttgtatattttctctataactaaatccctctctacaagttatatcaatagaatatataatgtggttgggcaagccaccacttttcccatttagcagcaagttgcataagtgctt

SEQ ID NO: 624186 - DNA, 529 bp, Homo sapiens
ggaaaatgtagggagcatgtttatgatagaaacttttctcttcctagccaaagccaaacaaaccagcatacaaacccctcgattacatgcaagctgtgggaagacaaggaggatgcaaaatggtatgattacaatggtgaggaggtgatggtgcagggcagacatgattgcaattcctgctggagaagctgtggcagctggggagcaagtcagttgcccaggtccagtgaaaaacgggcatgctaggatgaaggatgtcctggcagcagaggctctgatgattggaactctccatctgtccattgagtttcccctccaatgactacagatttgtggagttgcgcatgcacccctagataggggttctgggagacttttagctttgatcatttgaaacctatggatttaatgtttgttgtatattttctctataactaaatccctctcyacaagttatatcaatagaatatataatgtggttgggcaagccaccacttttcccatttagcagcaagttgcataagtgctt

SEQ ID NO: 624187 - DNA, 649 bp, Homo sapiens
acctttgatatttgacaaactttccaaaattraattataaattacatctttttctgacttaattaatcttttagatattaggtcccttaaagttcaaaaatcacatttggcttattttatataaaaatcatacaggaaacattgtcaaacaggaaatggtgttcaactttccttagactgtatttgtataaatgtgttattggtatgtgttgcaaaattatgggaaactactataattctgatatggctttgcataggttatttatacttataattgttatgtaaaattgttgtatgccacaaaaataaccaaaattctactcagttgtgtttttaacagaggcttccttaatttgtcatccatggacaattcttgtcttgttttgatcctcatgagaagatggttttctaatcaactatagaactctaataggtgctcttaaatgcaggtttctgataactttggagactgtcacattagaatagcggaaaaaactttcaggactctcatagagagctggaattttcatgaatatcaagcagaacagaggttaactgcatggactgaactaatagaagactgaagtaatccttttggcttctttgcttaaaaagttgctaatcttttgttttatttttcagagtcaaa

SEQ ID NO: 624188 - DNA, 608 bp, Homo sapiens
aatcctatcaaaatataatttcagaaaagttaaaaacataacctatgtacaaataaaaggagcatgttttaaagatttacatcaataatgaggaaaactccaggtgataaaactgattcaaaggagaactygagaaacagagagttatatatcctatcaggcaaagcatgcagaaataaatttgctaaattggagacaaaacaatttaatatcatacagagcaacaaaaccttacatttttgagttatttagttattggcagaaataattgtcatttctactgaacaataatctacaagttaacatgtattttaacagaatttgctccctaatcaaaggaatatttcctaaaaaccaaataatccttggtcttattgaacaatggtacactatgattttgaaagcatatgtagtccttcattgttttatttttaagttttgaatgatttttctaacaccaaaatcctagaaatattgtgcaaattagaagcaacccaatgcctggcatataacagatgctcaacaaatgatagttaagtgtctattaggttttctccatcttcccctatataacttattcaaactgtaacgaagtcccaaaaggaaag

SEQ ID NO: 624189 - DNA, 627 bp, Homo sapiens
caaaaagactatccagtcttgtcaaccagtaaagtaagctattgtgtcttcatttagaatgtgattttctaaaaagtgaatgacttatacatataaaaggtagtagaaatcaaaacaaatatatttattatatgtaaatattttagattcttcatggtaaatgagtttactgatcttcttgagcaagcagatcacttgactttaaatagtaattttttccttctggggttatctggggagatctggagacattttcaacagtcatgactgggaagagggtgctactggtgtctagttggtagagaccagtgatgctaagcaygctttgatgtgcacaacgcctctcaacaacacagaattgtctggcctaggatgtccatagagtggaggttgacaaaccctgctttagaggtgcctgattatcatgtactgctttgcagggtacagcactaatagccatcactatgctaaaatattaatttgcttaggaataagttgctaacatatagtccaacacatctaattactttccaatggaaatggctatacacttacaggttgtgctatattgttttctgccaactctttttattcagtcctgtaatcattttttcctaaaagtgtttt

SEQ ID NO: 624190 - DNA, 500 bp, Homo sapiens
tattacaatgaaaccagaaaaacaattcaacacatcaatgaaaaatttatcaatgagataaatgttttttaaaacaaccaaatggaagttctgaagttgaaggatttatggaaggaaatacaaaatacatttgaaagcttcaacaatagactagattaagcagaataaaaaatcttggaatttgaagacaggacttttgaattaatccagccagaaaaaaaaataaagaaaataataataattaaaaaatgaacaaagcttcatgacatttgggaccaaacaaagcaacaaaatttgtgaattgttagtatccctgagggtgaaaaaacaaagaaaggattaggaaatctatttaataaaataacaaattttaaactttacaaatctagtaagagatttagacattcagacacagaaagctcaacaattcccaggcagatgcaatgcaaaagacyttctcctttgttataatcagactgtctaaagtcaaagttaaagag

SEQ ID NO: 624191 - DNA, 580 bp, Homo sapiens
aaaaacagcaatagaaaagcatccagtcatgtttaaagaaaacctctacagactaataatggatttctcagcagaagccttataggccagaaaaggatggggtgatatattcagagtgctaaaagaaaaaaaacctgccatataaaactactatgtccatcaaaattatccttcttaaacaaaggagaaacaaagtcattctcagataaataaatcctgagagaatttgttacccctagaccagtcctataaaaaatgctcaagagagtcctaaacctggaagtgaagcattatatttaccatcataaaaacatatgaaactataaaactcactcataaagcaacaatacaaaggaggaagagaaaagactcaaatggtaccactatgggaatccacaaatccatgatgaactgcaagagaaaaagaaaggagctaagacaaccagaaaacaatccacaatatgacaggaaggaagcctcacatgtcaatatattaaatataaagaattaaattctcctcttgaaagatacagaatggctgaatggaaaaaaacaygatccaactatgtgttgctaacaa

SEQ ID NO: 624192 - DNA, 563 bp, Homo sapiens
tgatagaaacagaatgcaggccagcaggcagcccagccagcactgtgaaaatgtgaataagcacattcggtaaccaacatccagtcatggacacccgctgaacaggatgcttggttttcattaatctgctagaaagtggaatgtttgcttgtcccatgtcagagagatatgggatgactacctagtaaaagaagtcatttctttttctttaaagagggtaggactgtatgatggtggagtggaaagaaagtgagacactctttctcactcttgatctgcttcccaaatgacaggcgacaactgggaaaataaaatgcaagaacttattttgtctggagtctatgccctttttataaatcccacaatgataaaaacactgaggcaaaggacagtgatgttggtaataataaaaagagaataacccatgtctgtttttgttgattatggagagctcttactactgcgttctttctggtagccagacctaaaatatggtctcttcctgatgtccstttctgtggattcacagcctcaaggatatttgctcaaaagattttattcct

SEQ ID NO: 624193 - DNA, 557 bp, Homo sapiens
ggaggtcctcaatgtacatcagccttcactcaacaktagtttttgtttcatggtgtacattattggcccttgggtggaaatagagccctgaaatatctcattgtcttttacttcaataagtcccagaggaagagagttgtccagtaaagttctagaatcttgttagtgcttaagagtgcacattagtaattatagtataaataaattgcttccaatttactctaggataatttacacttaggtgtaatattaatccctatcctttgtccccagctttcaacccagaaggtgaataattttacaataattcactagatggcatgtctggattcagtgtaaaaacaatccttcacatagtaagtctgtgcatctgtttggttatgcttcttggtacctgataccacataacagataggaaaaaaataatagttggtatcatgtacatttggtaaataccaatttttagtgatttttgcagaaaaactataataacatatacatgaaaattactatttattgaagcataatgcacagtaatgtacatgtttccatgtagc

SEQ ID NO: 624194 - DNA, 578 bp, Homo sapiens
ttcaacatataaatgttgggaggacacaattcagtccataacttcaaaattcaaaatgtaagagggataatcattagagaaactacaagccttaaaagaataataaaagaatattatgaawaactttttgttgatatattaggcaatttagataagatgcacaaatttcttgaatgacagattgccaaatctgattcatgagaaaatagaaagctgaataatgctacattaaatgaattgaatttgcaattaaaaacttccccattaagaaaactgcaagcccagatgacttaactagtgaattctatcaatcatttaatcctacacaaactcttaaaaagtagaaaaagaaagaatacttacctgttcattttattatgtcaacggattaagtatctgttgctgcataaaaatagaataaaaaatctcatgtaatactataagcaagatctttggctagatcagcaggcatcccagggttcgactcagagctgatttgcttctaaattcatttacatagatatcatgaggctcagaagatgtgcttccaaactcactgatgttccggactcacagat

SEQ ID NO: 624195 - DNA, 569 bp, Homo sapiens
gtagtatgaagtgccagaggactttataaagttttagtcccaaggactctaacgcagctccagcagaaggtccaaatacttcatatggtctataaaaagaaaaaaaaatcctagattttcttgaaataaacaaaagcaataggcaagttcaaacattatcaataatttacatgaattttctyaggatatatgtctttaatgttaaaataaaagtttcaaacatctcaatctgcatagaattgagaagcatgtagcaaactatctttaccttaagtcaaaaccacaaaaacttccatctgttggatatcatccatgattacgctctttcctataatttctgatatagggttccagaaatttgggaatatcaactggaaatgagcactatgtaaaatgctactactctggacagcttttgtcattctgtgaaagactccttttgaaaaaaaaactaaaatacatttttctccaaggtgatttaacttaaataagaaaaggtgactattagagggaagaccataaaaaattgttccggagaattgtgttttcattagttgtagtctttaaaa

SEQ ID NO: 624196 - DNA, 388 bp, Homo sapiens
agaaggggagggaagggaagcgaaggaagaagccagtggtgaacgaataattttttctatgttgaaaacctaatcgccaatctgatggcattaggaggtgggaccttcgagaggtgctatgttttgaatatttctcctccraaattcaggtgttgccaatgtgatggtaagaggtagggcttttaagaggcgattaggccatactaattaatgagggcttctccctcattaatgggattaaggaaaagacttcattcaatgtttgactagcttgctgctcacccctctatcatccatcatgtgaagatgcaacaagaaggccctcatcaggcaccagatgctggcatattgatcatcaactttctggcctccagaactgtgagaaata

SEQ ID NO: 624197 - DNA, 194 bp, Homo sapiens
ctttccctctctctccatatatatgggctagtatgtatatatatatatatatatatatatayatatatatatatatatatatatatacacacacacatatattatttctttgtggggcttgagaccagattatagcaacgagatccatgatagttaattttagatgtcagcttggcttggctatggtaccccat

SEQ ID NO: 624198 - DNA, 469 bp, Homo sapiens
ctagctatatttgatacattttcatgttgtcttcatattattgttttaaaggatattccatttctttgctccatctctccacgactatagttgagggctaaaagacaaagagaaggagaggactaggggaccagcgatggggcagaaaagaaggrtcctgagacataagaatctgtaatatattcgtggacatatttttgaatatgtaaaattattgcaactgcattcttatacctcctcccggttatccagaaagtgggctttaatggactttcagcaaattgtcctgccttcttccccacaaacccatgcactgccaataatgagtcctggaatcctaggaattagggttggaaaggatgtcagaatcctctcatccagtgaagccactgcagcatgagtcactgagtccctccgtggacaccctgggtgaggtcctatgagagcacttgaggctgcctctcctgcc

SEQ ID NO: 624199 - DNA, 649 bp, Homo sapiens
gggaccagcgatggggcagaaaagaaggatcctgagacataagaatctgtaatatattcgtggacatatttttgaatatgtaaaattattgcaactgcattcttatacctcctcccggttatccagaaagtgggctttaatggactttcagcaaattgtcctgccttcttccccacaaacccatgcactgccaataatgagtcctggaatcctaggaattagggttggaaaggatgtcagaatcctctcatccagtgaagccactgcagcatgagtcactgagtccctccgtggacaccctgggtgaggtcctatgagagcacttgaggctgcctctcctgccattgagcagcaaccctctttagaagcacccctgggcccagcactctcactcctggaaccctgcagaatactgcccaccacatccagatactgttccctcaagtggtaaaaaagagctctcatatgcacctgagtatcctcattcaccaactaaaacatcccaggctcctaccaagagcctattttgcatggcttcctgtccstttactttcccaaatgttcacctctgaatcccttccagtgagctagcttcctcttaatggtgttgctgctatcttttcttcttactattaaaaggacaaatgtt

SEQ ID NO: 624200 - DNA, 386 bp, Homo sapiens
tttgggaggcacaggcaggaggatcactggaggccaggagtttgagaccagcctgggcaacatagcgaacccctgtctctaaaaataaaaaataaattaatttatttattaattaaaatcaaacaaacaataaggaaaagcatggtttgagaacatgaaattatgttcgagtaggaaaaacaagaaaggaaaggtttcattcaaaactagtctctctatacagaatacttggaaagatgcttcctgttcttgaagaggattattccytttggtttgccagttttgtgtgtgttggtggttggaaggcagattacgaacacagtacattgcatttaaaatattgttattgaaaaacatgattcaatataaatactgtcatttaagat

SEQ ID NO: 624201 - DNA, 497 bp, Homo sapiens
cctcccacctcagtctcctgagtagcttggatgataggcctgcaccaccacacctggctaatttttgtatttttttggtagagacagggttttgctatgttgcccaggctggtctcaaactcctgagttcaagtgatcctcccacctggtaaaataaaaacttcagccaaattaaatttaaaggagtttaattgagcagtgaatgattcgtgaaacgggcagcccccakaatcacagcagattcacagagactccagcatagccacgtggtggaagaagatttatagacaaaaaaaagggaaacaacgtacggaaattggaagtgaggtacagaacagctggattggttacggcttggcatttgccttatttgaacacagtttgaaccttcagcagtgtatgaattgttgaagtatggccactgggattgaccaaggctcagctattattataggcacatattcctaagttacgttttgaatcctgtctacctatta

SEQ ID NO: 624202 - DNA, 541 bp, Homo sapiens
caccaaccatgtcttgctttaactaaaatttggagttcaggcttgcaaataggtctgttccagattggtaaattatgcaacagtttccaaggtgacactcaggatcctgtggctgacttctccaaagatgacttattccttgtagacagttttatgaagcccccactaaagcaggtggatggacaaacaaccctactgccctttcatgttagagatatttgatgtcttcagtaagaaaaaggaagctgcctgccagctgctttccataagcaattcgctcagaggatgcagtttgtacttcttagtgcagaatgagatgaatacacttkaggtttctttcttttcttttcgctttttcttttctttctttttttttcttttcttttcttttcttttttttttttttttttttgagacagggtctcactctgttgcctaggctggaatgcagtgatgtgatcatagctcattgcagtcttgacctccaggccccaagcgatcctccctcctctgggtagctagaactataggcacacgcccg

SEQ ID NO: 624203 - DNA, 541 bp, Homo sapiens
caccaaccatgtcttgctttaactaaaatttggagttcaggcttgcaaataggtctgttccagattggtaaattatgcaacagtttccaaggtgacactcaggatcctgtggctgacttctccaaagatgacttattccttgtagacagttttatgaagcccccactaaagcaggtggatggacaaacaaccctactgccctttcatgttagagatatttgatgtcttcagtaagaaaaaggaagctgcctgccagctgctttccataagcaattcgctcagaggatgcagtttgtacttcttagtgcagaatgagatgaatacacttgaggtttctttcttttcttttcsctttttcttttctttctttttttttcttttcttttcttttcttttttttttttttttttttgagacagggtctcactctgttgcctaggctggaatgcagtgatgtgatcatagctcattgcagtcttgacctccaggccccaagcgatcctccctcctctgggtagctagaactataggcacacgcccg

SEQ ID NO: 624204 - DNA, 496 bp, Homo sapiens
tgattctcctcttccaggagtctgaatgtctcttggttcacttccacagactccagtggttcttgaatttccttttctagaggattcattgccccctgatttatttcttctggagtcacagtggtgcttgagtttctggagatttcagtgtttccaggttctcttgtccgcagactttcagtgatctaggatctctgttctaaagattttactgcctctaygctctcttctttgagtgactttaagaactcttgattctcattttcaagaggtctagctatctcctggtcaagagacttcagtggttctagatccactttttctgggggtcttaatgtcatctgatcctgttcccctagagacctccgtcgctgttgagtctctttttcaagagttctcaatgtctcttggtcctgttcttctaaagacctcagtgatttgtgattctctgtttctagaggtctcacaatactctggtcctcttcttctagagtct

SEQ ID NO: 624205 - DNA, 641 bp, Homo sapiens
ttctttattgtgtcctttgatgcacaaacattttaaatgttgatgaagttcaatttatttttttcttttgtagtttgggcttttggtgtcatacctaagaacccattgccaaatccaaggttatgaagatttacccctatgttttcttctaggaattttttagttttaactcttacatttaggcatttaatccattttcagttaatttttctttgagagagagggcttcattctgtcattcaggctggagtgcaatggtaccaccatggctcactgcagcctcaacctcctgggctcaagtgagcttcctgcctcagcctcctaaagtgctgggtttacaggcatgaaccactgtgcctgactgagttaatttttgtatatggcatgaggtaagggtgtccaacgtcagtcttttgcatgtggatatccagttgtcccagcactgtttgttgaaaagactatccttcccccattgaatgattttggcactcttgtagaaaattattgtatcatatatttatgggtttacttctggactttcatttgtattccactgatttctatgtctgtcttcctgcccagcactatactgccttgaataatgtagcwttgtggtatgctttgaaatcaagaattgtgag

SEQ ID NO: 624206 - DNA, 631 bp, Homo sapiens
actcacaggtttcctggctcatgtgacctcggacatgttgttttcaccctcaggtctcagtttcttcatccgtaaaagggccattgtaaataccgagtaagctagaacatgaactgcctggcatccagcagcccaagcctgcgtgaaccacaccagagggacatcctgcrcaggccacctctttctgcttgcttcttcttgtcttcctcaccacccctcccatttgcttctgccctcatccagattttccagtcttggcctttgttcagccaacatttgttgttactctagccctgctgtaaactcagtgaaaataacagattgcccaggtgatggaggttaatatcaacagcaagaagtcaaatacgagttattaatagaaatcatgtacccttcagccgggtgctcatgcttgtaatcccagcactttgggaggcgaggtgggcagattgcttgagcccagcagtttgcgaccaacctgggtaacacagtgagactttgtctctacaaaaaatttaaaaaaaaaattagctaggtgtggtggcatccacctgtggccccactacttaggaggctgaggtggaaggattgcttgagcctagaaggttgaggctacagtgagctgagatca

SEQ ID NO: 624207 - DNA, 471 bp, Homo sapiens
ccctctctgcttctcccaactaaacacccatgattttgtgctgtgatttgttttcttgtctgtatctaccaatagactgtaattttaatgagagaaggmgatgtttttatttggctaggtgaggctggtaaggcttattacttatttatttactcatgatgatacaaatgatatcagcatgttttcaaaaacttagagaatgagaggaatgtccatctccctagccactaaaatgcctcaaggatcctttatctctgctttatttttaatgcattctttttttttttttttttttgagacagagtcttgctctgttgcccaggctggagtgcagtggtgcaatctcagctcactgcaacctccacctcctgggtttaagcgattctcattcctcagcctccccagtagctggcactacaggcatgtgccaccatgcccggttaattttaattttaattttttgtagagatg

SEQ ID NO: 624208 - DNA, 471 bp, Homo sapiens
ccctctctgcttctcccaactaaacacccatgattttgtgctgtgatttgttttcttgtctgtatctaccaatagactgtaattttaatgagagaaggcgatgtttttatttggctaggygaggctggtaaggcttattacttatttatttactcatgatgatacaaatgatatcagcatgttttcaaaaacttagagaatgagaggaatgtccatctccctagccactaaaatgcctcaaggatcctttatctctgctttatttttaatgcattctttttttttttttttttttgagacagagtcttgctctgttgcccaggctggagtgcagtggtgcaatctcagctcactgcaacctccacctcctgggtttaagcgattctcattcctcagcctccccagtagctggcactacaggcatgtgccaccatgcccggttaattttaattttaattttttgtagagatg

SEQ ID NO: 624209 - DNA, 471 bp, Homo sapiens
ccctctctgcttctcccaactaaacacccatgattttgtgctgtgatttgttttcttgtctgtatctaccaatagactgtaattttaatgagagaaggcgatgtttttatttggctaggtgaggctggtaaggcttattacttatttatttactcatgatgatacaaatgatatcagcatgttttcaaaaacttagagaatgagaggaaygtccatctccctagccactaaaatgcctcaaggatcctttatctctgctttatttttaatgcattctttttttttttttttttttgagacagagtcttgctctgttgcccaggctggagtgcagtggtgcaatctcagctcactgcaacctccacctcctgggtttaagcgattctcattcctcagcctccccagtagctggcactacaggcatgtgccaccatgcccggttaattttaattttaattttttgtagagatg

SEQ ID NO: 624210 - DNA, 521 bp, Homo sapiens
aaagcatgattgctaaaataacttcagctaccaattactgaacaagggttgtgtgccaggtactgtcctaagcaatgtacaaatattatttccatgtgttctcaagggtcgtgtagggtaagtatttatttttcccatttcaaatgagaagtttgagacttggaggcatttagtaaaatctcactcaagaaggaagttggtgtttgagccaaatctttttagctgcagttgcatcccttgaacactacatcacataaaactgtcatagctgtgygagttatcttgaagtctttgtatctgaggcagggaaaatataaatggagagagcctaagcacagtggcaggagtgggaagagaagtgagaatttttatgtaatccatcattcgggcatttagctcttgacacaatgttgccctccccaacttctgtctcactggatatctttagattaaagaaataacataaattttgcatgagacttttcgaaatcatggaagagtatgccaaaaatccataacat

SEQ ID NO: 624211 - DNA, 521 bp, Homo sapiens
aaagcatgattgctaaaataacttcagctaccaattactgaacaagggttgtgtgccaggtactgtcctaagcaatgtacaaatattatttccatgtgttctcaagggtcgtgtagggtaagtatttatttttcccatttcaaatgagaagtttgagacttggaggcatttagtaaaatctcactcaagaaggaagttggtgtttgagccaaatctttttagctgcagttgcatcccttgaacactacatcacataaaactgtcatagctgtgtgagttatcttgaagtctttgtatctgaggcagggaaaatataaatggagagagcctaagcacagtggcaggagtgggaagagaagtgagaatttttatgtaatccatcattcgggcatttagctcwtgacacaatgttgccctccccaacttctgtctcactggatatctttagattaaagaaataacataaattttgcatgagacttttcgaaatcatggaagagtatgccaaaaatccataacat

SEQ ID NO: 624212 - DNA, 564 bp, Homo sapiens
ttaaatgtcccatgtctgagattccttatctgtaaagagaaaagataacagtaaaggcatatctcattttattgtgctctgatttattgttcttcacaaatattgtgggtttttgtttttgttttgttctttttgcagattgaaggtttgtgacaaccctgtgtccagcaagtttactggtgccatttttccaatagcatgtgcttgcttgctttgtatcyttgagtcagattttggcaattctagtaatatttcagaccttttcattattatcgtatctgccatggtgacctgtgatcagtgatgcttgatgttattgtcgtgatcgttttgggatgccacaggccatttcccatttaagatggcaaacctaattgataaatattgtgtgtgatctgactgctgcatcttccactcttcaggcttccctattttctgagctacaacaatatcaacatcaggccaataataaccctacaatgacttctaagtgttcaagtgaaaggaagagtcccaagtctctcaatttaagcaaaaaactagaaaatattaagcttagtgagg

SEQ ID NO: 624213 - DNA, 545 bp, Homo sapiens
cattttatgaatctgtttacattcctggttaatctactagaccatatttgtcaaatgcagggataayatcatattaacttccttatgtgttaagaacggggcttgacatataaaatacatgtatcttgaatgaatgacttaagagtttattattgatgtgccattttaagtacccaagcatcaggaacaggcatttattaaattctacttatttaggacttttgctgcttatgggagggtccttgtttctcaattttgagagttttcaatgcccctatgtgacctagatttgtttagaagaataccttaactttttacaaatacagatatgtaactcaaattccttaatgtactattcaatataatttattgaatattatttcctagatattataatttttaaataatattcagttcttctgtcctttaatgaacattttaattttccttcagaaaacaataattcaaattgtattggatgttgaattccaggagttctcccaatttcccccctactcaccccttttaccataaccttatggttg

SEQ ID NO: 624214 - DNA, 483 bp, Homo sapiens
gaattcccctcaccatcaactagcacctctgcctgtttaggtggcttacatatgggatgatctggacatggttttgagccccatgatcaccacattcttttcagaccatarcactgaacttgtatttttatcatcaaaattgagcaagagagtaccaagagacaccgaattacttgactggtgaacatatttcctgccctcattctgtagcagcagccgaacctgtgcctgatgatccatgttggttatatttgccaggatgttgacccttctcacttcctgggtcttgtctcaagcaacatgacatgacggggtggtagccatagcttgagatttaatgggcttcttattgtgttatctagatgaagcatttcccctttagaaaccaggatttctaagtcgcagagcccagagttgtaggaacagctgtgggtcacttaggagtgatgataagtgggatcacttacacttttacaccttccc

SEQ ID NO: 624215 - DNA, 449 bp, Homo sapiens
ggttttgagccccatgatcaccacattcttttcagaccataacactgaacttgtatttttatcatcaaaattgagcaagagagtaccaagagacaccgaattacttgactggtgaacatatttcctgccctcattctgtagcagcagccgaacctgtgcctgatgatccatgttggttatatttgccaggatgttgacccttctcacttcctgggtcttgtctcaagcaacatgacrtgacggggtggtagccatagcttgagatttaatgggcttcttattgtgttatctagatgaagcatttcccctttagaaaccaggatttctaagtcgcagagcccagagttgtaggaacagctgtgggtcacttaggagtgatgataagtgggatcacttacacttttacaccttcccatgttttattcctactggggacatacataaagtct

SEQ ID NO: 624216 - DNA, 614 bp, Homo sapiens
actcagactgcttaagtcctgaagggtctatgcccctcatctttgcacccaaggaccttcgtaatctgacacttgcatctcacctctcatatcctagcctctgtattcctattagtcctactgactcctgctagtcccaggtttaggcctttggacaacttttttcctgtcacattctttcctcctcctgagccaagttcttcctgccttttaaacagccccatctaattctgcttccttcacaaacccttctctgacaactctccctatcctaacctctcctgtttgttgttatttatactcacaactcatgtacaaagatatgatattctttaattatttttaactaaatatatctttgcacataaacctccatttctgctaatagtgttaatcctgtcaayttactgtaaacaagtcatttccagggtcagttaagtttttcatgttattgattcaagactcccttccatccttttcttctctttcttttggttgatgatctgcattccaacaaagggattggcctgtaggcccccgttttcctcactgaccaatgacagttttatgtggtctgtaccactatgtattggtatctcctagtattcatagtc

SEQ ID NO: 624217 - DNA, 584 bp, Homo sapiens
aggataaagtcaaccttgcatgactcatgagttacatagggttaatgaatggaatcaatgttttatttgaaaacagggtgtggaaataagaattgggaaggcttccaactgtgtctagcacagtccattatcctggaatctggaaatgctttgtagaaaactggtccactgggtaaaccttgaattggatttccccctaagacataaagcttggatacaatgattgtaataattcttattataagataratatcttggttctaaaataaattgtaccataaatttgtctggttttgagcaatattgttgatttaaaattctgccccatctatttggggcattaaatgcaatcttttattgatatcttttctgcaagcaaatgttaatgaaaggttggactggagaggcaggcaggcaggaagatgacttcccgccttctctcttcaagcagattgatacttctttataccactcacagattgaaggccaacagtctatcactttcccatcaagagatccttgttacaaaaaataatgctaaaatgtcttagttttatagctagtatttttcaggcagggcataa

SEQ ID NO: 624218 - DNA, 531 bp, Homo sapiens
acaataataataaaattgcttttattataaggtttccacatggtagccactggactaggtgatcatacatggtttctcttctttaatcctctcagcagaactatgaggggtcactatcattatctccactttgtgcctgaatattattttccttttgccctgcagctgtgtcccttttgctatccagctatctattgagatagtttttgtgttgtctggaaacttctaattccagatgcattaatgtttcattttcttaaggcttttcttattttatacctctgctaccctcaagattcttaggatgttgtttttatttaaagtactgaagtattctactagttctactgtttacttataattttaatttttttggtctttttttatttttttaatgtttttggtttacccccaaatatttggtaatttgatttctgtctcttagcttttgraaatcttcttggtgggggtggtatggagaagatgtagattctaattattggtgctctaaaataaaaggaaaaggaaata

SEQ ID NO: 624219 - DNA, 631 bp, Homo sapiens
gggtcttagcattcactgacatcacagaactcttggaatttctctgttctgtccttctacctcaagtcatcagacctgtatatccagcaaaaaatcacagaaatatgtaaaacaatctggagtttctctttattttaccaaaaataattttcttcctgtgacctttaggttaacatgactttttagtcagttattttaagtgccagctattaatcttttgcctgagtaaacacaatgtctaatgtttaatacttattaagaaattcagcatggcatcactaagagctatacatcatttaaaaataggaattttcagctagttgaaaaaaatctcacttcagctctgcagtagctatgattgaatttgcttataaacaataagatgtattctggaatcttggccccatttaagagattgttaattgccagcattcatttcatcttgaggtttcagcccattcatwgaatgcccctccaaaaattgaagacaaaatacataaccatagagtcttacagagagtcagatttgtatcttccttggcattttgttggaaaactttcactttaaaaaatgctttacattcactaaaataacaaaaccaagagctatagctcataaatcaacaaagga

SEQ ID NO: 624220 - DNA, 579 bp, Homo sapiens
cacttaatggtggctaagagctgcctcattagctatattagttcattagacaaagacacatttattaaaaataagaagcaggtggaatgtagtggtaacgcagatttaatttgttcaaaataactacattgtgggtttggaagtataagagaggttgctctgtgatcctttcctgccaaacaaagcctcactatgggttgatttttagcaataaatataaagagacttgaaaatgtcagttttgtataaagctaggatgattgttattcagtgttttattcttttactattaaattttagaaatgcaattttacatttctaatagtaactactttggggtttggcaattggtaagcaatgaataattgttgaatacttggatgaagagatgaatgaatgaggtatcagttctgttctcaggacytaagaagtatggatagataaagcaagatttttctccatctactgaatgaacacggcagggtcagcagtactggacaaagctatgacacatttagaatctgacagcattgaatgcacacagcagagcaattacagctctagttccataggcaaccc

SEQ ID NO: 624221 - DNA, 588 bp, Homo sapiens
ccagaaaaaataaaatttaagaaaaaatcccttactagagacaagattattttataataataaaagggttaatccactaagaaaatataacaataatacacaaatgtgcaccaaacaacagggtcccaaaatacatgatgcaaaaacttacagaagtgaatggaaaaataatatttgaagacatcactttcccactttcaataatggatagaacagccagacagaagatcaataaagaaatagaggacttgaacmacactataaaccaattaaacctgacatgcatatacaaaatatttcactcaataacagcagaataatacattcttctcaagtgtacatgagacattctccaggatgaagcctgtgttaggccataaaaagaagtttcagtaaatttaaaagaattaaaatgataaaaagcatgttccctggtagcaatgaaatgatattagaaaccaataatagacagaaacatagacagaaatttggaaaatttacaaatacatgtgaattaagcaacacacacctaaataggacaaagatctaacaagggacgttagaaaatactttgaaataaatgaaaat

SEQ ID NO: 624222 - DNA, 588 bp, Homo sapiens
ccagaaaaaataaaatttaagaaaaaatcccttactagagacaagattattttataataataaaagggttaatccactaagaaaatataacaataatacacaaatgtgcaccaaacaacagggtcccaaaatacatgatgcaaaaacttacagaagtgaatggaaaaataatatttgaagacatcactttcccactttcaataatggatagaacagccagacagaagatcaataaagaaatagaggacttgaacaacactataaaccaattaaacctgacatgcatatacaaaatatttcactcaataacagcagaataatacattcttctcaagtgtacatgagacattctccaggatgaagcctgtgttaggccataaaaagaagtttcagtaaatttaaaagaattaaaatgataaaaagcatgttccctggtagcaatgaaatgatattasaaaccaataatagacagaaacatagacagaaatttggaaaatttacaaatacatgtgaattaagcaacacacacctaaataggacaaagatctaacaagggacgttagaaaatactttgaaataaatgaaaat

SEQ ID NO: 624223 - DNA, 555 bp, Homo sapiens
ctattcagcctttaaaaagaaggaaattctgtcatttgcaacaacatggatgaacctggaaaacatccattatttgctttgattgctgaaggaatcaaatgtacttgaaatcaaagggctggaggacattatgttaagtgaaataagctacacacaaaaagacaaatagtggccaggagcagtggctcactcctgtaacccagcactttgggaggtcgaggcaggcgaattgcttgaggtcaagagttcaagaccagcctgaccaacatggtgaaaccctgtctctactgaaaatacaaaagttagccgggcatggttgtgcaagcctgtaatcccagctactcaggaggctgaggcaggagaaccgcttgaacccgggaggcagaggttkcagtgagccgagatcgcgccattgcactgtagcatgggtgacagagcaagactccatctcaaaaaaaaaaaaaaattgtgtatgatctcacttatatgtggaatctaaaaaagtgaactcatagaagcagaaagtagtatggtgattaccagagtctgggtgtt

SEQ ID NO: 624224 - DNA, 583 bp, Homo sapiens
ccatgtgttcttatactatttgtgaaatagtataattttacttcagagtagacaatggtaagtagaaggtgtatactaaagaccataaagcagccactaaaaacaaaacaaaaaaacaaggagaaaactcaaagtagtatagcttataaggcaatgaaaaggataaaatggaagcataaaaaacaatctaaaagaagacaaaaaaaagagagacagagagagaacaaagaatagatagaacaaatggaaagaaaatagagcgagtagctttacattttacaatattaataaacactttcaaattaaatcttctaaaaaacaaaattaagtcagctgggtgtggtggctcacrcctgtaatcccagcactttgggaggccgaggcaggtggatcacctgaggttgggagttcaaggccagcctgaccaacatggagaaacactgtctctgctaaaaatacaaaattagccaggcgtggtggtgcatgcctgtaatcccagctactcaggactgaggcaggagaatcgcttgaagccaggaggcggaggttgcagtgagccgagatcacactattgcactccagt

SEQ ID NO: 624225 - DNA, 458 bp, Homo sapiens
gacacacttcctaaacacaatctgttcccctccatctagaacactccgcaacttccagtgattggaggctctgaagcttcattagcttcatggtacacctgcctttgcgctgtgtaaaaatgacacataaagagagaacagatacacaagtggctattagcccctttcactttctcattacgcataaccccaaagggtattcttaggatttgtaggtaagggtttgagaagraatatgtcggcttaaatatggagagaaacttttaaatgcagtcaatagatatgatggactgcattaaaatatgttgaattccttgtccctggaggggactggactgataacgatgggtggagctgtcttaatgaagacttgagcaacagattgggtagggcttatttagatagatgaattctgaggtaatagagtgaaatgtaaagaacctggacttctaagtaga

SEQ ID NO: 624226 - DNA, 458 bp, Homo sapiens
gacacacttcctaaacacaatctgttcccctccatctagaacactccgcaacttccagtgattggaggctctgaagcttcattagcttcatggtacacctgcctttgcgctgtgtaaaaatgacacataaagagagaacagatacacaagtggctattagcccctttcactttctcattacgcataaccccaaagggtattcttaggatttgtaggtaagggtttgagaaggaatatgtcggcttaaatatggagagaaacttttaaatgcagtcaatagatatgatggactgcattaaaatatgttgaattccttgtccctggaggggactggactgataacratgggtggagctgtcttaatgaagacttgagcaacagattgggtagggcttatttagatagatgaattctgaggtaatagagtgaaatgtaaagaacctggacttctaagtaga

SEQ ID NO: 624227 - DNA, 394 bp, Homo sapiens
aaaataaaattaaaaaataaatgagtaaaatctatactctattacatggtgataagtgctatggaaaaaaattaagtcagggaggaatcaggactgctggagtgggaggattgcaatttttaaaagggttgctagraaaggcctcactgcaaagaaaaggtttgagcaagacattgaaagaggtgagggcatattcaccttttggatatttctgggaagaggaacagcaagtgcaaaggctctgaattgagcacgtgccaggagcggtcaagaagctagagggagaccagtgtacatggagtgtggtggagtagggtggagtagagtgcagtgaggaaggtactgtggattggaggcaggcaggggtgtggttagggttatgcaagtaaggtgg

SEQ ID NO: 624228 - DNA, 420 bp, Homo sapiens
gaatcaggactgctggagtgggaggattgcaatttttaaaagggttgctaggaaaggcctcactgcaaagaaaaggtttgagcaagacattgaaagaggtgagggcatattcaccttttggatatttctgggaagaggaacagcaagtgcaaaggctctgaattgagcacgtgccaggagcggtcaagaagctagagggagaccagtgtacatggagtgtggtggagtagggtggagtagagtgcagtgaggaaggtactgtggattggaggcaggcaggggtgtggttagggtyatgcaagtaaggtggtgtggggtagagaagatctgaatgagatgagaagagatgcagtagagtgaggaggggaaaggtggggtacctaagaccaaggtagtggggtctgtcagagttggatagaa

SEQ ID NO: 624229 - DNA, 319 bp, Homo sapiens
actcactatcacgagaacagcacagaggggatagtgctamaccactcatcagaacctgccccatgatccaatcacctctcactgggccccacctccaaaaaggggattggggattacatacaattcgacatgagatttggatggggacacagatccaaaccatatcaccagccaatagccacttttcctcttctttttctgcaaaccttcattttgtttaggtggcagtattccctgcccgagacatcatgaatgtctaagtcaattatgtaatgctgttcacctaagccagggccaggtctaggaacaggtgtctaac

SEQ ID NO: 624230 - DNA, 540 bp, Homo sapiens
agctctgaaattcttttctccacttagtatattgatacttgtgatggcattttgaagttctcatgttgtgtttttcagctccaccaggtcatttatgttcctctctaaactggttattctggttaacaccttctgtaatgttttgtcatggttattagcttctttgtattgcgttagaacatacccctttagatcagccaagttcattattacccaccttctgaagccttcttctgtgatcaaytcatccatctcagcctcaacccagttctgtgcccttgctgcagatatgttgctatcatttggaggagaagaggcagtctggctgattgagttttcagtgtttttgcattgaatctttctcatctttgtggatttatctacctttgatctttgacactgctgacctttggatgcagtttttgtaggctcttttttgttgatgttgttgttgttgctttctgtttgtttctttttctgttaacagtcaggcccctcttctgtagggctgctgcagttttctggggtccactccagacc

SEQ ID NO: 624231 - DNA, 469 bp, Homo sapiens
tgtcatttatcttttttactataggaaagacatcatttatctttcactactttcagaatttttgtgtgtgtttagttttcagaatttgactatgactgtgtttttcagcctgccctctttctctctgcttcctatgactctgatgacacagtgttaaatattttgttataaccccacaggtccctgaaagtctgtttatttcttttttggcmtattttctctgtgatattcagtttgagtaatttctgttgttctaatttccagtttatggattcttttttctgtccccttcattctacggtttaactcatccattggctttttattgcagttactataatctttggttttaaaatttccatatgattcttcttaatttcttctatttctttgctgaaattttctattttctttatttgttttaagcatgtccataatggttcatttaactatttttatgatgattgcg

SEQ ID NO: 624232 - DNA, 600 bp, Homo sapiens
tcagttaattctaacatctctgccatcttagcgttggtgtctgtctaggaaayaactaactttagccaaagaaaggtctggcctttcctgggaccactgggaagtaaactctagggtcttggggtaccagacctcataggtgtatcttttcagggaaggtggttggctatgttaaacatagtttaaccttgtaatttatgattgattctgaaaactactcaatgttgatgaaagaaataacaaaggatttaaataaatggagatttttaccttgatcattgattggataactcaaaatacgtcaatttaccccaaatttatatacagatttaacacaattcctatctatatcccagcaagttttttggtaaatattgacaatattattatataatttatatgaaaatacaaagaatagtaattcataacagttataaaacaaaagattaaagtaggaagaataagtctacctgattttcaactttttctatagctactatagtcatgactgtgtggtatttgtggaaagatagagacatagaaaatagaatagaatagaatagaatagaatagaatagaatagaatagaatagaatagaa

SEQ ID NO: 624233 - DNA, 566 bp, Homo sapiens
ctttcctgggaccactgggaagtaaactctagggtcttggggtaccagacctcataggtgtatcttttcagggaaggtggttggctatgttaaacatagtttaaccttgtaatttatgattgattctgaaaactactcaatgttgatgaaagaaataacaaaggatttaaataaatggagatttttaccttgatcattgattggataactcaaaatacgtcaatttaccccaaatttatatacagatttaacacaattcctatctatatcccagcaagttttttggtaaatattgacaatattattatataatttatatgaaaatacaaagaatartaattcataacagttataaaacaaaagattaaagtaggaagaataagtctacctgattttcaactttttctatagctactatagtcatgactgtgtggtatttgtggaaagatagagacatagaaaatagaatagaatagaatagaatagaatagaatagaatagaatagaatagaatagaatagaatagaacagaatagagaacttagaaataaacccacacaaatatg

SEQ ID NO: 624234 - DNA, 606 bp, Homo sapiens
agttacttatacaataaataactcaaaatgaatcatggacttcaatgtaaaatgtaaaactatacaacgttgaaaaaaataaatatgcaggatctaagactggccaaagagttcttagatttgacatggcttaaaaaaggaaaagtcgacaaactggcctttataaaaattagacttttgtgctgtgaaagattgtgaagargatgaaaagacaagttacagtgtaggagaacatgttttgaaattatctgacaaaggactagtatctagactagataaggagctctcaggattcaacagcaaaaaagcaagcatttcatttagaaaatgggcaaaagtcatgaaggtatatttcccgggagtatatatagatggcaaataagcacataataaggtattcaacaaccataggtattgagaaaatgttaatgagtatatgatatgactatacacctgtcagctttgctaaaataagaagtagtgataataccaaatgttggtgagaacatggaggaactggatgtcttatacattgctggtggaaatgtaaagtggtacgggtactctggaaaacagattggctgtttcttaaaaaactaaatatgc

SEQ ID NO: 624235 - DNA, 543 bp, Homo sapiens
cacgctgatacaagtggggatgacaaaattctaacacaataaagagcaggtggcaacatttaactgccagaaaaagaggtttacaattaccataacaactggcaaggtggactgtaagccaaggaggtctgactttcagagaattatggagatgcttaacagtttacagtgtctctagatgggcaatcaacaaggatgttggtctgtgtgaggagaaataatagatgcttgccctagtaaaaagttacaatctcatatccaatttccagacctgagccagttttcatatccagagcccactgactaaagagctgggtcttgggagatgcacacaagtcataaggctgtgtgagtacagcaatgatcctttataagatgaaagtgctgcagatgggatcaataggcataatcaagctgtatgggcaggtagctcaggctcccacagcatccaccgttgttgcaccarcacctttcttcagttgacgtttagagctgtatttggtcttccaatcaaacacctaaaggagaagggaagtctgaact

SEQ ID NO: 624236 - DNA, 623 bp, Homo sapiens
cctgaagaaaaactccttcctccttaaaaaagataagtgaaaacctatataatctttatctttaacacctctccttgcccctttaatggaattcttttactatttcatcatattgttaagtagtatactaaccataccctttgcaataggactatatacagtaagtagctcctgctgggatgaaaatccaaatcacatcaaccttctttctatattccttccttctgacagcgatttacttctacctttaactcagactggataagatgatctcatcttccagagcaccctctttaccttcctatttactctttgcctatctatccctgctgcttccttggatatctcatacaatcacccctccccttycactagctcctaattacctctacaagactctcaacttaacccactctctgttaaaccagtccaatccttccctggcaaattactgttggctttgtatctctctatcaacttctgcttatgttgccactcccattcccgcaaaaaaattgggtttttaccaacttaacctaccaccctcattatgaaggaaaagaccctttctgacttctaaatatgcaatcattagctgacttccccatctctgataggaccaa

SEQ ID NO: 624237 - DNA, 622 bp, Homo sapiens
gggaagaaaaactccttcctccttaaaaaagataagtgaaaacctatataatctttatctttaacacctctccttgcccctttaatggaattcttttactatttcatcatattgttaagtagtatactaaccataccctttgcaataggactatatacagtaagtagctcctgctgggatgaaaatccaaatcacatcaaccttctttctatattccttccttctgacagcgatttacttctacctttaactcagactggataagatgatctcatcttccagagcaccctctttaccttcctatttactctttgcctatctatccctgctgcttccttggatatctcatacaatcacccctccccttccactagctcctaattacctctacaagactctcaacttaacccactctctgttaaaccagtccaatccttccctggcaaattrctgttggctttgtatctctctatcaacttctgcttatgttgccactcccattcccgcaaaaaaattgggtttttaccaacttaacctaccaccctcattatgaaggaaaagaccctttctgacttctaaatatgcaatcattagctgacttccccatctctgataggaccaa

SEQ ID NO: 624238 - DNA, 599 bp, Homo sapiens
cgcccaagtagctgggaccacaggtgcacaccaccactaatttttgtagttttagtagagacggaatttcaccatgttggccaggctggtcctgaacatctggactcaagtgacctgyccacttgggcctcccaaagtgctgggattacaggcatgagccaccctgctcagcccagagtgctccatttttaagcagtgcccccccttgattctgaaaagtctggggttggagcaagacctggaacatccatttcctttctcactaaatatgggttctgccttaaaactcagagagatgggatttttgtcataaaattctactaaaaccctcttgttttaaatgaaagaaaaacagagttacaagattacaacattaatttggccacaaaccaaaactgtagttcagctttcctaattcctacctcaaattatgttctattccattattagacaagccctgacaatttccttgcatgtagcctgcttctctgctcaattgtgcccagctcctagcacagaatctagctcctagcacatagtaggtactcaataaatatttgctgaaagaacaaatattcaaatttatatttttatgtgtg

SEQ ID NO: 624239 - DNA, 609 bp, Homo sapiens
ctctctgttgacatgcatttgacgctttaagattccaagtgagatcatacggtgttcatcttttgccgtctgtcacttaaccataataccttccagattaatccatgtcatcacaaaggcaagatttctttctttttttgtggctgaattatattgttttatatatgaatgaaatgaatacacacacattctatctaaaataaatcacatttctttacccattcatctgtcaacagacccttaggttgtttccgtatcttggctgctgtgartaatgctaccttgaacataggagtgcggttttctcttcaagatactgattttagtttttgtttttgaatgaagtatcaacttttggactcttgtaattgctttataaataatgtcacttaggttgttctcatttcccctgtcagaggtcaagtctacagacattttaaggttaaagttaaacattttgagaaaaatacattttaggtgatttgtaccttttttcacttttgattatcattatgaagtcatgggttataaagtgaattaattgcattttactcttcccagtatgatgctcaaattgttacaactttggcttgtttctgagtccttttg

SEQ ID NO: 624240 - DNA, 582 bp, Homo sapiens
ttaattttgccaagtaaaccaattctgccttttattctgcaatatctagtctatcaaaaattttacattttcatgagtcaattacatttttaaaattaaccttttaattttcagaatattatagattcatatgcagttgtaagaaaaaaactacagagagatcttgtgtattctttactcattttcccttaatcacagcatctcacaagagtatagtacaattattacawccagggtgttgatgttgaaactgatgagacacagaacatttctattaaagcaagaatccctcatactgctactttatagtcatacccacttccctctcatcccccaccaccatccatgcccatgcggggtactaatctgttcttcatttctaaattttgtcatttcacaaatattatgtacacagtacacaacattttggtcttggggattggctttttcattcagtatgtgtctcaggagattatgtctccaggttgatgtgtgtatcagctgtttaaccctgtttattcctgaggggtactccattatatggagtaccatggtttgtttaaccattcacttgttaaaaga

SEQ ID NO: 624241 - DNA, 582 bp, Homo sapiens
ttaattttgccaagtaaaccaattctgccttttattctgcaatatctagtctatcaaaaattttacattttcatgagtcaattacatttttaaaattaaccttttaattttcagaatattatagattcatatgcagttgtaagaaaaaaactacagagagatcttgtgtattctttactcattttcccttaatcacagcatctcacaagagtatagtacaattattacatccagggtgttgatgttgaaactgatgagacacagaacatttctattaaagcaagaatccctcatactgctactttatagtcatacccacttccctctcatcccccaccaccatccatgcccakgcggggtactaatctgttcttcatttctaaattttgtcatttcacaaatattatgtacacagtacacaacattttggtcttggggattggctttttcattcagtatgtgtctcaggagattatgtctccaggttgatgtgtgtatcagctgtttaaccctgtttattcctgaggggtactccattatatggagtaccatggtttgtttaaccattcacttgttaaaaga

SEQ ID NO: 624242 - DNA, 565 bp, Homo sapiens
tatttatatgtcattgtatcccgaaatagtgtgtgtgtaaaacagttttgctgccacaaaaaacaacgccaatattycagtagcttgtggcaacaaacatgtctttccttatttcatgtgaaggctgtgggtaggctgcagcttttcttggttctactgtgtacagctaggctcagctaggcttgcttccatttcaggactgaagaagaaaaaacattgcttctctagaagaaactgttcatacgggaaaggggaggaatacaagggtgacagagccaaacaaggaaatctcatttaagaattatgatcagttgtgacagtcacatcttctcaagttccactggccaaagcatgtcatgtgctcaagtgcaaagtcaaagagtcaaatagaatatacagatgctccttgacttacaatgggtttatgtcttgataaatccattgcaagttgaaaatatttttagtcaaaagtgcatttaatacacctaatctaccaaacatcatagctaaacctagcttaaccttaaacatgatcagaacatttttacattagcctatatttggg

SEQ ID NO: 624243 - DNA, 547 bp, Homo sapiens
ttgccactgctaactccattggcaccctccaccacccctcccactcggcactgctaactccattgcctccctcccacacccctcccacttggcactgtccactcatggcacagggaaaaacagacatgagtgaggctgggaagacaaaaccttatattcttctcccttggtgaggtaaaacagcttttgggataagttatctcatggagggaattcacaccaaaatatgtgtgatatctaaataattctgttgcctttttacctgagttgctaaggctgaatatcattagtggctaggagcttgtgttctggagcaaaacagactgggtttaaactcctggtgccttttttagctgtttgactttgggtttgttacttaacttttctaaacctcagcttgaaattttgtgaatttacttgaagagtggtacctgcttcatgggttgtcataagaatttaaaaggtgatgtttcaaagtgtttagcacaatggtggcacagagtaaacacctgataaatatcayatgttattttccaaaggacttgaa

SEQ ID NO: 624244 - DNA, 605 bp, Homo sapiens
actttgtttgtacatttcatcttccagattatgggcgcctacatgtcagggactatgcctttttggtctttgtartatagtgccaggcttgatagaggctaaataagtgcagaattgaaaagacctccttttcacccactattctttttcccagctcactgcaaccttgacctgctgggctcaagtgatgctcccaccttggcctcccaagtagctagtactacaggtatacaggtacacaccagcatgcatggctaatttttctttctttctttctttttttttttttttttttttttttggtggagacggggtttcaccatgttgtccagcctggtctcaaactcccagggtcaagctatttgcctgccttggcctcccaaagcgctgggattacaagcacgagccaccaaaccaggcaaagaagggttttataaagtgacattcatttctctttactggttctgaggtacaaatattgctgctacaaaagcagcaggttgaagttgtgctgaatgtagttccattgttggaatgctgctgaacacacaaacgttccgccctcttacatttcccaaagcataatgacattttccaaactggat

SEQ ID NO: 624245 - DNA, 596 bp, Homo sapiens
ttactttgtttgtacatttcatcttccagattatgggcgcctacatgtcagggactatgcctttttggtctttgtagtatagtgccaggcttgatagaggctaaataagtgcagaattgaaaagacctccttttcacccactattctttttcccagctcactgcaaccttgacctgctgggctcaagtgatgctcccaccttggcctcccaagtagctagtactacaggtatacaggtacacaccagcatgcatggctaatttttctttctttctttctttttttttttttttttttttttttggtggagacggggtttcaccatgttgyccagcctggtctcaaactcccagggtcaagctatttgcctgccttggcctcccaaagcgctgggattacaagcacgagccaccaaaccaggcaaagaagggttttataaagtgacattcatttctctttactggttctgaggtacaaatattgctgctacaaaagcagcaggttgaagttgtgctgaatgtagttccattgttggaatgctgctgaacacacaaacgttccgccctcttacatttcccaaagcataatgacatttt

SEQ ID NO: 624246 - DNA, 581 bp, Homo sapiens
tttgtttgtacatttcatcttccagattatgggcgcctacatgtcagggactatgcctttttggtctttgtagtatagtgccaggcttgatagaggctaaataagtgcagaattgaaaagacctccttttcacccactattctttttcccagctcactgcaaccttgacctgctgggctcaagtgatgctcccaccttggcctcccaagtagctagtactacaggtatacaggtacacaccagcatgcatggctaatttttctttctttctttctttttttttttttttttttttttttggtggagacggggtttcaccatgttgtccagcctggtctcaaactcccagggtcaagctatttgcctgycttggcctcccaaagcgctgggattacaagcacgagccaccaaaccaggcaaagaagggttttataaagtgacattcatttctctttactggttctgaggtacaaatattgctgctacaaaagcagcaggttgaagttgtgctgaatgtagttccattgttggaatgctgctgaacacacaaacgttccgccctcttacatttcccaaagcat

SEQ ID NO: 624247 - DNA, 578 bp, Homo sapiens
gtctttgtagtatagtgccaggcttgatagaggctaaataagtgcagaattgaaaagacctccttttcacccactattctttttcccagctcactgcaaccttgacctgctgggctcaagtgatgctcccaccttggcctcccaagtagctagtactacaggtatacaggtacacaccagcatgcatggctaatttttctttctttctttctttttttttttttttttttttttttggtggagacggggtttcaccatgttgtccagcctggtctcaaactcccagggtcaagctatttgcctgccttggcctcccaaagcgctgggattacaagcacgagccaccaaaycaggcaaagaagggttttataaagtgacattcatttctctttactggttctgaggtacaaatattgctgctacaaaagcagcaggttgaagttgtgctgaatgtagttccattgttggaatgctgctgaacacacaaacgttccgccctcttacatttcccaaagcataatgacattttccaaactggatattagccagaacagtttctagactctcataacccccta

SEQ ID NO: 624248 - DNA, 596 bp, Homo sapiens
ttactttgtttgtacatttcatcttccagattatgggcgcctacatgtcagggactatgcctttttggtctttgtagtatagtgccaggcttgatagaggctaaataagtgcagaattgaaaagacctccttttcacccactattctttttcccagctcactgcaaccttgacctgctgggctcaagtgatgctcccaccttggcctcccaagtagctagtactacaggtatacaggtacacaccagcatgcatggctaatttttctttctttctttctttttttttttttttttttttttttggtggagacggggtttcaccatgttgtccagcctggtctcaaactcccagggtcaagctatttgcctgccttggcctcccaaagcgctgggattacaagcacgagccaccaaaccaggcaaagaagggttttataaagtgacattcatttctctttactggttctgaggtacaaatattgctgctacaaaagcagcaggttgaagttgtgctgaatgtagttccattgttggaatgctgctgaacacacaaacgttccgccctyttacatttcccaaagcataatgacatttt

SEQ ID NO: 624249 - DNA, 568 bp, Homo sapiens
catgtagctcaatatttagacaacatggtcccaggagtactggccattggtgtcaggatggactagaatgtccagcagaactggaatccaaacaagagctggggacaatattgctggtcctgtgccctcacagatccccactccctgccagtatcagtgtttcttattcctctcccktgttaaccctgaatagtaagactagacttctacttacctccctgctatgcaattttgtccagtatgacatgaagaaattttcttaccttgttttcttattgcctttttatatgaccaaatatttagattgttaagttctttctgcattttcctagttgttttaaatctgtcttgccatgatcttcaactgctttcttttttccttccactttgtgctatgttctttctgcctttggcattgcagcttcactaccattgtctctatcaccatgatcaacaataagacgaaagaaagaaaaagaaagaaagaaagaaagaaagaaagagaaagagagtgagagacagagaaagaaagtagaaagaaagaaaaagaacgaaaaagaaagaaaga

SEQ ID NO: 624250 - DNA, 546 bp, Homo sapiens
agtagaaccaggattccttttctagcgattctgactggtgtggacagagccctcatgcccccatgggtgtactcttcgcccttgatttaacattaagctgctgcagagatgacgtacacyttagcccctttagtgcactctgttttgtcatcaactttgatcctcccagacttatcaccaaaaatgtcactgccacttaaaaagacttgaatccactttatttaattatggagatcccgatccccaatcctctggtccggactcatcataacctaagaattccagatttacgaagaaaacatacgaagatttctagaattaaaatgttatattttatcaatttctgaatagcaaatcatgaacctttaaagataatcattcattcttttaaagacctgcagaaaaagattctttggtatttaatggcagggttttattaattgaacattttttactaacaggaaattcttcttattaggatttagacttacaggtccctaacttgatcattttcatggggaattatttactcaattatttaactga

SEQ ID NO: 624251 - DNA, 515 bp, Homo sapiens
gtaatgccctgaatatgataccacatcacttatgctgttttccagccaagaatgcataatctgaatacaatcacaagaaatcttcagacaagcccaaaatgagaaacattttattttataaaatactatattattcaaaaatgtcgatgtcataaaagacagggctgttttggtttaaactgtatgatatcrcttatgtgtggaatctaaaaagattgaactcagaagtagaaagtagaacagtggttaccagaggctgggaggtaagagaaatggagacatgttggtcaaaggatataaactttgctataagatgaacaagttctggggatctatgtgcagcataggtagtggtagatgtgttaattaatttgattttggttatcatcactacacaatgtagatgtaaaagagaagaaataatcacatcatatgccttgaatatattcagtatcttgtcaattaaatatttttaaataacaacgtacctgattaaacatacacacacaaagagc

SEQ ID NO: 624252 - DNA, 515 bp, Homo sapiens
gtaatgccctgaatatgataccacatcacttatgctgttttccagccaagaatgcataatctgaatacaatcacaagaaatcttcagacaagcccaaaatgagaaacattttattttataaaatactatattattcaaaaatgtcgatgtcataaaagacagggctgttttggtttaaactgtatgatatcacttatgtgtggaatctaaaaagattgaactcagaagtagaaagtagaacagtggttaccagaggctgggaggtaagagaaatggagacatgttggtcaaaggatataaactttgctataagatgaacaagttctggggatctatgtgcagcataggtagtggtagatgtgttaattaatttgattttggttatcatcactacacaatgtagatgtaaaagaraagaaataatcacatcatatgccttgaatatattcagtatcttgtcaattaaatatttttaaataacaacgtacctgattaaacatacacacacaaagagc

SEQ ID NO: 624253 - DNA, 510 bp, Homo sapiens
tctgccttgatctgctttaaatcagagagggagaaggggacatgtacccgggttgggccaaattcccctccccctacagcttgaaggggacataaaagatagcctgtgggtttttgtggtcctttggagatttcttttcttgtttccttctgggcasgggagattagaggaggcttatcattaataggaaggagagctatagggaggctaggatatgggggtaagctgagaggtcctcctgtgggatgtaaattgtaagctttgcatagttgtggattctccctcaatgaaaagaaagcttggacttaaggtatttcattccatttgccttcccccttacagaaaaggtgaagctgcaagatagtattgtaatttatacttctctcaggtggccatttttccccatcagagagagaatattgggccaagccatagtgcagaaaaaaatgaactgcctctttttcaaggtttgcaggtcaaattggttgcagtggcttaggatgcatttca

SEQ ID NO: 624254 - DNA, 401 bp, Homo sapiens
aaattattgtaaagaaatgtcytgcctttatatgaatatgatatgaatagcaagttcaataatctgaatcctagggccttatgcttggccccaaaataatagtggactagaaagttaattgttctaatttaatgttccattaattcatgcttgatggacaatgcttctctgaaactcagattcaacacgttacaatcttacattgatccagaattatccccaatcaattttcatttcttaactacagatacagttcatgtctcttgaaataaaattgatgttttaaaatttgtcatctgttatgctaacgtttgtttcaaataatagagattttcatcatatgaagcaaaatattttatgggaagtgaataactgggtgattaattattttgtaatcattt

SEQ ID NO: 624255 - DNA, 483 bp, Homo sapiens
taattccccaacagtacaggtttcaataaaaaaaactcagccgtcatatcagaacaaagaagacttcaaattaaatttaaaaagacaaccaatagatgccaacattgtgataaagagatgttacaattatctgacaaagactttacagtagccatgataaaagtgcttcaaggagcaattataaacacaattgaaacaatgtttttaaaaatagcttacacaaggatacagaaagtcttagtaaagaaagaygacaccaagaagagtcaaatggaaatcttagcatttaaagtaataactaaaatttataatgcagtgaatgcagcagatgggctaaatggcagatgccctttgaagagttcagagaagaatattaatgaattagaaattagaacaacagaattactcaattcgaactacagagaaaaaatagactgaaaaaaggaacatagcgttaggcatctaagatggccttaggcatat

SEQ ID NO: 624256 - DNA, 405 bp, Homo sapiens
cccactgctcacctcctgctgtgtggtcaagttcctaacaggccatggaccggtaccagtctgcacccggggtttggggacacatgtgataagaaacctgtatccagaatatataagaaactctttcaactcaataataaaaagacaagtaaccgawtttaaaatgggcaaagaatttgaatagacatttctccagagaagatgtttatttttcacttctcactcattctttctggtgtcttatctaagaaggtgggtctatgatccacttagagttgatttttgcgcatagagtaagcatggagtacaacttcattcttgtgcatgtggatatacaattgtcccaacatcattttaccaaaaatactattcctttcccctgaaattgctctagcacctttgtta

SEQ ID NO: 624257 - DNA, 579 bp, Homo sapiens
agataaggggtctagtttcattcttctggatatggatatccagtttcccagcacaatttattgaaaacaccgtcttttccctagtgtatgttcttggcatctctgttgaaaatgaattcactgtaggtgtgtaaatttatttctggattctctcttgtgttccgttggttcatgtgtctgtttttgtgccaggaccatgctattttggtgactatagctctatagtaaaacttgaaatcaggtaatgtgaatcctccagttttgttctttttggtcaggatagctttggctattctggatattttgtggtttcaataaattctaggatagttttttttctatttctgtgaagaaagacatgttattttggtagaaattgcattgaatctgtagattgctttgggtagtatggacattttaacaatatagattctttcaatccatgaacatagaatatattttcattttttgtgtcttctttaatttctttcatcaatgttttatarttttcattgcagaaatctttcacttctttgattaattcctagatattttattttatgtgtggcaattgtaaat

SEQ ID NO: 624258 - DNA, 608 bp, Homo sapiens
atgacagacacctcaggctacttgggaaactctgggagtttgggagataattaactctcagggctggtggtggtggggaactgccactgctgaacagaaggacactgcccacctggggggtttggatcttgtagttggtcagcgtctctgctgtatgctggattttcaagagttcattagtagcttgtggaatgcaactgwaaggtttgatttattgcagtgtttttcaaactgaatcctattggtgagttggaaatcagtttagtagatcacggccacttgaaatgaaaatatcagagggtgttgcacttagggtattgtttcttgacacttcaggtgtacacacacgtgtgagtgtactaggaggtgttctacagtgtgtttctgtaggtcgcagtgagaaaaatttgaaaagcgttgtctcctgtgcccttctatttgccctcttgcctttctttgcctgagttttcagtcacttaaaattgtctgaggatgcagttagcatgccaggaatatacagtaaagaacaaggtggatcttcttcacggaggttactgtgtgagacgaaagacagttcactgttcatcactggaaatactgtacgtgct

SEQ ID NO: 624259 - DNA, 608 bp, Homo sapiens
atgacagacacctcaggctacttgggaaactctgggagtttgggagataattaactctcagggctggtggtggtggggaactgccactgctgaacagaaggacactgcccacctggggggtttggatcttgtagttggtcagcgtctctgctgtatgctggattttcaagagttcattagtagcttgtggaatgcaactgaaaggtttgatttattgcagtgtttttcaaactgaatcctattggtgagttggaaatcagtttagtagatcacggccacttgaaatgaaaatatcagagggtgttgcacttagggtattgtttcttgacacttcaggtgtacacacacgtgtgagtgtactaggaggtgttctacagtgtgtttctgtaggtcgcagtgagaaaaatttgaaaagcgttgtctcctgtgcccttctatttgccctcttgcctttctttgcctgagttttcagtcacttaaaattgtctgaggatgcagttagcatgccaggaatatacagtaaagaacaaggtggatcttcttcacggaggttactgtgtgagacgaaagacagttcactrttcatcactggaaatactgtacgtgct

SEQ ID NO: 624260 - DNA, 507 bp, Homo sapiens
aaggattgtccacattaaaatgatcccttacatgagtgaagctaaagcacttccatttccagacctctttgcttttcccaatatgatctctgcttgacagagagtcgttgagacccagacaggtgattccagggccacagacttggtgtgagagaaggggaggatggagtgaaagagatatatgctttccatcagcagcaccctcccacccccattctttaactttttcacactactctcctgcctatctgacatcttaataaacctggagcccacctaaacctggcccaatggaggtactaataggaagggaattrtgtatatgattcagtagaattttactttgacttgtgcagtttttcctgagtttgaccagatgaagaatattacaaatttatatctggattatagatgtttgtacacttgtgaggtagggatgggagggggagcaaaactggagtagataaaatatacaaatctacacattgaaaaaccatcttgaataat

SEQ ID NO: 624261 - DNA, 504 bp, Homo sapiens
gatgaaaactataagtctacagatccaagaaactcaatcaactctaaacaaaatgaacataaacaaaacaataccaagatacatcatactcatgatgaagagaaagtcttaaagaaatcagtgataataagaaatcagtgataaagaaaaaaatcttaaaagcactcagagaagaacagtacattatagttagagaatgaaaagaatgttggaatatatatcatcagctatataattaagaagacagtagagcaatatatttagtgtactgaaaggaaataatcaaccaagaaaatatttatcctgtaaagtatccttaaaggcaaaataawgatatttttgatatagaaaatctgaaagagagagagccaagatggccaattaaatgcagcccggagggacatctcccatggagggaccaggacattgggaagactggcacactcctagcagatcttcagagggaaggcattgagaatggatgcagggaggatgcagacattg

SEQ ID NO: 624262 - DNA, 594 bp, Homo sapiens
tgtactgaaaggaaataatcaaccaagaaaatatttatcctgtaaagtatccttaaaggcaaaataaagatatttttgatatagaaaatctgaaagagagagagccaagatggccaattaaatgcagcccggagggacatctcccatggagggaccaggacattgggaagactggcacactcctagcagatcttcagagggaaggcattgagaatggatgcagggaggatgcagacattggactgaaggggaaggaagctgggaaccctgtgtggggctactgaacaccaggacctgctcctgaccctcagtgagtcatgggggagagttaagttgatcagatgaagagtggttcactcttgccacagacctatggaatcctagctgcaggagaacccatgacccccagggacacttgagctggcagagacaacctcttagaaaggtggtaggagcagaattccagsctgtgtggagcccagaggttttggcataagaatggatacagtggagcatggccagcgatgcccatccccagggctggccaaactcccctatgtggcgttagcctttggaagactgtacagagcaggg

SEQ ID NO: 624263 - DNA, 617 bp, Homo sapiens
tgcagccatagaaaagaatgagatcatgtcctttgcagcaacataactagagatggaggccattatcctaagtgaattgacacaggagcagaaaccaaatacgacatgttctcatttataagtggcagctaaacactgagtatacrtagacacaaagaagggaaaaatagaaactggggcccactttagagtagagggtgggaggagggtgaggactgaaaaaccacctatcaggtattatgcctattacctggatgatgaaataatctgtacaccaaaccctcttgatttgaaatttacctatatagcaaacctgtgcctgtacccttgaaatataaaagttaaaaaagtaaataaataaaatgtaatcaaaaaacaatataacttgcttttatatgaattcagatatagtaaaaataaaatgccattcttaaatgtagcagtcaattaaatgtgaatacaagagtatcagactgagatattccaataatagtgttattcaaggttacagttagatttctttatggttttaaatattttaagctgtatttcaaatgctaatcatttaataaatcataaatgataaattatgcttgttttgtgtaaaagaaaaaaga

SEQ ID NO: 624264 - DNA, 559 bp, Homo sapiens
attattacaaaagtggatgttgactactcacaatttgcaggaatcaggacagagtccatgccatagtgctattttgcttttcctttctctgactctgaagcgtttaaagtggtgtgaattttcctgaacagcatttcaacaattcacatattatttggttttgaaaactccatgcctatggctgcctcctcccctttcaattccattgtgttggctgcattcacacctccagtgcaaattcatttatagtctgggcaccagcaaactagagtggcttgaacaccctacagggaagcaattattccatccaaggcgtcttattgtcctcatcrtgctcctaatttctgcataatgtaaatgtgcatttgccactgcctattattggcttgctgctgacaccacaggtactattatgagtgggcctggctgtctctctttttcttctctgaagagtcaggttggcattctgatgtttgaaaagggatagcacagaggagattggaagccagttcttggcatgctcttaacaaagcactttgcactggattagaagtcacat

SEQ ID NO: 624265 - DNA, 588 bp, Homo sapiens
tcttctttttgggtggatacaataatttgatcttttaaaaatattggttataattctgcttctgtatgttttggtctttttcttatatattggaatcttctatatatgaacatccttagttatttgcatatatttaagaataaaaaactaaaaatctcattagattctgctttacatatataattagagtcctttgagcatggattttatctaggacaattgagtgggtaaatttctttttaatggatcacttaagtattaaaaataaactatcatctgtaaacattgtatgtttctccatttacacaaatttccctctatattctttaatcaaaaattgaacactgttacatttttcttcataaattacaagtatatttctttggcagattaatttctgggcaaataatagtttatgttataaagttttktctccttttaaattgtattttctaacatgtcatttctggatataaaaatgatattgaattttacctgttgatctaataattggcaacatcattgaactctcaatttttctaggtttctttatattctgtcttatttttcatgtggacagccatatca

SEQ ID NO: 624266 - DNA, 480 bp, Homo sapiens
gcatcaccttgttctctgccttcatcttcacatggtattctcccagtatgggagtctgtgtctaaatttcccatttctacaaggatggcagccacattgaattgggcccactcgactctaatatggcctcttcttaactaattatatctgtgatcacctgatttctgaataaggtcacattctgaagtaatggaggttatgacttcaacatttgaatttgagggaaacacaaatcaatggacaacactacagaaaacaactacctgaagrctagagagagtgaaagaaaccaggcagattggaggggagtggaaatgtgaaaaaagggaccagattgggttgagtttcccatttacaggtttagcttgtaaaagagaactattgaaagagtagtcagagacagacagaaaactggggccattcaaataaaagacaggatgaattcctgtactgttgttatatcaggcattataccaacat

SEQ ID NO: 624267 - DNA, 480 bp, Homo sapiens
gcatcaccttgttctctgccttcatcttcacatggtattctcccagtatgggagtctgtgtctaaatttcccatttctacaaggatggcagccacattgaattgggcccactcgactctaatatggcctcttcttaactaattatatctgtgatcacctgatttctgaataaggtcacattctgaagtaatggaggttatgacttcaacatttgaatttgagggaaacacaaatcaatggacaacactacagaaaacaactacctgaaggctagagagagtgaaagaaaccaggcagattggaggggagtggaaatgtgaaaaaagggaccagattgggttgagtttcccatttacaggtttagcttgtaaaagagaactattgaaagagtagtcagagacagacagaaaactggggccattcaaataaaagacaggatgaattcctgtactgttrttatatcaggcattataccaacat

SEQ ID NO: 624268 - DNA, 515 bp, Homo sapiens
caaattttatttagacaacttcgacttctgcttgccagtaattatatacaagactcctttgcctagttggtttcatatataatgatcaaataccttccaaagacagccatctccaytttccactcatcagcttaatagattaataatattcaaaaatttcctgtgtttataggaatagaaatattttaagtaatgggccaacaaattttattacctttagagaaagtgatatactataaatagaaaaaaattaacagttgttaacttccaaaggaaatattgtcaatgtaataacaatacattgtctgcaattttctctggaagagagaaacccactatttagacaaatgtaacaggtcactaagtttgcttaatattttagttgtaagttttatttattactttctgagaactgcagctgtttatatgttcaacagaatataggaagaagaactggtggtcacatctggttatttactccattgatactaaattataaagacaatataattagc

SEQ ID NO: 624269 - DNA, 458 bp, Homo sapiens
acaaagcaagggctcagtatatactgagtgaatggatgaatgaatgaatgagtgaatgaatgaatgagccacctgtcaaactgctttctcagatcagtccagtcaggggaatggcggtggccatgggcttctgtagtggatgtccttaggctcggtgtggctggtgatgaaggactgagagtcatcccagagagtgcagaacacctcccatgaccttccccagagtccaagcccagggagcagttgtgacatccagccaagctcacacttggcctggaggccggaccccatgaggaccaacctgtggtcttcagaggttgtcgggagggaggccccagtggacgctgaattccagcctctgtctggaggcctttgagccgcaagcacctggtggctgygcctgtggatgggcttgatggtctgaacccataacacccattcaggcatcagaaaatcac

SEQ ID NO: 624270 - DNA, 475 bp, Homo sapiens
caaagtcctatgtcatctgtgcagaggccctttgcacatgcagcatgggagccactcatcctaccagactctaggacccccgaaggcagcgactgtaatgctggtgccaggggaacaacctgggccctgagccaggcagaggcaaccctggtccccaagaagcctgcagtcagttctggagaacaagrcataaacctgggaagatgatcgaacaacgctgacaaagtggactagaaacaaggctgaccagcgcagagcccaggggccctgggaagagccggagctgtgagaaccgctgttggctgtgggtatgctaggtgccaggagcatccgtattctcttttaagcctcacccagccttgtgagctaaacataacatccctattccacagacccagaaacaggcccagagagggaaagtgacctccccaaggtcacacagccggaaagtactgaagtcaggttttgaattcag

SEQ ID NO: 624271 - DNA, 588 bp, Homo sapiens
tttagtgttgttttaggtgacaagaaaagttttccgcactaggttctgttctttttgatgccaggaaaaatgtttaaagttgttcttccccctaatattgcataaatattattcaaaaataatctttagtaagcattaattgaattcaatgaattcattgcattcattaaattcattgaattgaggccatttgagtgcctgaagaagactgggtaatatataagctaacataaaaaggccgtagattatccctttcatgaatactgctaggatcatgaaccaattagagatgtatgttaattcacaagcaggaaaagcttgtcaatcyttagtatgaacaaagagcagggataatttattgagcatctactatagtctcattattttgctatgtgctgtgggatgatatagttctccctctacaagaatttataatcttatggaggagagtaggaagctccaacttttgagggaaagactgtctttacatattcagggctattaatggttcatcctagaccaacgcttattgtaagtttgttgaataaaattttaaaaacaaaaacaagcaaatagagtacgagtcat

SEQ ID NO: 624272 - DNA, 588 bp, Homo sapiens
tttagtgttgttttaggtgacaagaaaagttttccgcactaggttctgttctttttgatgccaggaaaaatgtttaaagttgttcttccccctaatattgcataaatattattcaaaaataatctttagtaagcattaattgaattcaatgaattcattgcattcattaaattcattgaattgaggccatttgagtgcctgaagaagactgggtaatatataagctaacataaaaaggccgtagattatccctttcatgaatactgctaggatcatgaaccaattagagatgtatgttaattcacaagcaggaaaagcttgtcaatctttagtatgaacaaagagcagggataatttattgagcatctactatagtctcattattttgctatgtgctgtgggatgatatagttctcyctctacaagaatttataatcttatggaggagagtaggaagctccaacttttgagggaaagactgtctttacatattcagggctattaatggttcatcctagaccaacgcttattgtaagtttgttgaataaaattttaaaaacaaaaacaagcaaatagagtacgagtcat

SEQ ID NO: 624273 - DNA, 599 bp, Homo sapiens
acactcccactgtttgccaaacattgtgctagtccctgagaacaaatcagtgttataagttttcttataatactgaagttccccaaggcattgataattcaatagaaaatacaaatatattcataggaaataaagtggagagtgacaagagctatatgcacaaaaatattcagaaattacatgtggctgtatatctctccagtccacactcataggtgccctggtgtaggcaactttgaaatggaattctgcgatctacaaaggtggtagagccagtgaattcagagcaaagctttctttgccaagcctggagaaattagcaataaagagaggaaaacattattttgttgttttcaactaaaytctataactggaataatattacctttaatgaggctggggaacttcctgtgaggagtctaaagccctttactgatgctattccattaattctccttgtgtctggaacttggcacctgaagcacaatgcattatgcaaaaccaaatcacactttgcgtagagaaaggattttgtttcaatgtttcccttgtgctaaccttaaaaaccccagcagagctcccatcagaacatgttccta

SEQ ID NO: 624274 - DNA, 648 bp, Homo sapiens
aaatttttcaaggtcatccaaataactagtagcaaagacagaactaaaaatctaatttcttcccctttcctcccgatgtatatctctttctggctatgtgcccttgctatctcctttcctcgggtgaaaattctcacttctacttgttttgaaaccaaagcaggctatattcagaycatgagtgttcaaatgtcttaaattaattttttaaaacattttggaagaccactgaccaagtgccttagtgtgttcccctcagcttggctaaatttagatagatttcttccttatgataggcccctgacctcacttttcttataaaacgtttaagttagaaaacttgtcattgtaaattttttctctgtccctttgaaatgtaaactttttctagcctcttgtaattttataacccagcaatgtctttctccaggacttggagacatgtaaccaagacacgtaaacaagggagatagtgctcctatctccccattttggtgggatgatggtaggagcctaacttaaaaaggggaaaattagcaaatacagatggcctgatcgctttgaccactaatctccagtaattttccactagctcactgaagtcctaataaaggcccactttttgtttcagcgaagttgaactcagct

SEQ ID NO: 624275 - DNA, 589 bp, Homo sapiens
attgcacttctttttttctacaaatctttaagatgcctggagctccaatctcattgcaccttctatcatatttgtttgccatcagaagtgcaagcatctattaatcataatatggacagtttatgtcttatacatcactgatctcattatttttccttttctttccggtcttcccaattttggggaacttcttggtgtgtcttaagcaaattatcttttatcctcaaattcctctggaacgtttatttcaccttcttttctaagagatccttggcacaaccacttccccttaagtgtagtcctttctttcaaccacaggtatttccaggaagacttgcaggtagataagtgttttcctacctcccctttccaaatgcacacccccctttccttcctctttccaaatgggttcttttaaagaaaattatcagacacttgactatctgctatgattgtctattgtcarggtcagcttcatgggtgtacaaactgtgcagtcacagtctttgtgcttagaagagccccatgcctgatttaattatctgctagttaccttctggaaatttttaacgctttttttttttttttt

SEQ ID NO: 624276 - DNA, 499 bp, Homo sapiens
taaaatattttaaatgatgaacagctggtggtatccagttttttataataacaaatcaaactgctatgaatatttgagcatttttttgtgaacatccatctttattactcyggggtaaattcattgttagatcatatggtaagtttatatttaaattcacaaatggccaaaatgtttctccaaaatttctgtgccccacagcaatgtatgagagttctagtcactcctcatctttcccagtaattgacattgtaaatttgtatttatttaagccatttaaaaatgtgtgtagtaggccaggcgcagtggctcatgcctgtaatcccagcactttgggaggtggaggcaggcagatcatgaggtcaggagattgagaccagcctggccagcatggtaaaaccccgtctctactaaaaatacaaaaaattagccaggcatggtggtgcgtgcctgtagtcccagatactgggagactgaggcaggagaattgcttgaaccc

SEQ ID NO: 624277 - DNA, 640 bp, Homo sapiens
  misc_feature 164: n = A,T,C or G
tatatttcaggcagaggagaaactataaaaaataggcaataaagcagcccaataaatgcagttgttttaatgttgggaggtagccacattccagtaatatacttggaatttctggacagattcaatcttaaatccttcctgtggaatactaaccatgagactcntggcaaattgtttaacttccctcagagtcttctttattttttctgtaaaatgggagcaagaaagcccacttagaagaaaaccctatgatattataatatgccgtttgcccattgttactctattagcatggttaaactattctaaggcctttcttccttcaaactctgacrtgagtgcctgcttgcccatatgctgatttaagattttctatctaagggtaggtaacacatgcactggattcagttgatacaggtacgaactctaattgctttttcttgaataaagaaatgaatcaatatgaacaaataaatacataaagtgatacatcaggctcagcttcctatataatcattttcatttttgcatttttatttgtgaatccacaaagtttcttgcttcatttccttacatctttgcaaagtctctgcttgcaatattattattattactattatatttgttgtctaactaaacc

SEQ ID NO: 624278 - DNA, 628 bp, Homo sapiens
acagtagaatggtggttatcaggggctacaaggtggggaaaaagtgacgatattagtaaaagacattaataaaaccttcagtgataaaatgagtaattactggaaacctactgtacagcatggtgagtgtaattaagaacaaggctttgcatacttggaatttgctaggagtgtagaccttaagtgttctcactatgtttctactatgcatataaatccatggtaactatgtgaggtggtagatatgttaactagcttggttgtgataatcatttcagaatgtgtgtacacacatatatgtatatatatatataagtatatcgaaacaccatgttgtacaccctaaatgtatacaattttcatttgtcaatcatatctccatraagctgggaaaaaaatccagaactccttatataaaacaaacaaagaaacaaaaaagatagtatcattatacttggaattctgaagttttatgctgatgtgcttgggtgtggagctttacaatttgttgtgctgagtgcctggctggctctttcaatctggataggcatatcctttacttctggacaatgtttctgaattatatctttgatcattttgtaccctccattttttctttctgtttctg

SEQ ID NO: 624279 - DNA, 628 bp, Homo sapiens
acagtagaatggtggttatcaggggctacaaggtggggaaaaagtgacgatattagtaaaagacattaataaaaccttcagtgataaaatgagtaattactggaaacctactgtacagcatggtgagtgtaattaagaacaaggctttgcatacttggaatttgctaggagtgtagaccttaagtgttctcactatgtttctactatgcatataaatccatggtaactatgtgaggtggtagatatgttaactagcttggttgtgataatcatttcagaatgtgtgtacacacatatatgtatatatatatataagtatatcgaaacaccatgttgtacaccctaaatgtatacaattttcatttgtcaatcatatctccatgaagctgggaaaaaaatccagaactccttatataaaacaaacaaagaaacaaaaaagatagtatcattatacttggaattctgaagttttatgctgatgtgcttgggtgtggagctttacaatttgttgtgctgagtgcytggctggctctttcaatctggataggcatatcctttacttctggacaatgtttctgaattatatctttgatcattttgtaccctccattttttctttctgtttctg

SEQ ID NO: 624280 - DNA, 552 bp, Homo sapiens
agtactcaaaatgcatgtttcctattccctagaagctgtatctttttcaatatcaatatgaaaactggaatgtatatttgctataaatataaatttgaatttttgtaaacaaaccccccctaaattttatgttgaaactctaactctaaccccaatgtggctttatttaagatggaacatctgtggaagtaattaaggttaaataaggccataagggatatgattagtcccctttaagaagaaatgccggagagagagttctcctctcttctctctctctctctctctgtctgtctctctctttctctccatgtacacacagagatggaaaatcatgtgagaacatagtaagaaggcagccatctgcaaacaagaaagagakccctgactagaaacataatttctagcaccttaattttgggcttctagcctcaagaactctgatgaaataaatgcctgttgtttaagccacccagtctatggcatttagttatggcagctcatgtagataaatacaacattcgaaaacatcactatgtgattttgaacaag

SEQ ID NO: 624281 - DNA, 574 bp, Homo sapiens
ttttcacatgtaaattcaacggcgtgactaaactagttgccattttctatttggctaccacgaaacttagggaaaaaaatgagggaacattattaccagatgtgtggtttacaagagtctaatgtttatcctcatttgttgttcatccattataaatactatatttcaatgttttatatgtctttgaatgcaactctaaagcagcacaccagcatggcacatgtatacatatgtaactaacctgcacattgtgcacatgtaccctaaaacttaaagtataataataataaaataaaaaaagaagaaaaaataaaaaaattaaaaaaaataaagttttcttataataataatgtgtgcataaagaatgaatggttaaatccccatctaaaatactagtttgtacaatwtcatctctatttagtacctagtcttgtaaaagtacataattcttaaatcccagcttatattgttataaagacatgtgaatggattttgtaacttatgggcagttctatagatagactctcagaaaggactagaacaaggattccaaacatatctgtgtattgaaatt

SEQ ID NO: 624282 - DNA, 618 bp, Homo sapiens
aaaaacataaaacaaaatcactgaatgttccacagaagaatgtatcaaaatgtgctgtatgtataaaattgaatattatacacaaatgaaaataatattcattaaaatagaatattatacacaaatgaatgaactatatctccaagtgacaatatgaattattttggggaacataatgttagtgaaaaatctagctataaacgtttgtactttttttagtaataaacttttcytatcactagagttttgatttttcttgaatttaatataaatggactcatacagtatttagcccgtattacttttttagtaatacacacttttatactcaaaataaggaagcttaataatatagggttcaagcacacatacatatttgataaaactgtaaaaaggaatagaatgatgaacacaaaatcaagatagtaagtacttctgtagggaggtgggagacttggatagggaagaacacgtaagtaggtacaagttatttacaatgttatagtgcttaggtaagggtttcattgacttttattacattccttccttttttaaacttaagcatttcatttatcttttcacatggataaaatattatataaaataaaaagaaaagca

SEQ ID NO: 624283 - DNA, 515 bp, Homo sapiens
aatgacagagccacactacttcatcagatcctccttgggacaagatgttaaggtgggagatgggaagaaagacctgggtcagacagataaagataggaatgtcagtagagtagcttctagcttctctctgtgcaaagaaactagctttcctgaaagtgaaatctatgatttatagtttgtgagccttgtattgtaactaaaccaagtgtctctcactgaacatattcctacacctttaaaatttcccagagtgtgaaaaaggtctgtgcttccatcttatggctctactgtattatggctccaaggatgtcctggtgtcaaggggctggaagacagtgtcaagagaaagcatggaggatcaaccatgtaaccaccagacttagtccatttgtgttgttayaaaggaatacttgagactggataatttatttaaaaaaaaaagaggtttatttggctcattgttctgcaggctgtacaagaagcatggttctgatatctgtatctggtgagggctt

SEQ ID NO: 624284 - DNA, 515 bp, Homo sapiens
aatgacagagccacactacttcatcagatcctccttgggacaagatgttaaggtgggagatgggaagaaagacctgggtcagacagataaagataggaatgtcagtagagtagcttctagcttctctctgtgcaaagaaactagctttcctgaaagtgaaatctatgatttatagtttgtgagccttgtattgtaactaaaccaagtgtctctcactgaacatattcctacacctttaaaatttcccagagtgtgaaaaaggtctgtgcttccatcttatggctctactgtattatggctccaaggatgtcctggtgtcaaggggctggaagacagtgtcaagagaaagcatggaggatcaaccatgtaaccaccagacttagtccatttgtgttgttacaaaggaatacttgagactggataattyatttaaaaaaaaaagaggtttatttggctcattgttctgcaggctgtacaagaagcatggttctgatatctgtatctggtgagggctt

SEQ ID NO: 624285 - DNA, 585 bp, Homo sapiens
aaggaatacatttccctaaatatttttttggtatttctaagcacaccagtcaaaagacaaagaagtcgctctgtgagcctgggcaagtcattacctactctggccctcagccctttcatctctaaaatgaaagggttagataaaagaattctgcatttctaagaaaacctcctaagaatcaagaaaaagaaattgtgttttttcatggcaacaattcaggggtttttcaggctacccaattagctgggtccaaccatttctaataaaggaggattagaccraaaatagcaaacttgataagggatatgcccctacaggccaggctggtaattaaatgagtgagggaggctagttggtgacaatagagttgaagagctaatgtctcatcataatggggcagcctcttttcaacttcattcaatgattgctacaaggaaatgtgggcccagtgatgcaagagctttatttttcaggaaaaaagagaaaaccagatttttacaatgaaatctccacattttgaaatctttgcatacagtttgaatttttcccaaaccattgtgcaggccaaactaaaaatttctacca

SEQ ID NO: 624286 - DNA, 525 bp, Homo sapiens
gatacacacacttatttacactagtcactcccttatgcctggcctgtgagctcccttgagagcaagggtcatgtctcatttatctttggagctccaattttgaatgcagtctctgacactcaatgaatctttgttaaattagctggatgaatatggaatgatatagagatgaataaaacatggtccttacccccaagacatttaaaatctaatagaatagagaacacacataccagaaacaatagaagacagcagtaaaagtgtcacagagagttaaagggcaaagaaaagagttcattaaagagaaatctaggtggggctttaaagacttggtaggatttcaacaaaccaaataaagtaagaacaagtttcatgcagggtattccaggtggaaggaacaacataagttgaagyctagaagagagaagccctaaagctgacccaggataatctcatttggatggagcatagagtgcagataggagacatgcctggcaagtaggctagaatcaaatagagaaagta

SEQ ID NO: 624287 - DNA, 582 bp, Homo sapiens
cagcggatgcttttagtgctaccctgtcattccttaatgaagatgagggctgggggtaaggggaggtcgtccaagaaaaggactaaacaaaaactgcctaggaaggtgtgcgacagcaaacggtcatctatagagacagcttctcccacgttctgccccaaactcaacaaatatctatccagcgcctaccctcactagmgaccaacctagagagaagctaggaaggcagggacaaaccgtgactttaagctcatttgtatattgtcctcaaactcccaggacctactctgctctctatactccctataaatgttagacttgtcaggaacaaaatgcaactagagggagtgcaggcacaggagcagccagggagtgaggttctgggtgttgccgctgtgctaggttgcattcaatatgaagatttctgttcaactgagcatgtgcggaatgagccagcgccatcagacaggtatatgcctcagttgaagaccaatagtgtctttgttcctccgcacagcaaaagtgcccaattagttcataagtcagtttccagaaatcgtctggtaaatttctcagtgcagt

SEQ ID NO: 624288 - DNA, 582 bp, Homo sapiens
cagcggatgcttttagtgctaccctgtcattccttaatgaagatgagggctgggggtaaggggaggtcgtccaagaaaaggactaaacaaaaactgcctaggaaggtgtgcgacagcaaacggtcatctatagagacagcttctcccacgttctgccccaaactcaacaaatatctatccagcgcctaccctcactagcgaccaacctagagagaagctaggaaggcagggacaaaccgtgactttaagctcatttgtatattgtcctcaaactcccaggacctactctgctctctatactccctataaatgttagacttgtcaggaacaraatgcaactagagggagtgcaggcacaggagcagccagggagtgaggttctgggtgttgccgctgtgctaggttgcattcaatatgaagatttctgttcaactgagcatgtgcggaatgagccagcgccatcagacaggtatatgcctcagttgaagaccaatagtgtctttgttcctccgcacagcaaaagtgcccaattagttcataagtcagtttccagaaatcgtctggtaaatttctcagtgcagt

SEQ ID NO: 624289 - DNA, 536 bp, Homo sapiens
tatggtgaatccccgtctctactaaaaatacaaaaagaattagcagggcgtggtggcacacacctgtagtcccacctacttgggaggctgaggcaggagaatcgcttaaacccaggagacagaggttgcagtgagccgagatcgcgccgttgcactccagccaagagcgaaactctctctcaaaaaataaaaattaaaaaaaaaaaaaccaataaacaaacaaaaccaacaaccttgggactaacaaatttgcaacaaaaccttacttagcggtaattattccatctgttggtctaatttattctgagcaccaaggaatgaaaatagtttacccaaaaaaggtctgaggaagcccacacctatgttatttattccaagagaaaccctgggtccctctycttcaagatccagcactctccacacattgttgacagcctctgttttgcagcctttaaagccacagtagtttaaaaagaagattagccagaggagactgttacacgtggacacactgataacaaagacaaagtatgact

SEQ ID NO: 624290 - DNA, 626 bp, Homo sapiens
ctatttcgaggctattcctataaaatccaaagaaataccagttggcaggtgaaattccaaaactgaacagagagtacaccttgaatatatcagggagctgtcaaaaactatttcacaatgggattttgtgaggtggattagaaaatggtgagtacagaagagacaattcttatttctcttagaaggcttagaaaggtgagaagagcagaacagattggttcattaacgtgctaaccttagaaatgcatgtttcttaatagggctgcctctactggagatcccctaaaagagccaagttcagagcttgaaaaagagggaaaacgtttccaggctaagcacttgtcagttctcccatgagttcatgtaggggagtatctccctttattcatttcagagcaagaagactcagcaatgactgggagcgtgggctgtgctctcagtcccacctggcatgctagacctttacacaacgtaatgcagggtagtcactcctgagccaaaggcaaaatggggggsggggggcgggggcgggggcggggaaagatgtcttcttctccagagacatgaaatgttttggggattgtgagcctctgccataaagcctactcttaaggcagatgatggaa

SEQ ID NO: 624291 - DNA, 622 bp, Homo sapiens
ggattgtgagcctctgccataaagcctactcttaaggcagatgatggaaaggcaaagatttcttattttaagggcttctatttgagtgcagtttttgctgagttccaagcaattcatatgaacgcaattcctctgtgtgcacagaacctggtctacagagaacttgagatggtgagtggtcgggatttacttagtctagaacagggcttctcagacattttaccaggagttaaaacttatattaagggaaagggacaaagtgatctgattcatatgtatgtttagtgttttgtaataaaccagcatttgttctcagaggtyttattaaaaagtataattttcaggatgggtgaacctcagcaatttgaaagactacaaagcctctgagttagcgttcaagttctgcaaatgctataaaaccaactattttcattaaacatcccatgtatgaagtttggtctaatctgagaaggatggcaatcaattgattttcacagtattccggagttttgctgaaatgcttgctgtgattaatttaagggacttcaaaatttcaaaatttcaaaattatttctcaaatttcataactaatatccaattttgatttaacaattggttctat

SEQ ID NO: 624292 - DNA, 622 bp, Homo sapiens
ggattgtgagcctctgccataaagcctactcttaaggcagatgatggaaaggcaaagatttcttattttaagggcttctatttgagtgcagtttttgctgagttccaagcaattcatatgaacgcaattcctctgtgtgcacagaacctggtctacagagaacttgagatggtgagtggtcgggatttacttagtctagaacagggcttctcagacattttaccaggagttaaaacttatattaagggaaagggacaaagtgatctgattcatatgtatgtttagtgttttgtaataaaccagcatttgttctcagaggtcttattaaaaagtataattttcaggatgggtgaacctcagcaatttgaaagactacaaakcctctgagttagcgttcaagttctgcaaatgctataaaaccaactattttcattaaacatcccatgtatgaagtttggtctaatctgagaaggatggcaatcaattgattttcacagtattccggagttttgctgaaatgcttgctgtgattaatttaagggacttcaaaatttcaaaatttcaaaattatttctcaaatttcataactaatatccaattttgatttaacaattggttctat

SEQ ID NO: 624293 - DNA, 622 bp, Homo sapiens
ggattgtgagcctctgccataaagcctactcttaaggcagatgatggaaaggcaaagatttcttattttaagggcttctatttgagtgcagtttttgctgagttccaagcaattcatatgaacgcaattcctctgtgtgcacagaacctggtctacagagaacttgagatggtgagtggtcgggatttacttagtctagaacagggcttctcagacattttaccaggagttaaaacttatattaagggaaagggacaaagtgatctgattcatatgtatgtttagtgttttgtaataaaccagcatttgttctcagaggtcttattaaaaagtataattttcaggatgggtgaacctcagcaatttgaaagactacaaagcctctgagttagcgttcaagttctgcaaatgctataaaaccaactattttcattaaacatcccatgtatgaagtttggtctaatctgagarggatggcaatcaattgattttcacagtattccggagttttgctgaaatgcttgctgtgattaatttaagggacttcaaaatttcaaaatttcaaaattatttctcaaatttcataactaatatccaattttgatttaacaattggttctat

SEQ ID NO: 624294 - DNA, 573 bp, Homo sapiens
ataaaaccttctggcaccttgatcttggactctccggtctccagaacttgagaaatagatttctattctttattagttagccagtcttatggtattttgctacagcagcacaaacaaactaagataaactacaaaggacataattgttaagacattttcctggagagagggaccaagatggcagactggaagtaggctcatgtgctcagctcttatgctcttaccaagaggaaacaaaagggctagtgaacagtgaccctgcaggctgatcatctgagaaaccacatcttgatccatgaaggcaacagggggacccagagaacagagagaagagaagctgggcaccagcctatctgtgttcagcgtggtgccaggagaacctcttcaacacaggaaatggtgagttagtgagagcctcctgggggaattygtgctgtccacaggaacctgtacaagactggaaatgggagaatacccctgcccctcaacccccacgactccactctgcttctagactgagacagagagctacctggatattttgcaggaacaagtcctgagtccaggaagacc

SEQ ID NO: 624295 - DNA, 473 bp, Homo sapiens
gacattacataatgataaagggttcaactcaacaagacgacctaactatcctaaataaatattcactcacyacagcagcacctagatttgtaaaacaaattcttaggaacctatgaagagactaagataaccagacaatagtagcaggagacttcaacaccccacagacagtattagattgtttggggcagaaaattaacaaagatattcagaatctgaaattgacatttgacaaatgggcctaatagacatctacagaactcttcaccccaaaacaaaagaatatacattcttctcatttgcacatgacatatactgtgaaattaaccacacaattggccataaaacaatcctcagcaaattaaaaaaaaaatgaaattatactaaacacactctcagacaacagtgcaataaaaatagaaatcaataggtaagaaaatggctcaaaaccagagaattacatggaaattaaa

SEQ ID NO: 624296 - DNA, 498 bp, Homo sapiens
ggaagaagttaagtccttgaacagaataataattagtttcagaactgaatctgtaataaaaagcctaccaatcagaaaagcccaggaccagacagattcatagctgaattgtaccagatttgtaaaagagctggtaacattcctactgaaactattccaaaaaaaaaaaaaaaaaaaaagaaagaaagaaagaaaagaaagargaggaaggactcctctcttactgaggccagcatcatcctgataccaaaacctggcagagacacaacaaaaaaagaaaacttcaggccaatatttttggtgaacatagatgcaaaaaccttgaacaaaatactagtaaactgaattcagcagcacatcagaaagctaatccactatgatcaagtaggctttacttctgggatgcaaagttggcttaatatacatatgcaaatcaatatgttatttaccacataaacagaacttaaaaaccacaggatcatatcaatagatgcagaa

SEQ ID NO: 624297 - DNA, 498 bp, Homo sapiens
ggaagaagttaagtccttgaacagaataataattagtttcagaactgaatctgtaataaaaagcctaccaatcagaaaagcccaggaccagacagattcatagctgaattgtaccagatttgtaaaagagctggtaacattcctactgaaactattccaaaaaaaaaaaaaaaaaaaaagaaagaaagaaagaaaagaaagaggaggaaggactcctctcttactgaggccagcatcatcctgataccaaaacctggcagagacacaacaaaaaaagaaaacttcaggccaatatttttgrtgaacatagatgcaaaaaccttgaacaaaatactagtaaactgaattcagcagcacatcagaaagctaatccactatgatcaagtaggctttacttctgggatgcaaagttggcttaatatacatatgcaaatcaatatgttatttaccacataaacagaacttaaaaaccacaggatcatatcaatagatgcagaa

SEQ ID NO: 624298 - DNA, 554 bp, Homo sapiens
tagaagcattccctttgagaagtggaataagacaaggatggccactctcatcactcttactcaacatagtactggaagtcctayccaaagaaatcaggcaagagaaagaaaaagcatccagataaaaagagaggaggaagtcaaactatctctatttgcagataatattattctattcttagaaaaccctattgtctccgcccaaaagctcctagatccgataaactacttcagcaaagcgtcaggatgtaaaatcaatgcacgaaaaccagtagcatttctacacatcaactacagttaagcagagagcccaatcaagaatgcaatcccatttatgatagaagaagagttaatacctaggaatacagctaatcagggaggtaaaagacctctacaatgagaaatacaaaacactattcaaagaaattggagaaaacacaaacaaatggaaaaacattccatgctcatgaatacgaagaaacaatattttttaaatgacatactgcccaaagcaatttacagatttaatgctgttcctatcctactaccaatga

SEQ ID NO: 624299 - DNA, 632 bp, Homo sapiens
atatcatatctaaacagcagcaaaccaaagacaaagaggacatattgaaagaagacaaggggaaaaaaagccttatctatagaaaaaaaaagrataagagttacagcagaattctcaccagaaatcatgtacaaaagaagagaatggggtgaaatatttaatgttcaataacaaaatttaccaacttagaattttgtatccaggaaaattatcctttataagtgaaggataaataggaaaacaaaaactgagaaaatttattgacaacaaacctgaaagaaatattgaaagatgtttttcaggaagaggaaaaatgacatatatataagaaactcctatctatataaagaaagaaagaatattgggggaggaataaatgaatctattatagaatcaagtcctttatttttcttgttcttaaaatatataaaatataatgcattgcctaaagtatagtagtagcaatttattaggagattataacatatagataaggaaaatgaatgataatgaggttataagagatggaattgggaatactttgttataaggtgactatactttaaatgaagcaatataatgttattttaaaatgggctgagattaattaaaaatacatattgcaagctcta

SEQ ID NO: 624300 - DNA, 477 bp, Homo sapiens
accaggcatctatattttttaaaagcctcccagatgattcccatatatagccaaggtggaaaccattggcttagagcagcaacagtgattaactattaatgtaaaataaccatcactgagttgactctaatttggagggactgtcasttttttaaccttgaagatttaacacatatgcctcaatattagggtcatgagtacattggtctgtcaatactttggaaattagtcattaagtcaatagtttaaactgaaattagacatagaaacactttttttctagtacctatatgtctggtttttatctctgcatatattcctttttggcaggttagaattaatgaaacaaggcaggctccttttgcaggagtttacatcacatgaaaaggatctcagatttaaaatcaaccataatacttaaaactaatggtttactgctgttagcagctggtaggcctctctgaagctggcatgagt

SEQ ID NO: 624301 - DNA, 542 bp, Homo sapiens
tccatattcttaattattttctgtctactagttctaacagttgctgagagggagatgttgaagtctccaactataattatgaatttgtctctcctttcagctctgtcaatgtttgtttcatgtattttgaggcactgcttttggtgcatatgcctttagaattgttatgacttcctggtggatttaattatgggtatgttagagcttaagactaccattttgttatttgttttctgtttgtttcctctggttatcattcctttttctcttttattgttacttgaatacttcttagtatttcattttgacttatttatagtgtttttgagtgtatttcttcatagagtttttattttggttatttcartagacatatgtgacttatcgcagtctgctggtatcaatgttttgccaccttgaaggacatgtggaaacctttcttccatttaggtcccttatctttctttctttcttccttttttttttttttttttttgagacagagtctcactctgtcgcccaggctgcagtgcaatgaagcg

SEQ ID NO: 624302 - DNA, 564 bp, Homo sapiens
acctaaccaaggagatgaaagacctctacgaggaaaactacaaaacactgctgaaagaaatcatagatgacacacaaatggaaacacatcccctactcatgaatgagtagaatcaatattgtgaaaatgaccatactgtcaaaagcaatctatagattcaatgcaattcccctcagaatatcatcatcattcttcacagaactaggaaaaaatcctaaaattcgaatgaaaccaaaaaagaccatagagagccaaagcaagactaaacaacaacaacaacaaaatctggaggaatcacattacccaacttcaaactatactgcaaaactatagttaccaaaacaatatggtactagtataaaaataggcacataaaccaatggaacagaatagagaacccagaaatacagccaaataattacagtcaactgatctttgacaaagcaaacaaaaacataaagtggggaaaggacaccctattcaacaaatgctgctgggataattggcaagccatatgaagctgaaygaaactggatcctcatctctcaccttacacaaaaatca

SEQ ID NO: 624303 - DNA, 618 bp, Homo sapiens
tcaaggctgcaatacacaagaataacacacgtacacaaattgcatctctctatggtaacaataaacaagtggaacccaaaataaaaactgcaataccaataacaactgctcgaaatacatgaagtattaatatgtaggtataaatctaataaaacatatacaggagaatatagtgcaaattacaaaattctgctgaaagaaatcaaatatctacataaatggagagtcatgccatattyagggatgggaagtctcaacatagatgtcagcttcccccaaattgcaggtttaatacaattctaaatcttggcattgttttttgtatacatatgcaaacttattgtaaactttatattaaaagggagtggccctaggttagctgaaataattttgaaaaagaataattaaatgccagaaaacactgtaccaagtattaaagcttactctataactacagtgatcaactcagtatggtgctggtggagggatagacacattaattactggtgcagaacagagaccccccacccagaaatatgcttaattaatttttgagaaaaatgcaacagcagtttagtagaggagtgatagccctttcaacaagtgctgcaggatcaa

SEQ ID NO: 624304 - DNA, 618 bp, Homo sapiens
tcaaggctgcaatacacaagaataacacacgtacacaaattgcatctctctatggtaacaataaacaagtggaacccaaaataaaaactgcaataccaataacaactgctcgaaatacatgaagtattaatatgtaggtataaatctaataaaacatatacaggagaatatagtgcaaattacaaaattctgctgaaagaaatcaaatatctacataaatggagagtcatgccatattcagggatgggaagtctcaacatagatgtcagcttcccccaaattgcaggtttaatacaattctaaatcttggcattgttttttgtatacatatgcaaacttattgtaaactttatattaaaagggagtggccctaggttagctgaaayaattttgaaaaagaataattaaatgccagaaaacactgtaccaagtattaaagcttactctataactacagtgatcaactcagtatggtgctggtggagggatagacacattaattactggtgcagaacagagaccccccacccagaaatatgcttaattaatttttgagaaaaatgcaacagcagtttagtagaggagtgatagccctttcaacaagtgctgcaggatcaa

SEQ ID NO: 624305 - DNA, 646 bp, Homo sapiens
cctgcttgctttcagggtgggcaggtgtgcctgagatcttctggtgggtggaggggccrgtgtctgcccgacaccaatggcaagtgccagccaaggccccctccaggctgtatcaccaagggcccctggttcttcctgtgcttgctctgaggccccacttccgtgccgggatgggttttggggaggtggtcactgtgctgccagacaggcaggaagggagcacagagcagagagggagcacagagcagagagggagcacagagctcccctcctggcaggggtgagtccaggcctccagtgagagagggctggccagggatgcagcccgggtcgcagtgggccccttgccagcaggctccctgggcaggaggccgcagcagcacaatgtcagtgatccccagcctcagagcctgtgagccagcacaccagcccctggcctcagctgctgtccccaggaaacctctgctctccctccatgtgcttttggacatggagcctgcagctggggcaagacaaggacgccacatgtgcagagcgtcagcactgggactccctgctgcgctctggactcgaccttggggactcctggcccctcctgatgcagcagctgcggctgcagtggccctcccttccctcccaccctctg

SEQ ID NO: 624306 - DNA, 646 bp, Homo sapiens
cctgcttgctttcagggtgggcaggtgtgcctgagatcttctggtgggtggaggggccggtgtctgcccgacaccaatggcaagtgccagccaaggccccctccaggctgtatcaccaagggcccctggttcttcctgtgcttgctctgaggccccacytccgtgccgggatgggttttggggaggtggtcactgtgctgccagacaggcaggaagggagcacagagcagagagggagcacagagcagagagggagcacagagctcccctcctggcaggggtgagtccaggcctccagtgagagagggctggccagggatgcagcccgggtcgcagtgggccccttgccagcaggctccctgggcaggaggccgcagcagcacaatgtcagtgatccccagcctcagagcctgtgagccagcacaccagcccctggcctcagctgctgtccccaggaaacctctgctctccctccatgtgcttttggacatggagcctgcagctggggcaagacaaggacgccacatgtgcagagcgtcagcactgggactccctgctgcgctctggactcgaccttggggactcctggcccctcctgatgcagcagctgcggctgcagtggccctcccttccctcccaccctctg

SEQ ID NO: 624307 - DNA, 566 bp, Homo sapiens
catgtaactggcctttaaacccatgaaaatgcttgagaacacgcgggaaaaagtgagtaagtagagaaaaaagaaagtactcagctaagtgggttgaagacagtacaggaaatattgaaggagactgtctattgtttgattgatttctttcaaagaaagaatacaaagtaagttgataactgaaggacaacggtaggtcaatgtaaacttttaacaaaaagggaattattcattaatgagaatgataatactaaaatgagagggagagctaaggacagaatttacttaatattgggagatcttrtcaatttagcataagacatgtggtaactttgtagaaggttattgttatgaatgctgtgggagtgaatgcattgggaaactaaaatagaatgtttggcactgttgagtatccttttaagttttgtaatgaattgaaatcatgttattagttacaacgtggatgagcctggaggacattacgttaagtgaaataagacaggcacagagagagaaaaaccacatgttctcacttatatgtgggaggtaaaaatgaacttataaaa

SEQ ID NO: 624308 - DNA, 566 bp, Homo sapiens
catgtaactggcctttaaacccatgaaaatgcttgagaacacgcgggaaaaagtgagtaagtagagaaaaaagaaagtactcagctaagtgggttgaagacagtacaggaaatattgaaggagactgtctattgtttgattgatttctttcaaagaaagaatacaaagtaagttgataactgaaggacaacggtaggtcaatgtaaacttttaacaaaaagggaattattcattaatgagaatgataatactaaaatgagagggagagctaaggacagaatttacttaatattgggagatcttgtcaatttagcataagacatgtggtaactttgtagaaggttattgttatgaatgctgtgggagtgaatgcattgggaaactaaaatagaatgtttggcactgttgagtatccttttaagttttgtaatgaattgaaatcatgttattagttacaacgtggatgagcctggaggacattaygttaagtgaaataagacaggcacagagagagaaaaaccacatgttctcacttatatgtgggaggtaaaaatgaacttataaaa

SEQ ID NO: 624309 - DNA, 410 bp, Homo sapiens
taggccacaatgagaatgagagtagtttaaacaggaaaaggaagaatcagagagattattgaaaatgccatcmactaagcataattcaaacagaagacaacatatatatatatatatatttttcacctaggattagtaaatcaagaaaattgtattacaattttattggaagatgagttctataatatactaagtataaaaaaagaagtaaaagacttgacatataccataataaaatatttaataagaacatatctagtaagtacatagaaatatataaatggaaacagctttattcaataagtatttgtgactattatatatgttatctcatttatcttcacattatttttgtaggataaatattactaatttgatgtgttggttgcaaaaagggtaatgtcactaaa

SEQ ID NO: 624310 - DNA, 410 bp, Homo sapiens
taggccacaatgagaatgagagtagtttaaacaggaaaaggaagaatcagagagattattgaaaatgccatccactaagcataattcaaacagaagacaacatatatatatatatatatttttcacctaggattagtaaatcaagaaaattgtattacaattttattggaagatgagttctataatatactaagtataaaaaaagaagtaaaagacttgacatataccataataaaatatttaataagaacatatctagtaagtacatagaaatatataaatggaaacagctttattcaataagtatttgtgactattatatatsttatctcatttatcttcacattatttttgtaggataaatattactaatttgatgtgttggttgcaaaaagggtaatgtcactaaa

SEQ ID NO: 624311 - DNA, 613 bp, Homo sapiens
aatacatgcttgaatttgttactacttttgaaaaattctgtgtctccccacaccttcctcattccacttcgctagttattatgtttcttttttaatttatgaagatggaatataatgcccaattcataatactgtttttcaggtacaaagttggcatagacaatactgaaatacawgtgatgacatttacagtagcaattcaaattaaaagagaaaagcatctttctaaaccatcttcaagtaaacagttgccatttatttctactagcaaatatttctatgtatcctaaaaattaaaagtgatatacattgagtaagactttacagtcctcagaatagtataatggaaaaatatgtatttgatatgttttcctgccatttcactatctagaaattgtcctaatccttaaaagagatcattagctagccactgaaatctcaggggaaaagctgttaaaactgacagctacattttttaacactacacatatagacatctcagagtttaaatacattggatttgtaatctctctgttatttagaagaggtgctgtataggtgaaggactcattttgtgaacctttcttagtatatcagctaatttattcttaga

SEQ ID NO: 624312 - DNA, 563 bp, Homo sapiens
aaagctaaagtaactctggaaatgtatttggatcagttactgcaaatttataattttcctttaggaagtagacagtaggataaaccattgaaatgtttctttcttgttttgatgtagttccaatacttactaaatatgtggcttggacatgttagcttctttatttttaaaacagaacaaaaaatagacrtcatattgatttgaatactaaataggatagaagtaataaaccatatatggcaatgcttagtacattagtaaacacttgataaataagtggtagctattattattgcttgccaaataactttacagaggtgtcaaaaaattcaaaatcccacatgtcctcagagttatttctgcttgccaggtgtccctgcttagaaattaataggacgtacacaccaaaatttgacatttagatgtttcattccacttatttgtcttctagtttaaaaatacttatgagaattctttatattttttaaaaaatgttaaatgatgaataacaaaacaaaatagaaagtgttatataatgaattcaaattcacaaaaccgcttct

SEQ ID NO: 624313 - DNA, 563 bp, Homo sapiens
aaagctaaagtaactctggaaatgtatttggatcagttactgcaaatttataattttcctttaggaagtagacagtaggataaaccattgaaatgtttctttcttgttttgatgtagttccaatacttactaaatatgtggcttggacatgttagcttctttatttttaaaacagaacaaaaaatagacgtcatattgatttgaatactaaataggatagaagtaataaaccatatatggcaatgcttagtacattagtaaacacttgataaataagtggtagctattattattgcttgccaaataactttacagaggtgtcaaaaaattcaaaatcccacatgtcctcagagttatttctgcttgccaggtgtccctgcttagaaattaataggacgtacacaccaaaatttgacatttagatgtttcattccacttatttgtcttctagtttaaaaatacttatragaattctttatattttttaaaaaatgttaaatgatgaataacaaaacaaaatagaaagtgttatataatgaattcaaattcacaaaaccgcttct

SEQ ID NO: 624314 - DNA, 506 bp, Homo sapiens
atcaatgaaaacactaaaaactagaaaacaatctaacttctgaaattattctaaaatagtataagaatatattttatatatgcttgtaatgtaggaagggctctttaaaagtgtgacacaattcataaaggaaaaaatgtttaaagataaatactgattaattgattattaagccagattcaggtaaccctactactaatttacacaattacatagtgaatctttgaggcttaggtgctaatatatatgaagtaactaaaataaaaactaataaattccttgtaattggtttgcattwatttcagcagaaaagatatattactattttatttataattataaaatcatgtgttaattttcagtatgctattctgtaagtgaaagtatgtttgaaaattgtaatggtggagaaaaatttagctgcactttacttaaaactaaacatacacacattacagatagagtccaatgagtttttaagaaatttattgagctataattaacat

SEQ ID NO: 624315 - DNA, 610 bp, Homo sapiens
taaccctactactaatttacacaattacatagtgaatctttgaggcttaggtgctaatatatatgaagtaactaaaataaaaactaataaattccttgtaattggtttgcattaatttcagcagaaaagatatattactattttatttataattataaaakcatgtgttaattttcagtatgctattctgtaagtgaaagtatgtttgaaaattgtaatggtggagaaaaatttagctgcactttacttaaaactaaacatacacacattacagatagagtccaatgagtttttaagaaatttattgagctataattaacatattaaaagccaaaaatatgtaagataaattattagatatgctctgacatatttatacatccatgagatcatcattattgtcaagatagtgaacatataaatccacaaaatgtttcctcatgactacttttaataatccccttttgcaattattgtctctcctaataagcatcttagctagacaactgctgaccatctttcagtattgtatgttactgtatattgtatattggtgcatccagaagttttatataaatggaatcatataaggtgcactattttttggctg

SEQ ID NO: 624316 - DNA, 499 bp, Homo sapiens
ttttaagaaatttattgagctataattaacatattaaaagccaaaaatatgtaagataaattattagatatgctctgacatatttatacatccatgagatcatcattattgtcaagatagtgaacatataaatccacaaaatgtttcctcatgactacttttaataatccccttttgcaattattgtctctcctaataagcatcttagctagacaactgctgaccatctttcagtattgtatgttactgtatattgtatattggtgcatccagaagttttatataaatggaatcatataaggtgcactattttttggctggcatttttgctttacagcaaaattcttttgaaattcattcatgttgttgcatgtgtcwgtagtcgaacctttttattgctgagcagaatttttctgtacgtatatatcaccaattacttgttaatgaatatgtgggtcatgaccacgttttagctattaaagagaaaatgcctatgaac

SEQ ID NO: 624317 - DNA, 614 bp, Homo sapiens
gaccatctttcagtattgtatgttactgtatattgtatattggtgcatccagaagttttatataaatggaatcatataaggtgcactattttttggctggcatttttgctttacagcaaaattcttttgaaattcattcatgttgttgcatgtgtctgtagtcgaacctttttattgctgagcagaatttttctgtacgtatatatcaccaattacttgttaatgaatatgtgggtcatgaccacgttttagctattaaagagaaaatgcctatgaacatttatatacaacaatttctttttcatttttygagggggaaatatctagaagataaatgactagattaagtggtaagcataggtttactttttaaagaagctgtcaatctattttacaaactggttgtcaatcaaaagtatattaaagtttcagttcctccattttcttgcctatacctggtagggtcaatattttttttctctttggacattgtaataactatcagtagtatttctttgtggttttcaattctttaatgattacagaagttaaaattttttgatatacttatttgtcatccatgtcttctatcatgacgtctttttcaatctttt

SEQ ID NO: 624318 - DNA, 614 bp, Homo sapiens
gaccatctttcagtattgtatgttactgtatattgtatattggtgcatccagaagttttatataaatggaatcatataaggtgcactattttttggctggcatttttgctttacagcaaaattcttttgaaattcattcatgttgttgcatgtgtctgtagtcgaacctttttattgctgagcagaatttttctgtacgtatatatcaccaattacttgttaatgaatatgtgggtcatgaccacgttttagctattaaagagaaaatgcctatgaacatttatatacaacaatttctttttcattttttgagggggaaatatctagaagataaatgactagattaagtggtaagcataggtttactttttaaagaagctgtcaatctattttacaaactggttgtcaatcaaaagtatattaaagtttcagttcctccattttcttgcctatacctggtagggtcaatattttttttcwctttggacattgtaataactatcagtagtatttctttgtggttttcaattctttaatgattacagaagttaaaattttttgatatacttatttgtcatccatgtcttctatcatgacgtctttttcaatctttt

SEQ ID NO: 624319 - DNA, 614 bp, Homo sapiens
gaccatctttcagtattgtatgttactgtatattgtatattggtgcatccagaagttttatataaatggaatcatataaggtgcactattttttggctggcatttttgctttacagcaaaattcttttgaaattcattcatgttgttgcatgtgtctgtagtcgaacctttttattgctgagcagaatttttctgtacgtatatatcaccaattacttgttaatgaatatgtgggtcatgaccacgttttagctattaaagagaaaatgcctatgaacatttatatacaacaatttctttttcattttttgagggggaaatatctagaagataaatgactagattaagtggtaagcataggtttactttttaaagaagctgtcaatctattttacaaactggttgtcaatcaaaagtatattaaagtttcagttcctccattttcttgcctatacctggtagggtcaatattttttttctctttggacattgtaataactatcagtagtatttctttgtggttttcaattctttaatgattacagawgttaaaattttttgatatacttatttgtcatccatgtcttctatcatgacgtctttttcaatctttt

SEQ ID NO: 624320 - DNA, 389 bp, Homo sapiens
acgttacaggttgaaatgtgtggttggagagaatattacctgcttgtgctaccttcacataaatacaaaattgcaattgtcattcaatatgaatgggacattgtcgtctttgtgtttccacagaggatgaagactgagctcactcttcaccaaattttaattagccatgccaaatggaatcctttggaattgctcaagctctccacagtagtaaatattaagcaatgcagaattccaagggcacaataagagactactgttgtaattaagaaaatggtttagaaggaagttcccytccccacattaacttcccttttgtagttctaactggtcaataagtaggtagcccctgaacatttacagtagagtatcaaggtggttcatttgca

SEQ ID NO: 624321 - DNA, 442 bp, Homo sapiens
agtaaaattatgggagaaacgtgtttagtctaagttatggcaaggtttcaccgaacactgtgacctttaatgttgctccctgacaaccctggtaatatggatgaaaaagaagtttatctcccgtgtgtggaattcatagaaagtggatgaataaagaacaatcctttgacatatgtaggccatggggtgtggatgggctctttgacataatgacccctgaaaattagtgtttgtaccaacctggaatatacctaaaatacagttcatagaaacaaatttttttcagaaaatttgatttgagaaaaaatatgtattcaattaaatactcccataggccagtggaaaatgatgcaaataattgaggttgatggaggaaaaaggtaattgagtctgtgaatgaacatcaagasacttgtaaaggaagatgttatgagtaacattg

SEQ ID NO: 624322 - DNA, 597 bp, Homo sapiens
accacagtcatttgttcttgactatttgcaaatcatttcaggaagacatggtgaaacatcctacactgtgagtggcagaaccccatgtgcactgcaatctcatttcctaccctccagaggagtatataaacttttcctacataaataatggccacatttttgtatcgatacattgtaagttctaagatgtgtgtgttttttttaagaagaattaaaatagaaaagcatatacctaaaagatgttcctcgggatatatctgcatatattctctactcttgtcattttaartaaaaatacagtggtcccttgatatcctcaagagattgggtccaggaccccagaggataccaaaatcagcacatattcaagtaatcctgtggaaccagagtatacaaaaagtcagtcctccatatctgcgggtttttcatcctgtggctactgtattttgatccacatttcaatgcagatgctgattttttttaattaaaagaatctctatataaggggatgcacacagctcaagctcatgttgttcaagtgtcaaccgtacttttttatttctgtccaatataatttaaataacataattctgtgaa

SEQ ID NO: 624323 - DNA, 543 bp, Homo sapiens
aggttaagtatgcgcagttggtgcttactaaatatagcctagcaatgctccctgtttctttttyttaacctttaatttcaggggtacatgtgcaggtttgttatataaatacatttgcatcatgggggtttgttttacagattaattcattacccaggcattaagcctatgactcattagttatttttccagatggtctccctcccccgaccttctgccctcttgtagggcccagtgtctgttgttcccttctttgtgtgcatgtgttctcatcatttagcttgcacttacaagtgagagaatgtggcatttgttttttcgttcctacattgatttgctaaggataatggccttcaattccatccatattccttcaaaacacatgatctcgttcctttttatggctacatcttattccctggtgtatatgttcaacattttatttatccagtctttactattgatggccatttaggtctattccatgtctttgttaatgtgaatagtgctgcagtgaacatatgtgtgcgtgtgtctttataa

SEQ ID NO: 624324 - DNA, 543 bp, Homo sapiens
aggttaagtatgcgcagttggtgcttactaaatatagcctagcaatgctccctgtttcttttttttaacctttaatttcaggggtacatgtgcaggtttgttatataaatacatttgcatcatgggggtttgttttacagattaattcattacccaggcattaagcctatgactcattagttatttttccagatggtctccctcccmcgaccttctgccctcttgtagggcccagtgtctgttgttcccttctttgtgtgcatgtgttctcatcatttagcttgcacttacaagtgagagaatgtggcatttgttttttcgttcctacattgatttgctaaggataatggccttcaattccatccatattccttcaaaacacatgatctcgttcctttttatggctacatcttattccctggtgtatatgttcaacattttatttatccagtctttactattgatggccatttaggtctattccatgtctttgttaatgtgaatagtgctgcagtgaacatatgtgtgcgtgtgtctttataa

SEQ ID NO: 624325 - DNA, 614 bp, Homo sapiens
tctgttgtagtttccattctttcttaaaggttttaacattttgttatgaacatgacaagccttatttttttttccacacatagaaggaacacgaattataaatagaacaaaacactgtgaaatactgcaaatgtagaataattatttgatctcatgcacacacctcggtaatttaaattaaattctataagttaatgactaaatattttaaaattaactactttaaattaagatgtatttagaaataattttaatgttattgaaattttttaaaaaacctattktaacataagaaatcatgatataatgcaaatactacatattttcagaaaatttggtaatgaatatcaactcccaaaaaaccatcttagtcattgcataaaattctacaaatgatatctgattttaatttagaggaaagtacatgaactgaaagtcccaactgaataaatgcttaaaaaaggatgatttaaaaaaatttaaaggtaacatttattaattaaaataattctgatagaaaatcctaacaatgtacattattgtctagatttataattccgtaaattaaatatacatccccctgcaagtggaaatacttcaaaaattaattctag

SEQ ID NO: 624326 - DNA, 614 bp, Homo sapiens
tctgttgtagtttccattctttcttaaaggttttaacattttgttatgaacatgacaagccttatttttttttccacacatagaaggaacacgaattataaatagaacaaaacactgtgaaatactgcaaatgtagaataattatttgatctcatgcacacacctcggtaatttaaattaaattctataagttaatgactaaatattttaaaattaactactttaaattaagatgtatttagaaataattttaatgttattgaaattttttaaaaaacctattttaacataagaaatcatgatataatgcaaatactacatattttcagaaaatttggtaatgaatatcaactcccaaaaaaccatcttagtcattgcataaaattctacaaatgatatctgattttaatttagaggaaagtacatgaactgaaagtcccaactgaataaatgcttaaaaaaggatgatttaaaaaaatttaaaggtaacatttattaattaaaataattctgatagaaaatcctaacaatgtacattattgtctagatttataattccgtaaattaaatatacatccccctgcaagtggmaatacttcaaaaattaattctag

SEQ ID NO: 624327 - DNA, 541 bp, Homo sapiens
aaagtcaatattgtgggacaaattaaatgacataaaaaatcaccttttttcatttgatataatgtaatggttataaaatatcttctcaagagttcttcaactgtcatttcattgagatgtggggactggggtctctgaccttgaatctgggrggacttttaacttctttgactaagagaatacaaaaaaaagcaatgctgtgtaacttttgagacctggcctaaatcgacaatctgacttctgctcactttttttcagaatcctccatctcaggagggccccagtattgccaggctgggagaaacccaaaccatgaggatagaccatgaataggagttctggttgacaatcccagttcattcctagcttcaaatacacaaggccaagtgccagatatgggcataaaaagcaatttggaagtggacactccagtcccagctgtcctagccctcagctatttgagttgcattcagacatgtaaatcttcccagctgaggcctcatcattgaggtgcagaaaaggggcatgcccactgtgcctg

SEQ ID NO: 624328 - DNA, 541 bp, Homo sapiens
aaagtcaatattgtgggacaaattaaatgacataaaaaatcaccttttttcatttgatataatgtaatggttataaaatatcttctcaagagttcttcaactgtcatttcattgagatgtggggactggggtctctgaccttgaatctggggggacttttaacttctttgactaagagaatacaaaaaaaagcaatgctgtgtaacttttgagacctggcctaaatcgacaatctgacttctgctcactttttttcagaatcctccatctcaggagggccccagtattgccaggctgggagaaacccaaaccatgaggatagaccatgaataggagttctggttgacaatcccagttcattcctagcttcaaatacacaaggccaagtgccagatatgggcataaaaagcaatttggaagtggacactccagtccmagctgtcctagccctcagctatttgagttgcattcagacatgtaaatcttcccagctgaggcctcatcattgaggtgcagaaaaggggcatgcccactgtgcctg

SEQ ID NO: 624329 - DNA, 605 bp, Homo sapiens
tctttcttggtcttctgggtaaggttgtatctgaatatgttgaccctaaatgtctgcagacatttttgcagaaatgttaagggtaaaagtgacacagccaatagcaaagaagtgccagaaaatacgtaagcaaactgtgacctctttttacctcttgattgacttttatgttaaataatgaatttaccttatgcttgaaagaatttgaaatagtatttrgcagtgaagaatttactcctcccatattttcattcaagagaaatttccaggaggagggttgttggtgggttacctccaactcaaccacttcagagctactacagtggtaatgcatgttgaagaaaagagtcaaactctgtgaaatatttgaagagatttattctgaggcaaatatgagtgacctcggcctgtcacacagcccaggagatcctgagaacatgtgccaaggttgttgggctacagcttggatttatacatgtgagggagacataagacatcaatcagtacacctaagatatacattggtaaaatcgggaaaggctagacaactcaaagcaggtgggggtggggtgggtgaaggcttccaggttaaaggtgaattcaaa

SEQ ID NO: 624330 - DNA, 418 bp, Homo sapiens
aaataatttatctaaagactggaatcaatagacaggagtgtatgggttaagataaggtgttttagagaccgaggttcttatgcagatgaagcttgcaggtagcaggcttcactgagaatagattgtaaatgatttttatcagacataaaaaggaaaaaggacttggaatcaggaaaaatcaggaaaaagacttggaaagagaaggggattctctacaaaatggagattttccccacagaaacagccttgtagggccatttcaaaatatgtcaaagaaatgtatttttgtagtgaaatactttgatttctttcaaggcctgctatctgtcatgttgacatcttattgctaygaagggtctgttttgtcattcttaagtctctactttactgttaacactgttcagctatgcatgaattc

SEQ ID NO: 624331 - DNA, 225 bp, Homo sapiens
tggaaagagaaggggattctctacaaaatggagattttccccacagaaacagccttgtagggccatttcaaaatatgtcaaagaaatgtatttttgtagtgaaatactttgatttctttcaaggcctgctatctgtcatgttgacatcttattgctatgaagrgtctgttttgtcattcttaagtctctactttactgttaacactgttcagctatgcatgaatt

SEQ ID NO: 624332 - DNA, 472 bp, Homo sapiens
cggaaatacagatatagatggccagagcacctacttgtagctcttgatagcagaattatcagtcaactgaaaagatattttaagacctccaagaataagtagataatttctattctgtattttgttaatgaaagaaaaccagggtaataactgcttgaattttcatcactagcatgtttcctacatacataaacatagtgagtagtgagtatattcacatataaagtaacaaagaattatagtaaaccccaacatccaatcgggaaaaatgttgtaactctatatattcattaaattgttcacaaactgacatcttttagcatatattatggtttcctttagcttgttaaagagcatggactcatgactaaaacataagaacacccaatgaagttcaactaaatcaattcaactatgaaaaataaamtgactagtgatcatctctttattattattgaaagaataacttaca

SEQ ID NO: 624333 - DNA, 476 bp, Homo sapiens
ccgttacatgggtattactattctttgcctaagttctatgtttagaaaatttttagatgtttttaatctctcaatttctgttttttactcttatttttatactctatatctcttactatagttcgtaccacttctatttgattttatgtaccttcaaattttttttttctaaaaactattttctaaaaattatcttacttgtctcagattatctgattctctgattaattttgattttgttccarttgtttttcttcagggtaagtatttttcttttgggagtgagcattattgatgatttcttgttgtagtttattgatattaagatcttacaatacttccttttatcttcattttatctttgccattaagtccagctggtactggccctatgctgccaatgattaggacaattactcttgtatcctgggttttatgctgattatttgtcacctgttttagttggtgatgtcacc

SEQ ID NO: 624334 - DNA, 476 bp, Homo sapiens
ccgttacatgggtattactattctttgcctaagttctatgtttagaaaatttttagatgtttttaatctctcaatttctgttttttactcttatttttatactctatatctcttactatagttcgtaccacttctatttgattttatgtaccttcaaattttttttttctaaaaactattttctaaaaattatcttacttgtctcagattatctgattctctgattaattttgattttgttccagttgtttttcttcagggtaagtatttttcttttgggagtgagcattattgatgatttcttgttgtagtttattgatattaagatcttacaatacttccttttatcttcattttatctttgccattaastccagctggtactggccctatgctgccaatgattaggacaattactcttgtatcctgggttttatgctgattatttgtcacctgttttagttggtgatgtcacc

SEQ ID NO: 624335 - DNA, 476 bp, Homo sapiens
ccgttacatgggtattactattctttgcctaagttctatgtttagaaaatttttagatgtttttaatctctcaatttctgttttttactcttatttttatactctatatctcttactatagttcgtaccacttctatttgattttatgtaccttcaaattttttttttctaaaaactattttctaaaaattatcttacttgtctcagattatctgattctctgattaattttgattttgttccagttgtttttcttcagggtaagtatttttcttttgggagtgagcattattgatgatttcttgttgtagtttattgatattaagatcttacaatacttccttttatcttcattttatctttgccattaagtccagctggtactggccctatgctgccaatgattaggacaattactcttgtatyctgggttttatgctgattatttgtcacctgttttagttggtgatgtcacc

SEQ ID NO: 624336 - DNA, 624 bp, Homo sapiens
gtaatcactgctatatgaaaactccgagttttatgagtgcttctgggaatacctagtaaagaaaacatatctgtgtgctttatcttttaatagttaaaaacagttttgacaataagtagtttatatttattagttattataatatgtataattgtaaatagtttatmggtattagttattataatatacatgtacatataacacattcatataaactataagtagtttatacgtattagtaattataatatacctattataataactaagaatagaaaggcaatgtagaaactaagagttatataatacccatagtaattaatcaataagcaaatactatttttagtatttttatactatttgtatatgtattcattactttatgtatataattctttatataattcttaggttctataatacctttattctgtatattttgaattatgtatttaatagcctaatatatttctaatttgcagaaaacaaggaaaattgtcttccttcaattattataagtatgcttttctttatccagggaggctaaaaggcaagatcataacaagctattatatggaaaattatttcttcaaaatattccttttaaaattgaggcaacagaat

SEQ ID NO: 624337 - DNA, 527 bp, Homo sapiens
ctttcttgtacacttcctttgtctctgtctctctgtgtgtttctctatctctcttccctgtgggaacacaacaaaaggtatctgtgtgacaagcatgaagaataccctcagcagaaactgactatgtgtatgctgatcgtgtacttcttagcctccaaactatgtggaaaaaaawttgttgtataagacaccaagtttattgcattttgttacggcagcctgagcagtctaacaagaaagcaataaaaagtataagtaattaagatgaaactaaatttatcatccaaattctcaccataaagaaataaccattttcaaaatatgtagaacaagatttcacatattttcctaaagtttatggacagagataattgataaagattttatacaaattgactattaagaaacgattgtatttaattataacagaagataaaaataattttgtatagagaaactgattaacgtttatgcatatttgttcctaaagtacattcaaagttaagagaacagattataaaatcata

SEQ ID NO: 624338 - DNA, 527 bp, Homo sapiens
ctttcttgtacacttcctttgtctctgtctctctgtgtgtttctctatctctcttccctgtgggaacacaacaaaaggtatctgtgtgacaagcatgaagaataccctcagcagaaactgactatgtgtatgctgatcgtgtacttcttagcctccaaactatgtggaaaaaaatttgttgtataagacaccaagtttattgcattttgttacggcagcctgagcagtctaacaagaaagcaataaaaagtataagtaattaagatgaaactaaatttatcatccaaattctcaccataaagaaataaccaytttcaaaatatgtagaacaagatttcacatattttcctaaagtttatggacagagataattgataaagattttatacaaattgactattaagaaacgattgtatttaattataacagaagataaaaataattttgtatagagaaactgattaacgtttatgcatatttgttcctaaagtacattcaaagttaagagaacagattataaaatcata

SEQ ID NO: 624339 - DNA, 575 bp, Homo sapiens
gacagagataattgataaagattttatacaaattgactattaagaaacgattgtatttaattataacagaagataaaaataattttgtatagagaaactgattaacgtttatgcatatttgttcctaaagtacattcaaagttaagagaacagattataaaatcataagttagagttcttatagtataggtttcttacaagaagggaagaaagcaaaataaatttaacacaactaaagcagatcttgcagaatgtgatttatatatggacatgagtcagcttcctaaacttgaatctcagtgttatatagatgaacccactcagacagaaacaacgttgaactagaacagaactcctttgacaggcaatgcacatgtttttaggagagcagaccgtaagctttctctgagcctccgagaggcagaaggtaagaatgmttctgggttatgcatcctcaagtttttgtttaaactctctgaataagtacctcattccattttgctgaggcaaagtgagtggatggggaaagcaggccaagggcattatgtgaatgggtcacttcaaagggaaaaaca

SEQ ID NO: 624340 - DNA, 638 bp, Homo sapiens
ctgctaaaccctgttgtaacaagaaagtagacaatatgcaaacaaatggctgtggctacaatattatcaactttattcatagacacaaatgttatattttgttaattttgtgttacggactactattcttctgttgatatttttgtattattcaaaaaatataaaaacattcttagctgcaggttgtacaaaaacaggcaataggacaggttcagtatatgggctgaagtctgctaaaccctgtggttcaactagaaatattacagtatatagctgctaatagcaagagcaatgtcctatttatacacaagaaaattatcacgggtggaaattatattaaatacattttaatcatgcaaattatacaggaatgtagtacttttgaaaaaatcaaacgattaccagtaaatctattgtgtgttggttcayccccagaaggccattattatcagtgtggtttgcgtatttccagacattttccaaagcaatcacataagttcattttaaaaatgtattctcacatattttactgataaaccatttaaaagtaaatgtgcaaacaatagttctgcaattcattcattctctttaataagaaacatgctggagacaaagaaggcaggttttttggtaaccat

SEQ ID NO: 624341 - DNA, 432 bp, Homo sapiens
acactgtcttccacaatggttgaactagtttacactcccaccaacaatataaaagcgttcctatttctccacatcctctccagcatctgttgtttcctgactttttaatgatcaccattctaactggtgtgagatgatatctcattgtggttttgagtttcaacatctttttgactgtcattatcatggttaacattaattgggagctaagacccaaaaattgtccatgtgcttcaaatgaattatcctataatccccaggataaccgagtgaggcagtkatgatttggctttgtagcatcggagccaggatgcaaatcgagtgtgctggacaccaagcccttaaccactaggttataattttcccatctgtaatccatgatagagtcacaagaaggtttggcaaggcactagaatttattcattaatacca

SEQ ID NO: 624342 - DNA, 346 bp, Homo sapiens
tttaactcaaacatgccaatcactggaaaaacccagaaatacctatgtcactcacaaaaatgccactcaaaggaatyagaagttcagagaagaaactggggaaggtaaatgcttttctagattcctcttcctccacccccccttgactattaaaagtgttcccaggtcctccttcagcccgtttttcactccacaccctcctttggtgtttgcatgcacagcctatagcttcaaccagcaatagactaagaattgtcaaattgaaatctctcagagttttttctttttttaagctctcaatctgtgtattcaactgcaatttagacatctccacctatgtcccatg

SEQ ID NO: 624343 - DNA, 616 bp, Homo sapiens
tttcttatgacatgattttcactgcatgttatttaacctgcaagaggtagaacagaaaaagcagaatctttcgtgatcaaaccgcacaactaaagagtgtgctgtttatgtctacttttcaaggtaagataaacttcaaagagaaatgaacttttaatttcaaattccaatttacatattaggacttaaatgacttcaaatcatatctaaaaatcaccataaccaaaccattgtaaatttttacttacattgagaataaaaataaataaatgttaagtatatttcctaataatatttgccatgcagcatttggaagaacaagtcctgtgacgcttctactttaagatttctgcattgttgttggctgatgtcatagactgttcctctatgatcacaagaattscctatttagaactgcatatgggtgcccgttgggtaacgtttcaagttgaaagaattttgcattttgtgttattgtactagaatgaaataatcttaatctgaaaagttttgatggttaaactctttaatatttttgtattcctgactattttcttcatttagctaagtttacactgaagtccttaattacccttctccttttatgataaaaata

SEQ ID NO: 624344 - DNA, 618 bp, Homo sapiens
gcaagttgccgataattgggttgtgaataaagtggattttatgtttctttctataattatttttatagttttagtgtagtatggaagactacctgcaatggrtggtgattgttagggttatctaaactagatccaatccagcttctcagtttgcccctatgaactacctggataacaatgccagctctatcttaattcccattagttaagtctgggattcagcaggcttttctataaaacatggaggaagttttattttcactgaagctctgcctttatagaatacttatttgattaaatgaggtaatgcattttctaaatcagtacttttcaagcctaaatacaaaatagaactcacctggggcttttaaagcctaccagttttctgccttgcatccccagaccaattaaaccagattctctgtgtgattctaatacgcagccagagttgagaaccatggagcttattgtttgaagaggatacaagggaaataaactaatgcccaagcccatatgcaaatggttgcagttgatttttttttttttaatccaggtcctgtagctactggcagaggagacccagttaatagattcaagctatcttggcttcatttaaat

SEQ ID NO: 624345 - DNA, 598 bp, Homo sapiens
taatataaatatatatgtttgaaagagtaataaaaaaggaagaactgaattgcatccatagcaggacaagtttcctcatacgttaaagaggtgttcagaaaattccatacagtatctgctaaataaacatgtttcgcagcttagcaaagattatatgatagcagcatccatgatttgaagtaaaacagcatttgctttcttctgctggaggtcgttgctcggggcgatgtgcatgttcttagacctacagccttaaggaagggcttgggggtggctcagtgcatggccccagtgcagacacttccaaaccccaaacaatgaatcaaccaaccaaacacacaaacatcaaacaattgtctcctttgagttcctcttgaccgaatggaggctcagcaaggactgctgtagaaggtacattaacagattttggaatgaggaaaataccttaatacctaggtattaagcctcgcatgcattagctatttttcctgatgctctccctcccccmacccacaataggccccactgtgtgttgttcccctccctgtgtccatgcattctcattgttcagctctcacttataagtgagaacctgtgg

SEQ ID NO: 624346 - DNA, 299 bp, Homo sapiens
gaaagctaagaatttatagacaaagagcagagtgaaggggtcagcagatggaaaattgttaagaggagatatcaagtgtagagggattcttgcttaaccggcctaacaagattcttcttagaggcagattaaggacttagacattaacggcgaggggtgagaaacttggttagatatcaagcatgagagattctcgctaaactgacttagtaggatttttgcttaaggcaggccaaggatgaggcctagttgagaagrgggcgtagagaagcctagctaaagtttgaacacggagggag

SEQ ID NO: 624347 - DNA, 501 bp, Homo sapiens
ttgatactatgattgaaaaattctgattaccggagcattactattagttgaggaaaggtttgaatggagaattttattaactgatgatgagtgagtataagagcattttgaagccartgggttggcacgtgcctataatcctagcactttgggaagctgagatgggaggatctcattagcccaggagtttgagaccaacctgggcaacatagggagacctcatctctacaaaacaattaaaaatatattagtaaggtgtagtgatacatgccctgtggtcccagctacttgggaggctgaggtgggaggatctctttgagcatgggaggccaaggctgcagtgagctgtgattgtgccattgttctccagcctgggtgacagtgagactggctcagaaaacaaaaggttatttctctgccattacagaagaagcatgctacactgtcttctcttattaaaatgcaattaataaaccctggacagaatgcattgttgagcag

SEQ ID NO: 624348 - DNA, 571 bp, Homo sapiens
gcagtctgtccattctcagatctcaaactccgtgctgggagaaccactactctcttcaaagctgtcagaaagggatgtttaagtytgcagaagtttctgctgccttttgttcagatatgctctgcccccagaggtggagtctacagaggcaggcaggcctccttgagctgcagtgggctccacccagtctgctttgtttacctattcaagcctcagcaatggcagacgctgctcccccagcctcgctgttgccttgcagttcaatctcagactgctgtgctagcagtgagcacagctccgtgggagtgagatcctccaaagcaggcgcgggatataatctcctggtgtgccgtttgctaagaccgttggaaaagcgcagtattagggtgggagtgtcctgattttccaggtactgtctgtcatggcttccttttgctaggaaagggaattccctgactccttgtgctttccgggtgagatgatgccccaccctgctccatgggctgcacccactgtctgacaagctccagtgagatgaacctggtacctcagttggaaatccagaaatcac

SEQ ID NO: 624349 - DNA, 571 bp, Homo sapiens
gcagtctgtccattctcagatctcaaactccgtgctgggagaaccactactctcttcaaagctgtcagaaagggatgtttaagtctgcagaagtttctgctgccttttgttcagatatgctctgcccccagaggtggagtctacagaggcaggcaggcctccttgagctgcagtgggctccacccagtctgctttgtttacctattcaagcctcagcaatggcagacgctgctcccccagcctcgctgttgccttgcagttcaatctcagactgctgtgctagcagtgagcacagctccgwgggagtgagatcctccaaagcaggcgcgggatataatctcctggtgtgccgtttgctaagaccgttggaaaagcgcagtattagggtgggagtgtcctgattttccaggtactgtctgtcatggcttccttttgctaggaaagggaattccctgactccttgtgctttccgggtgagatgatgccccaccctgctccatgggctgcacccactgtctgacaagctccagtgagatgaacctggtacctcagttggaaatccagaaatcac

SEQ ID NO: 624350 - DNA, 464 bp, Homo sapiens
ccggctaattttttgtattttagtagatacagggtttcaccttgttgcccaggctgttctcgaactcctgacctcaggatccacccrtctcagcctcttaaagtgctgggattacaggcgtgagccactgcacctggcccataatgaattcttaatattatgtagctattcatgttaagacttcctggtcacctccttcaacaactgggaaacatcagttttggaacccatagtcatatctaataaaggcacattctcttgccttgtcttagaaataaaataaaacaataatcaatacaaagaattgctgtctttggtctccatacttttccatttttacaacaaacttcttatgcaaacctcacaatatcagcgtaagagtcaattttcatactttgacccaacactctaccttataggtagtcaatgaatatttttctgaatgaacaaacattttaattcat

SEQ ID NO: 624351 - DNA, 469 bp, Homo sapiens
tgtttatcacaatttttaaaaaagtaacatgtgctaagtatagaaaatctaaaaaaggaattgcaaaaaagaaaaataaaattatttcatctcccaaaaaaccactgtaaacccgtttaatgtatattgtcatatagtttttaaaaatcatactacacacttttttaaaaaaggaattcctatcaatgtctttcttaaaaacattaattctctttagtactgatttaattttactaaaagtttaattggaagtcttttaattcaaaggttaaaataattaaagtacaatttttgccccactaaaacagttatgtyatcaaaataaccactggagtcctctaggtttcccagcagaatggcttttactcagagttagtacagagtttcaattcttgcattattaaccaaaccagtcttgtgtaagcaatcacacgtattactacttgggtaaattgtactaaattgttct

SEQ ID NO: 624352 - DNA, 555 bp, Homo sapiens
aaggaactctcaaaaccatgcaaatacatggaaattacataacctgctcctgaatgattgttgggtcaataatgaaatcaagatgaaaatttaaaaaattatttgaactgaatgataatagtgacacaacctatcaaaatccctgggataaagcaaaggtggtgctaagaggaaagttcacaggattaaatgcctacatcaaaaagtctgacagcgcacaaatagaaaatctaagatcatacctcactcaactggagaagcaagaacaatcaaaacccaaacccagcaaaagaaaagaaataacaaagatcagascagaactaaataaaattgaaacaaacaacaagaacaaaagatacatgaaagaaaaagtttgttcttcaaaaagataaataaaattgatagaccattagtgagattaaccaagtaaagaaaagagaagatccaaataagctcaattagaaacaaaacaggggatattacgactgataccacaggaacacaaaatattatttaaggctagtatatgaacacctttatgcacataaacaagaa

SEQ ID NO: 624353 - DNA, 587 bp, Homo sapiens
gtgaattaagaaagtctagtgcatggtcagtgcattaacatatatgcaacatacatcttacgttcactttggggtagggttttatgttaagataaagtggaattcggctctttacatcagaaggtgcactatatggcacaaagacgttttgtgtacagtttctgcaagcttatgatctgtagcttcttatcaggaaagaatgtttataaggttggcctcctatccaacaggtgctgcgggcacaatcaaggaaggggtgtcacaattggttggagtcagttagtccactgaggttagttgcgtagtctttctctagaatggatttctrtaatacctaattgcaggaggaaaactttatggcaattaacaaaccttatagtagttaacaatgtaggggtacctgaccaaacctttctccctgctgtagctgcttagttttctttagagcgtttcattttagccacaaagagtactgatgagagtacctctcatcagtcagataggtacaatgttgacacttttaagggtgaatatgttgacacttttaagggtgaatatgtgccaatgaaaatagtgacaaggtcctt

SEQ ID NO: 624354 - DNA, 595 bp, Homo sapiens
ctgctcccaagcttactcgtaataattgacaaaaggtttaattcctcaccactttggcctttctatagggctgtttacaacatgacttccccgaaagcaatgataaaaaagagatacagtgggttgctgaatgagttaaagaaatacccagatacatatgtattttgattaaaaattaggaaatagtaaaaaggaaacataataaaagacttatgttctrttgtcacaattcatacaaaatattaaaatttgtgtatgtgactcttatagattaaaagaagcagcggaacgaagtggtagtgtggtagaaagtactgtcataaatattgttatcttttcttgcactcgataagacattttacactactgatacggacagaggctgtatcccctcaaagtatttgaagaaactacaaaaggagaggacaaaaggatgtgaattgtaggaagaatggggagaaggggtcattggcagtcatcttggggactggctattgcctcacaaaaggatatgtgatttgatttttgcaaaaaaaaaaaaagtctaaataacagtcttctaagataagattctcttctattattatttattagt

SEQ ID NO: 624355 - DNA, 627 bp, Homo sapiens
gttgtgtatcagtctgttttgacactgctataaagaacactacctgagactgggtaatttataaagagaagaggtttaatttactcacaattccatatggcctgggaggtctcaggaaacttacaatcatggcagaaggtgaagaagaagcgggtaacttcttcacatggtggcatgaaagagaggagcaaagggagaagagtcccttataaaascaccagatctcatgagaactcactcactatcatgagaacaacatgggagaaactgcttccgtgatccagtaagcttccactaggtccctcccttgacacatgaggattaaaattcaagaggagatttgggtggggacacagaaccaaaccatatcattcctcccctggcccctcccaaatctcatgtcttcacatttcaaaatgcaatcattccttcccaatagtcttcaaagtcttaactcattttagcattaacccaaaagtccaaagtctcatctgagacgaagcaagtcccttctgcccatgagcctgtaaaatcaaaagcaagttagttacttccaagatacaatgcgggtacaggcattgggtgctccaaatgggagaagttggctaaaacgaaggagctactggc

SEQ ID NO: 624356 - DNA, 540 bp, Homo sapiens
actgggtaatttataaagagaagaggtttaatttactcacaattccatatggcctgggaggtctcaggaaacttacaatcatggcagaaggtgaagaagaagcgggtaacttcttcacatggtggcatgaaagagaggagcaaagggagaagagtcccttataaaaccaccagatctcatgagarctcactcactatcatgagaacaacatgggagaaactgcttccgtgatccagtaagcttccactaggtccctcccttgacacatgaggattaaaattcaagaggagatttgggtggggacacagaaccaaaccatatcattcctcccctggcccctcccaaatctcatgtcttcacatttcaaaatgcaatcattccttcccaatagtcttcaaagtcttaactcattttagcattaacccaaaagtccaaagtctcatctgagacgaagcaagtcccttctgcccatgagcctgtaaaatcaaaagcaagttagttacttccaagatacaatgcgggtacaggcattgggtgctc

SEQ ID NO: 624357 - DNA, 540 bp, Homo sapiens
actgggtaatttataaagagaagaggtttaatttactcacaattccatatggcctgggaggtctcaggaaacttacaatcatggcagaaggtgaagaagaagcgggtaacttcttcacatggtggcatgaaagagaggagcaaagggagaagagtcccttataaaaccaccagatctcatgagaactcactcactatcatgagaacaacatgggagaaactgcttccrtgatccagtaagcttccactaggtccctcccttgacacatgaggattaaaattcaagaggagatttgggtggggacacagaaccaaaccatatcattcctcccctggcccctcccaaatctcatgtcttcacatttcaaaatgcaatcattccttcccaatagtcttcaaagtcttaactcattttagcattaacccaaaagtccaaagtctcatctgagacgaagcaagtcccttctgcccatgagcctgtaaaatcaaaagcaagttagttacttccaagatacaatgcgggtacaggcattgggtgctc

SEQ ID NO: 624358 - DNA, 651 bp, Homo sapiens
cccttataattgtacataaaaattgttctttcttttttatttgtccagattcctttattgctcattaaaacattttttaaaattttggcaattataaaataattaactcatgtcttttaaactttgcaagatgtcaccctgagggtctatcaaatcataacatttcttaaagtttcttacatgtttctggcattttttttttgtaaaaagaaaacatatcatcttcttctaaagggagattatrtgattatataatataaaagattacatgattcaactaaatgtatccattaagcttttatcaagaaaactaaaatctattcttttctaaaaattcatgttttatggcaaattcaagtcaataaaattgtgctaaaataattggaagcttcctcttcttcccttccttgacctgatgtattcactaggtgatggggcctgattcatcttttgtggctccactaagtaactgttactcttttctacatttaattattgtttttaaatcatttgaaagaacaaagaacattaggcaaaacatttttacattctcatataggactgaaatttcgatatatatatatatttaaatctcattttattttttttctttcaacttttctttcaggtttgggggcacatgggcatacg

SEQ ID NO: 624359 - DNA, 651 bp, Homo sapiens
cccttataattgtacataaaaattgttctttcttttttatttgtccagattcctttattgctcattaaaacattttttaaaattttggcaattataaaataattaactcatgtcttttaaactttgcaagatgtcaccctgagggtctatcaaatcataacatttcttaaagtttcttacatgtttctggcattttttttttgtaaaaagaaaacatatcatcttcttctaaagggagattatgtgattatataatataaaagattacatgattcaactaaatgtatccattaagcttttatcaagaaaactaaaatctattcttttctaaaaattcatgttttatggcaaattcaagtcaataaaattgtgctaaaataattggaagcttcctcttcttcccttccttgacctgatgtattcactaggtgatggggcctgattcatcttttgtggctccactaagtaactgttactcttttctacatttaattattgtttttaaatcatttgaaagaacaaagaacattaggcaaaacatttttacattctcatataggaytgaaatttcgatatatatatatatttaaatctcattttattttttttctttcaacttttctttcaggtttgggggcacatgggcatacg

SEQ ID NO: 624360 - DNA, 577 bp, Homo sapiens
acaaatagaaacatacagatgattgtttattattatattgtttgcaatattagacaataggaaatgtaatatttgaccaacaatagaggaatggtttagtaagtgtaacattacactttcacgtactatacatctattaaagtaatgaattaggtctaagaataatagcattgatagatctccagtgcttcctagtccctcaacatttagatgtaatcaagaagagtaaaaataagaaaagcagaagtgaccagaaaggagactggaaaaccatcagtgtgtgatattttggaaatcatattaaaaawattctaagacagaatgatcaaataagctgaaaactgaaaatcaaaccttagatttagcaatatgacactcgttgctgaccataacacattgatttattttaggaactgggtaggaaagtctgaagaaagcacactcaggaatgaaagcagagatttaaaatcagaatgaatagttattgtctaatagaaatttattataaagtagagcataaaataggttgatattttgagggtaaactatcataacattttttttctttttcctaatg

SEQ ID NO: 624361 - DNA, 585 bp, Homo sapiens
agtgtgtgatattttggaaatcatattaaaaatattctaagacagaatgatcaaataagctgaaaactgaaaatcaaaccttagatttagcaatatgacactcgttgctgaccataacacattgatttattttaggaactgggtaggaaagtctgaagaaagcacactcaggaatgaaagcagagatttaaaatcagaatgaatagttattgyctaatagaaatttattataaagtagagcataaaataggttgatattttgagggtaaactatcataacattttttttctttttcctaatgttgaaaaaaatatagttcattgatatgcttatgcatatattgaatagagaaggaaatttacagatgccggagagagcgggttgaaatcctttacttcatagagtaggacaatgataatggtatctagtgcaaaggggaggagtagctttgaacaagagcaaaaacagtttatccacaatagtagaagatatgtgggagcatataaacacagaatttacttcccaaaatatatgaatgtaaatattttaacaataaagtcaatattgctttgattgttggatta

SEQ ID NO: 624362 - DNA, 544 bp, Homo sapiens
gttggaggaacacatatataagtaaatatgtgataaaaatgaagttatctgtamtacggtagggctgatagaaactttattattctatttaggctgaaagaaaggaagcagtggaaaaaagtgaaaattcaatttatatgaagaagagtatgtaaatggtatctaataaagcagaaaatataaaattatatacacagggaagaagtattagccatgttggtaatcatgggaaaggaaataacagcaagcagagatacaactttgggccatcaagagaagcgagatagagatagttaattttcagtaacctccatgttctacttaagtaataagctttgtaatctctaggattacacaaaattagcataattaataatatcttaaagattcaggtgaccatgaattacatctagcagctatacagtaaatagtaagtggtgagactggatattattttcgcaggactgtagaatctctaaatatatttccttctatgggataacttactatcccaaatatagccatgaatcagcaaaattgctag

SEQ ID NO: 624363 - DNA, 548 bp, Homo sapiens
tccaaagttgtcagaggtgggagaaggtggcctaggagcagcaagcagccccctctytaacaccctgggacaaatggctctgggattagccatgcatggtggcgagcacctgtagtcctagttacaggaggctgaggtgggagggttgctggattccaggaattcaaggctgcagtaagctatgaatgtgccactgtgctcaagcgtaagtgagagagcaagaccttgtctctggaaaaaaaaaaaaaaaaaaaaaaaagaaaggaaggaaggaaaaaacaaaaatgagtggctcagggattaatgcccagtagccaagctgaggccaggctgaaaaggctggaagtctttactaaataggagacaaacataggaaaggaaatgtatagtgacagtaaactagataagctaagtgacaagataaaaccatattcttcttcagtttttgggtatccacagaattatatgtgaattcttccaaaaagcccagagacagataaaatttatttctcctatgtagctaaggtcacttgaataattgaccctgg

SEQ ID NO: 624364 - DNA, 548 bp, Homo sapiens
tccaaagttgtcagaggtgggagaaggtggcctaggagcagcaagcagccccctctctaacaccctgggacaaatggctctgggattagccatgcatggtggcgagcacctgtagtcctagttacaggaggctgaggtgggagggttgctggattccaggaattcaaggctgcagtaagctatgaatgtgccactgtgctcaagcgtaagtgagagagcaagaccttgtctytggaaaaaaaaaaaaaaaaaaaaaaaagaaaggaaggaaggaaaaaacaaaaatgagtggctcagggattaatgcccagtagccaagctgaggccaggctgaaaaggctggaagtctttactaaataggagacaaacataggaaaggaaatgtatagtgacagtaaactagataagctaagtgacaagataaaaccatattcttcttcagtttttgggtatccacagaattatatgtgaattcttccaaaaagcccagagacagataaaatttatttctcctatgtagctaaggtcacttgaataattgaccctgg

SEQ ID NO: 624365 - DNA, 548 bp, Homo sapiens
tccaaagttgtcagaggtgggagaaggtggcctaggagcagcaagcagccccctctctaacaccctgggacaaatggctctgggattagccatgcatggtggcgagcacctgtagtcctagttacaggaggctgaggtgggagggttgctggattccaggaattcaaggctgcagtaagctatgaatgtgccactgtgctcaagcgtaagtgagagagcaagaccttgtctctggaaaaaaaaaaaaaaaaaaaaaaaagaaaggaaggaaggaaaaaacaaaaatgagtggctcagggattaatgcccagtagccaagctgaggccaggctgaaaaggctggaagtctttactaaataggagacaaacataggaaaggaaatgtatagtgacagtaaactagataagctaagtgacaagataaaaccatattcttcttcagtttttgggtatccacagaattatatgtgaattcttccaaaaagcccagagasagataaaatttatttctcctatgtagctaaggtcacttgaataattgaccctgg

SEQ ID NO: 624366 - DNA, 618 bp, Homo sapiens
gagcgtgacacttgatcccctgtaaaggctcttattgatccctttgccacctcctcccagctgtgtgtcctggggcctgctcaagaagctggaatgtgaggacagctgctaccattcccttcctagggcatgtcccaaaggcctcctggccatgctctttatttgggacccttctgcagctgctggaaagggtgtgaagttatggaaggtaggggagccaaggccgtggtagcacaagacagctgtgtgcagagcaagggagaatgtgaagmgtcatctctggcttccttggagagagggcaggattctctcaggcagagcctaaaatttaaaaaaaaaaaaagagagaggacaggagagcaaccaagattgcctaaaaataggtatcagttctggcttctggatcccttaagggctgtggttcccgcatctggatcccttagggcagaattttcataccacagtatttacaaagtatagtcaagggtaaaacctcccagatgactgactgtattagagcttgaccgtcagaatctgtttcattctcacgcagatgcagtcatttagggagcccaaatgtcaggcactgtgcagattctaggagattcaggcctgccc

SEQ ID NO: 624367 - DNA, 598 bp, Homo sapiens
ctcctgcctcggactcctgagtagctgggactacaggcaagtgccaccattcccggccaatttttaaatttttatgtagagatgtggtctccttatattgcccaggctggtctcaaactcccgggctcaagcgatcctcctacctaggcctcccaaagtcctgggattacaagcatgagccaccatgtactcctaatatcctggtcttatgaggcaaaattatagttaaaatcacaactcatttgtaaaactaagggaaaagaaactctccaaaatggttaaattatttaaacaaaggagaattgattatgagacagcaaaakgcagcaggctatacaacttaagattctacaagctttagttgtaattaattgtgccagtgatttgtgactgaatgagatatatcacttattttttgttatcactacaatgaaagtgtcagtattaaccttagataacaaattgtatactcgagcacagcctgagataatatgaaatatgcaaaatattaagtggacagtaagtacttttcaaaagtatatgagattccaacaatttagagatcagagactgctctcatctcagagtggtaacagtg

SEQ ID NO: 624368 - DNA, 598 bp, Homo sapiens
ctcctgcctcggactcctgagtagctgggactacaggcaagtgccaccattcccggccaatttttaaatttttatgtagagatgtggtctccttatattgcccaggctggtctcaaactcccgggctcaagcgatcctcctacctaggcctcccaaagtcctgggattacaagcatgagccaccatgtactcctaatatcctggtcttatgaggcaaaattatagttaaaatcacaactcatttgtaaaactaagggaaaagaaactctccaaaatggttaaattatttaaacaaaggagaattgattatgagacagcaaaaggcagcaggctatacaacttaagattctacaagctttagttgtaattaattgtgccagtgatttgtgactgaatgagatatatcacttattttttgttatcactacaatgaaagtgtcagtattaaccttagataacaaattgtatactcragcacagcctgagataatatgaaatatgcaaaatattaagtggacagtaagtacttttcaaaagtatatgagattccaacaatttagagatcagagactgctctcatctcagagtggtaacagtg

SEQ ID NO: 624369 - DNA, 566 bp, Homo sapiens
ttgcctgcatcattggtagctgcactgaaaggaaaaaactttcaccttaagaatttgaaaaggaagaaacctgggctctggtcttcatggcatttagactgagatgcttaaacagaacagaagtaatacgcatttcctgccataggatagggaaaatgtaacaagctggttgctcttgaggttagaaaattgtctgtttctctgtggatgaagctggatttacttgaaaatggagagttggcttattgtttgaatattgggacatcaagctatctatagccaagtttcagtcgcaaccagttttccctttgtctggggtaaattcgatacaaaatgattctttttgaatcctgaatccataaattacacttttttttttcaamttcacaaaattcacagtggtgctgactgtgtaataaccactattgggaaacatcccgtaaacctgcctgttgccatgccaatggagtgactgaactggtgacatctgtttgagcatgctttgtgtggctggtagaatgccaccgttgtgcatacactttgtacatcaggggtgaagggagggt

SEQ ID NO: 624370 - DNA, 544 bp, Homo sapiens
ttagagataagaaaactgaggtccaaggttgtcgaacaatgttcccaaagttaaaaataagaatgtcctaaatatgtagttcccctctactttattaaaacatccctctatattgtctatattttatacacttctcagtgtacctcttctggattgactgattaaacttttccatttagggataatccatatcattggacattaaaatgtttcccaggaatggtattttctctaacttgtggaaattgagctaaattgttgtgtttttttttttcctattttcccacagcgggggaaaagcatccttgagtaaacccaaaggtttccgcatacccctgaggaaagaatgagaaggtaactgttcttacagcaatcatgatatgggactttctatgttcaggagcaaaggggaatccatagaaaagggcacaagaggcagctggctggctcagagctatccacactgcatggcagagacttgagacaaatgcagcattggtgggagccaaggtaaagccakgccagacagggtggaccactaggt

SEQ ID NO: 624371 - DNA, 506 bp, Homo sapiens
tagcaggaagctcttatgccctaaagttatttattaattttttacaaattaaaatataattcaactgattctcataggtacaaatgataccatcagcagtaatctaggtggcaactctaaaaactttcaagttttgcataacaaaactgaagaattttaatagaaggcgctaaaaaataactgctttgcsacttttgacaccaatgattttggaaagaataaaactaatgcccatgttaatggtactaaaagaaaagctatattcagtgacacttaagagaaaatagggcatatggtgaaaagggtgaaacactgttctggagaagtagtcttttctttcagatttctaaaagaaaagcccaggtataaatacaaacccatgactatgagagttaggatgtgtggcacacaaagataagccagatgtgaaaatggtcctcactaattcttagattaaaacaggagagctgagtagaaattatgcagtatttatgcctaaacatgta

SEQ ID NO: 624372 - DNA, 506 bp, Homo sapiens
tagcaggaagctcttatgccctaaagttatttattaattttttacaaattaaaatataattcaactgattctcataggtacaaatgataccatcagcagtaatctaggtggcaactctaaaaactttcaagttttgcataacaaaactgaagaattttaatagaaggcgctaaaaaataactgctttgccacttttgacaccaaygattttggaaagaataaaactaatgcccatgttaatggtactaaaagaaaagctatattcagtgacacttaagagaaaatagggcatatggtgaaaagggtgaaacactgttctggagaagtagtcttttctttcagatttctaaaagaaaagcccaggtataaatacaaacccatgactatgagagttaggatgtgtggcacacaaagataagccagatgtgaaaatggtcctcactaattcttagattaaaacaggagagctgagtagaaattatgcagtatttatgcctaaacatgta

SEQ ID NO: 624373 - DNA, 295 bp, Homo sapiens
agcatgatctttgcagggacatggatggagctggaggccatcatctttagcaaactaacacagaagcagaaaaccaaatactgcatgctctcacttacaagtgggagctaaacaatgaaaacaaatggacacatagaggggcacaacagatactggggcctatcagagggtggagggtgggaggagggagaggatcaggaaaaataactaatgggtactaggtttaatacctcrgtgatcaaataatctgtagaacaaacccccatgacacaaatttacctatctaacaaacctg

SEQ ID NO: 624374 - DNA, 621 bp, Homo sapiens
ttaactttttaagaaattgccaaactttttccccaagtgcttggaccatttttgcattcccaccagcaatgtgtgaaagttaaagttgttccacatccttatcaaagcttattatagtcagtctttttaattttagcagttctagtgagtattcagtagtatcttactacgttttcatttgcatttccctaatgactaatgataatgarcattgttttatgtgcttatttggcatttgtatactttggtgaaattcctgttcacatcctttctttatctttaaattgagttgttggtcctattattgaactgtgtttttatatattcagaataccagtcttttgtcagatatttgttttgtaaatatttttccttgtatctggtttgccttttcattttcttaaagtgtcttttgaagagtaaaagttttaaattttgatgaaatgcaattcataatttaaaaagtaatttgtgctttttatgtcctagagtttataaaatacattttaaaataaccagtcttctttcaaaaattatactgcttcatgcaaagtataagtacacttctctgtcttacctcttgctgttgatgtcataatttcactccaacatattccatac

SEQ ID NO: 624375 - DNA, 445 bp, Homo sapiens
aacactgagtactaagtaaatactagatgtgactattatcattgcaattttatgctgatttttagctaaatacttttcgtaacatcactcacaactgtgaagaagattgagtattagtactgtatagctctaactgtagtgagcgtgtaacaaatgtaaatacataagagggaaggagagagggaagaaaaagtatttttgtattatattctttaatattttatttaaattggaaaatcacttcttttccatagatgtaataacctgaaatatgagatatgacctaaacaaataagcacatccaaaatctrtacagtaatttaagaactgcgaggtctagctctcatgatttgattccagcattgcactgcaagccaaaacgtcctactatgttaccttatggactttgaaggtagctattctcaatttccccatgataatggcc

SEQ ID NO: 624376 - DNA, 599 bp, Homo sapiens
gcaagttagaaaaaggccacactttgagatgaattaagagtcctttattagccagcaaccaagagacggctaacgctcaaaattctcttggccccaaggaaggggcttgattaacttttataccttggtttaggaaggggaggggggcrtctagttaaaacaattttacagaagtaaagtagtcaaaaagttaaaaggataaatggttacaggaaagtaaacagttccaggtgcaggggccttaagactattacaaggtgacagacccggggctttgggagttatcaatcggacaaattcctggaaactgtggatatagcttgccacagtatcttatcagctaattgcattcttggatgtgctgggagtcagcttgcacaagttaagtccttgaggaaggggctgccagtgaaagagccaagatggagtctgtctggctctcttagctaagggagagtcaattcaggtggaaacaaggctaggtgattaaaggaaaagggagagtctaaaaacagagttagtaaaaaccaggttgggcattacaaagtcaataaatgtgatgcatcacataaacagaattaaaaacaaaaatcatatga

SEQ ID NO: 624377 - DNA, 540 bp, Homo sapiens
aagagacggctaacgctcaaaattctcttggccccaaggaaggggcttgattaacttttataccttggtttaggaaggggaggggggcgtctagttaaaacaattttacagaagtaaagtagtcaaaaagttaaaaggataaatggttacaggaaagtaaacagttccaggtgcaggggccttaagactattacaaggtgacagacccggggctttgggagttatcaatcggacaaattcctggaaactgtggatatagcttgccacagtatcttatcagctaattgcattcttggatgtgctgggagtcagcttgcacaagttaagtccttgaggaaggggctgccagtgaaagagccaagatggagtctgtctggctctcttagctaagggagagtcaattcaggtggaaacaaggctaggtgattaaaggaaaagggagagtctaaaaacagagttagtaaaaaccaggttgggcattacaaagtcaataaatgygatgcatcacataaacagaattaaaaacaaaaatcatatgat

SEQ ID NO: 624378 - DNA, 482 bp, Homo sapiens
gtgcagtggtgccatcttggctctctgcaacctctacctcccaagctcaagcgattctcctgcctagcctctggagtagctgagattataggcacatgtcaccacacctggctaatttttgtatttttagtagaggcagggtttcacygtgttggccaggctagtctcaaactactaacctctagtggtccgcccacctcagcctcccaaagtgctgggattacaggcatgagcctccacaccaggccaaataccttatttttttatctcttaaatttccgctttagaaaagtttggagctggtcacagtggctcacacctataatcccagcactttgggaggccaaggtgggaggatcgcttgaggtcaggagttccaaaccagcctgggcaacaaagtgagactccatctctacaaaaaatttaaaaattagctgagtgtggtggtgtgtgcctgtagtcccatcttagggaggctgagg

SEQ ID NO: 624379 - DNA, 545 bp, Homo sapiens
tttaccagccccaaggatcagctagatgcttgrctatagactccacagcgcccagagaaaaagagatatatctcctacacagctcaatgtcacaggataatctgaatctgatctatgaggggaatttgtgactgtttttgttactaagcgtaggtatttcttgcttcaggttctcacaaagaaaatacttatatgaggtaatggaaaacgctttccaacttcctggttttcaccaagttcagcaaaaacaactgcattaaaagtgggtacattttaatatcatgcttttaaattgccattgtaccaccagtcaagagaaattattacctaatttctattacctaagcattttcatagaagagcaaaagttatttttatttttaaagcacactgttatccaaaacaatccaaaaggaagtctaataacagtaggaaattaagtaatctccatatagaaaggattgccaaagaagggaagaaaatagaaggcattactcatgagtaccaccatctctcagaacctgggcatgtttcctaactgaatg

SEQ ID NO: 624380 - DNA, 546 bp, Homo sapiens
aaaacatatcctcatggtatgctcgcagtctgattgaggagacaaacattaaacggtgaccataggacaatgttttacacgctttgagagacataagaacaaaagtctggcagcagaaaagtcatttattgagatggaagaaacagcatactgaagctcgtcatacctgaatcacattctgcacttgtccatttctaaccgatggtggaaaattaaaatttcatggaggcctcagcttcttcatcaatagaagtatttttttgtctattcaagataaaaattagatttggagtactataggcaaggattcatggtagctaagatgatcacctgcctgatgtcaggactgatacctgatggaggcttttgtcctccaacaatatccagcccatggtagaccctcattacatgagtggacgcatgcacttttgtgtcartttacctaacccatgtctgtcctgctccttatcaatgtttatagcctcctatgataaagaggaattgttttgttctctgtctggcatcacagatggaatttctccttgt

SEQ ID NO: 624381 - DNA, 386 bp, Homo sapiens
attatgtcaaaaattagtttccttttatttaataaaaggtggttagaaatgtaaatraaagctccacttaaaacatcaaagtgatgtaacactcagcggaagcttaactttaactgtaagatctatatgataaagaccttaaaacattactaaggaatacaaaagacaacctgaatataaatgaagacatattttctgcttgcataaaagtagtatgctaaagacataaagtgttataacattaatctcatcacttaaagaaataccaataaaaaatacacatggtttttaggagaacaatataaattgattctgaaattcaaatgaaaattaatataaatgtaaataaaacttgataaagcaggactataccaagtaatatatat

SEQ ID NO: 624382 - DNA, 431 bp, Homo sapiens
tttaacatattctgaatcttttattttttgcaactttcactgtctcagattagactttaaaactcaagagctagaataattggtctagcaccatctctggtgtcttctatggatgcgttgcctacagtatattctgtcatcatctgtggttttctaaactgaattgcatttaatttcaatcaagcaattcatgctgtatttgaacttcaggcatatctttattttccagaaagcctgtttatcatatggccactcctgacttcctgaaactctaacagattaactgagaagaaaacaagtattatatttataaggcattttcagctagtggaaaagataaatgactatatgagtcaataaaaaagtataattttcattgaaaggtagattgaagagcctatcaagacmaaaaaaaaagatctgtttttaat

SEQ ID NO: 624383 - DNA, 614 bp, Homo sapiens
attacaactacaggcaagttgtacctgcaaatagtatttgcacatgctgcctctctagtttctgtgatgctgggagatgtctttcagaggcctgagtgagtctttacaacctgctcaatttgttttgtgaattatgagtgatgaaattctagattacaaattgcagacaaagaagtctgtgccttttcccaggcatagcgtcagctggtgaagtttatagagccrgatgtatttagtagaaatcagagcgtgactaacacttcaagaagaagatttgcagatgcacaaaaaagagcagagaagtccagaattgcagcttggctttcaaatatgattattggttttttctgacaggtgaaacatttataaggaatcaaaatgctactcattatgcaaaatgcctgcagaaatatctctattcagaagcaactaaaacgtatacagttgacccagacggagaccaaaggccccttctcaggtattataaatggtctatatattgataggggttacatgggtctatgcatctgtcaaactcagcaaattatttaaggtctgtatgtgatttcactgtctagaattatacctcaataaaaacgtataacgtttatctt

SEQ ID NO: 624384 - DNA, 571 bp, Homo sapiens
gcttaattactttacatttagatcttttataaccagatgcttgaacccctagtctgccatgtattgctgctgcctttattggtgttaccaggtaatagtcacctgagtttttcacatggtcttggtttgagggtagtctactaaagaatgcccacatatagtgtttcaaatattattaaagagtgataattaaatgtgcctgatgtataaaaagcatgtgaggtcatttaaactaacacttttattgtgattgttgtgaaggttatsaaaaacttgatcatgtatattatctaaagggattgttacaaacctcaagtgacttcaggtcattgaaaccattgcatgtggtgaccagctacagaggccatgacatttttcccttgcctattgtatccaagggtattttgcaaatcaccgctttgcatggtacaaccttcggagtttctagaaattgcctggaggataaaccagagtatattcaacaataggatttcctagaattagtgggagaggtgtaattaagttactgtgtaatatatttcccccaaatgataaatatcaatatgtgaac

SEQ ID NO: 624385 - DNA, 571 bp, Homo sapiens
gcttaattactttacatttagatcttttataaccagatgcttgaacccctagtctgccatgtattgctgctgcctttattggtgttaccaggtaatagtcacctgagtttttcacatggtcttggtttgagggtagtctactaaagaatgcccacatatagtgtttcaaatattattaaagagtgataattaaatgtgcctgatgtataaaaagcatgtgaggtcatttaaactaacacttttattgtgattgttgtgaaggttatgaaaaacttgatcatgtatattatctaaagggattgttacaaacctcaagtgacttcaggtcattgaaaccattgcatgtggtgaccagctacagaggccatgacatttttcccttgcctattgtatccaagggtattttgcaaatcaccgctttgcatggtacaaccttcggagtttctagaaattgcctggaggataaaccagagtatattcaacaataggatttmctagaattagtgggagaggtgtaattaagttactgtgtaatatatttcccccaaatgataaatatcaatatgtgaac

SEQ ID NO: 624386 - DNA, 505 bp, Homo sapiens
atttacacacacacatatgtatacacacatatattaatcaaaagcattgcctacttcaagaaaataagaaaaatcacaaggggtaacatttcgcaagtgtgcaaagcactattctaaacaccttacatatataaacacgttgagttgtcactgaggctgagtaaacctttaagctcttttactgtctgctgtggtgttgagttctgaaaatattgatagtcctcttatcactggtaatgacatgacgtgccatccaatgacctttgtacaatcatgatttatgtataggttgaactaggggcatcgccatttaagaacgattaagacaaatcaaggcatttctgaaagagaacagattgattttstttcttaaagtatttatagcttgtaaggcagctgtctgcttttgtatattcttaaacaagcatcatagaccttattcaataatttaagtgttttctttagaactgttttgcagcaaaccgaacttcccatttgcattgat

SEQ ID NO: 624387 - DNA, 577 bp, Homo sapiens
ttctttacgactttctttgaaagagagatcacagggtatatatgtggaaaacttgggtttgagtgaagaccctaaaattaattattcatgtattcagtcaataactttaccacactaacaatgcacagaaattgggattctggaaagagctgagttttaaattgtatttcttcctgagtttgataattaacatcttcagcagggtgtcgttcattcacaaaccaggatgaaatacagcctgtgtgctgaactttatgttaaacactgtacaaacagagataaaagtccaaggtcttttgtcgagggattcacaccaagtggtgaaaccccatgtcaatagacagttacaatattattgtaatattactgttaattcacttttatccatgctgttaattcatttttatccatactgacaaaaagagagggcatatccatcaatgcatcagtggatgcatctgaggtcctaagagtgtgatctccaagctttgcagggtgtcattaatggccttggaaataaagggttcttttagtacatgcctcstttaatgattccggtaggttcttttagtacatg

SEQ ID NO: 624388 - DNA, 533 bp, Homo sapiens
ataacactgaactccccatggttcaagaatggacttgttcagggagtcagtgtattctyccatattagagcacaaacccctggaaaataggccacaaaaccagttaaattttgattggaaaaggaattggatttctttcactacttaattctaggtgctggatatacagctacgcatgaaacaaacaaaatccctgacctcctggagtttagtctcaaagaagaaacactaaaaaagtaaacagatcaacaatattatttcagcaaattgcaagtgctataaagaaagatgaagtaggaaaagggaagggtagtggctgggaaaggagttttattgatggtttcatagaaggctcctgagaggtgacaagatagcagagtctgactgattagagaaagtcaggaggacaagaagaagagcatccccagcagaggaaggagcaggaatggaagccctgctgcaagaatgcagagtggggctgaggagttctgccctggctctagcacatgccctgaagagcctgcattttgtaa

SEQ ID NO: 624389 - DNA, 533 bp, Homo sapiens
ataacactgaactccccatggttcaagaatggacttgttcagggagtcagtgtattctcccatattagagcacaaacccctggaaaataggccacaaaaccagtwaaattttgattggaaaaggaattggatttctttcactacttaattctaggtgctggatatacagctacgcatgaaacaaacaaaatccctgacctcctggagtttagtctcaaagaagaaacactaaaaaagtaaacagatcaacaatattatttcagcaaattgcaagtgctataaagaaagatgaagtaggaaaagggaagggtagtggctgggaaaggagttttattgatggtttcatagaaggctcctgagaggtgacaagatagcagagtctgactgattagagaaagtcaggaggacaagaagaagagcatccccagcagaggaaggagcaggaatggaagccctgctgcaagaatgcagagtggggctgaggagttctgccctggctctagcacatgccctgaagagcctgcattttgtaa

SEQ ID NO: 624390 - DNA, 533 bp, Homo sapiens
ataacactgaactccccatggttcaagaatggacttgttcagggagtcagtgtattctcccatattagagcacaaacccctggaaaataggccacaaaaccagttaaattttgattggaaaaggaattggatttctttcactacttaattctaggtgctggatatacagctacgcatgaaacaaacaaaatccctgacctcctggagtttagtctcaaagaagraacactaaaaaagtaaacagatcaacaatattatttcagcaaattgcaagtgctataaagaaagatgaagtaggaaaagggaagggtagtggctgggaaaggagttttattgatggtttcatagaaggctcctgagaggtgacaagatagcagagtctgactgattagagaaagtcaggaggacaagaagaagagcatccccagcagaggaaggagcaggaatggaagccctgctgcaagaatgcagagtggggctgaggagttctgccctggctctagcacatgccctgaagagcctgcattttgtaa

SEQ ID NO: 624391 - DNA, 533 bp, Homo sapiens
ataacactgaactccccatggttcaagaatggacttgttcagggagtcagtgtattctcccatattagagcacaaacccctggaaaataggccacaaaaccagttaaattttgattggaaaaggaattggatttctttcactacttaattctaggtgctggatatacagctacgcatgaaacaaacaaaatccctgacctcctggagtttagtctcaaagaagaaacactaaaaaagtaaacagatcaacaatattatttcagcaaattgcaagtgctataaagaaagatgaagtaggaaaagggaagggtagtggctgggaaaggagttttattgatggtttcatagaaggctcctgagaggtgacaagatagcagagtctgactgattagagaaagtcaggaggacaagaagaagagcatccccagcagaggaaggagcaggaatggaagccctgctgcaagaatgcagagtggggctgaggagttctgccctggctcyagcacatgccctgaagagcctgcattttgtaa

SEQ ID NO: 624392 - DNA, 571 bp, Homo sapiens
ggtatgtcttaatcataatctttgactttttatgttgtttttttcttgcttatttacaaaaatttattttattattctaaatattaattatttcttgrtgataaatatattatagatcttctctcaaactgtcacttatcctaagttttgttttcattttctccaaatgaaaccccattcctaaattttgtttgtggtgtttttgattgtcctttattaagtactgactagaaagctaaaatgccacctttccagactctagaagttagggtagccaggtaacagttcattctgatgtaatgaaatatattaatttttctctttatagtttatacttgaaggatttattatttatttatggtccaaggtcactctatctgatggatttattttagaatctatctacatgcccaatcacaaagaaaaatttctgaattttcttctattagctttacagttttagctttcaaatttaattttttaaatctacctgcttctctaacttaatttttcctcctattccatactttatattctgtccaagtctcccaacactatttattaagtaact

SEQ ID NO: 624393 - DNA, 378 bp, Homo sapiens
ttgggatccttaaacactggagacgagccatggagtcacctgcccaaaccagaaccccagaggctggtcttggcctatggctattccagggagatccacaccaccgaagacttggaagctctgataaaccacccagatgagatgcgcatacagaccctgttgatctgttagcgaatcctctgcgcctctcacyccgacacttcctgttacatccgttactggggcgcggtgtaggcggcctgcggcaatttccagcgctgcatccacttgcggaagtgggacctggccatgcagcaggtcagccagcctctgagccccatgaccgccagcagcttcctctccttcgcggaactctttccttacgtgctgcaggaccgg

SEQ ID NO: 624394 - DNA, 230 bp, Homo sapiens
ttgctgctgccactggagccactccaattgctggccgcttcactcctggaaccttcactaaccagatccaggcagcyttctgggagccacggcttcttgtggttactgaccccagggctgaccaccagcctctcacggaggcatcttatgttaacctacctaccattgctctgtaacacagattctccttgtgctatgtggacattgccatcgcatgcaacaacaaggga

SEQ ID NO: 624395 - DNA, 230 bp, Homo sapiens
ttgctgctgccactggagccactccaattgctggccgcttcactcctggaaccttcactaaccagatccaggcagctttcygggagccacggcttcttgtggttactgaccccagggctgaccaccagcctctcacggaggcatcttatgttaacctacctaccattgctctgtaacacagattctccttgtgctatgtggacattgccatcgcatgcaacaacaaggga

SEQ ID NO: 624396 - DNA, 600 bp, Homo sapiens
gcttgtttaaaaggggtaaactctatctggctcatcatttgatctatttgattatagttggtttggttcacgggtaccctaactaaatagcatattccaaacttttggtattatcctaatgatagctataatagtagtctccctcttgcattatcttctctcaaaatttttaaatgtttgcatacagccatgtctagaatgtcaaatgatctctcttcaactggagcaacaaaaactcaaagaaatgtgtgaacacaaggacactataaattaaaaataacaaactgaaaccagaaacccaaaatgatggtaactgaaggtcatactaaggccttaagcttttggtcacaactttacctaagtgataatctgccaaaaagtgggggggaggggacgggggtggattttttaaataaaattatggaagattattgtttttgatggaagtcatgcactaggctccaacagamcaaaccagatgaaaccaaaatggagtcactcacgccaaatgtaacataatcaaactaaaactttaaggaaacagataggtcagaaatagaaactaaaatagaccaagttttggatttctcctgtaaacgg

SEQ ID NO: 624397 - DNA, 635 bp, Homo sapiens
attaaaacatgcttgaattggagtaggcatttccttccttctattcagtgccagttctcagaggaaaacattcattttgctctttgattcctgtagcccagagacagcaatgaaaggacctgctgcttcctggagtataaggatttcatctggggggctgcagggcaggaaagagagtttaaagggtgtgtgcatcagcgtgggtgtgaatgatttcccccagggccagttagctggcctggagcccagagtatgccattcatccaccttaaattgcaccacacagcagagatggttgagggagaagtcactcaatggcagtgccacttgctgccagttttcattgtgtctctttgatatggaatgtcctagaaactgatgcagttttctacttcttcccagagggggagtaaaagatgcatggtgtagtgggtgaataaactgtaaatgaaataaaccaaaatgagaatagtgaagccaagagttgaatctcctctcatggtactgtggtcctacaaatgtaaagatgyttgagtcttttgtcgtaagtcctatttctaagcaatgaggagatggcaaaaataaacgatctcttgatacagatatggaatgtattcaaatatctgatgttcaaa

SEQ ID NO: 624398 - DNA, 628 bp, Homo sapiens
acgatctcttgatacagatatggaatgtattcaaatatctgatgttcaaaatgtagacccaacttgatccattttgatctgagaatgtttacttctaccattcagcctcaggttacaagaaaaataaacatgaaatcaagtatgtaaataaatctggctgtgctccttgcaacttgaaatcagtgtctttgacwgtttctaattaaggaaataagagttgaaagcactggggttttgtggggtttttgttgttgtcattattatttgacacaaagagaaaattttgatcagcccacatggtggatttgtccaaatgttgtgggaagtcagggaccctgaacagagggacgggctgaagccatggcagaagaacataagttgtgaagatttcatggacatttattagttccccaaattaatacttttataatttcttacacctgtctttactgcaatctctgaacataaattgtgaagatttcatggacatttttcacttccccaatcaattctctaatttcctatgcctgtctttactttaatctcttaatcccatcatcttcgtaaactgaggatgcatgtcacctcaggatcctgtgatgattgcattatctgcacaaattgcttg

SEQ ID NO: 624399 - DNA, 532 bp, Homo sapiens
agatgcatgtcaccttagagtttttaaagtccatagaatgtgcaacataatgagttaaccataatgtaaattataaactttagttaacaacaatgtatcaatattagttcatcaattgtgacaaatgtaccacactaatgcaagatgttaataacagaagaaactatctgcagaggagagggggtcatatggtaattccacatacttttcactcaattttctgttaacctaaaattgcactaaaaacagtctattaagttaaataaataaacatccattgtgttaatttaccccttctcatatgatggttttggtttctattattattgaattacctttaaacacttttttccactactacattacgtatttataatgatggaatacaaaactgtctaagtcctggacctagtttcttattttataatttctgtatgtattattaaaacaagttttcttcctaattgacttatttttattrctaatattactttgataggccgttttgagaaatgctttcattaatgtaggt

SEQ ID NO: 624400 - DNA, 538 bp, Homo sapiens
atgaacatagtagtcacataaatccatcagagcagatattctacaactttagataagttccataaccctaactgattgatgatattttcccaacgatcatgggaaacagaaaagcaattaaacaaagacatgtctcagggcatgctgactatcccatgctgtctttctttttgaatgcaacccacctgcataaaaatgaaaacatacatgtacccatctgattgcctaagagaagctggttatgttttatttgaaatgttaatagattttcctaaacttcagaattcaattcacctttttttctttggtcagttatttctcccttgaattaaagatgaactacaacactgaaagaagtcataagtttgattattttcatgacttatgcagtaacttaaaaatatctgacttattttatgagattccctgtgattaagtagaacatacatttgttaycattagctatttttttttaatatttggttgatgtctatgtttattcaggctgctataacaaaaaggtggcttacagacaata

SEQ ID NO: 624401 - DNA, 612 bp, Homo sapiens
gtttaagacaatacagctaatgcccatttggctgcctgtgattgaatgaacttaagttttattttcttttaaattctgagttagatttrggtttgcttacataggaacccagggcattagagtcacctcagtctaatgacccccatttaattatttaacactgcaacctcatctataccctgtggccagttcctaagtctgcaaggaagagccatgtcagtatctcttgaaaaggggcctatgttaatgggggcggggaagggggggcagtgagaaatcctggtgacctctccacctgatagtccttttcccaacatgcaagttggtgaccctgtgtttcctcaccacctcgatcctaccccagtctctcctgatttcaagttatcctataagtagctgccattaactttttttaaactcaaggtcacacatacgtgcccatgtgtgaacgcacacatacacacacacacaccctagcagttcaaaggcaggccaccagctctgctaactaagcaggcactcaaccatggaatgaagtgtctgcctgccctttttggccacccccacatttatgaatgattctcttggacttccccttcttgcctctaacag

SEQ ID NO: 624402 - DNA, 612 bp, Homo sapiens
gtttaagacaatacagctaatgcccatttggctgcctgtgattgaatgaacttaagttttattttcttttaaattctgagttagatttaggtttgcttacataggaacccagggcattagagtcacctcagtctaatgacccccatttaattatttaacactgcaacctcatctataccctgtggccagttcctaagtctgcaaggaagagccatgtcagtrtctcttgaaaaggggcctatgttaatgggggcggggaagggggggcagtgagaaatcctggtgacctctccacctgatagtccttttcccaacatgcaagttggtgaccctgtgtttcctcaccacctcgatcctaccccagtctctcctgatttcaagttatcctataagtagctgccattaactttttttaaactcaaggtcacacatacgtgcccatgtgtgaacgcacacatacacacacacacaccctagcagttcaaaggcaggccaccagctctgctaactaagcaggcactcaaccatggaatgaagtgtctgcctgccctttttggccacccccacatttatgaatgattctcttggacttccccttcttgcctctaacag

SEQ ID NO: 624403 - DNA, 564 bp, Homo sapiens
ggtgcagtcacttaggaaaacaggttggcagtttcttaaaatgcttaaacttcactttaacattggtccaactcctagctatctaccctaaatgaatgaaaacatatgttcactcaaggacctatatatatataagacatatatatatatatatatatatatatatatgttcatagcagcattattygtaatagtcaaaaaggggaaacaactatatatatgttcattcactatgtatatatatatatatatgttcatagtgaatgaatgacaaaattcagtgtgtatatgcaatgaaatactattcagcaaccaaaaagggtgaactactgatacatgttacaatgtggctgaacctcaaaagattatgctaaatgaaataagccagatacaaaatccacacattatataattcaacttacatgaaatattcagaaaatccaaacctatagaaatagataatagattagtggttgcctggaactggagatggaattcgaaattggctgcaaatgggcaagaggaatctttctgagtgacaaaaatattataaaattggattgc

SEQ ID NO: 624404 - DNA, 564 bp, Homo sapiens
ggtgcagtcacttaggaaaacaggttggcagtttcttaaaatgcttaaacttcactttaacattggtccaactcctagctatctaccctaaatgaatgaaaacatatgttcactcaaggacctatatatatataagacatatatatatatatatatatatatatatatgttcatagcagcattatttrtaatagtcaaaaaggggaaacaactatatatatgttcattcactatgtatatatatatatatatgttcatagtgaatgaatgacaaaattcagtgtgtatatgcaatgaaatactattcagcaaccaaaaagggtgaactactgatacatgttacaatgtggctgaacctcaaaagattatgctaaatgaaataagccagatacaaaatccacacattatataattcaacttacatgaaatattcagaaaatccaaacctatagaaatagataatagattagtggttgcctggaactggagatggaattcgaaattggctgcaaatgggcaagaggaatctttctgagtgacaaaaatattataaaattggattgc

SEQ ID NO: 624405 - DNA, 620 bp, Homo sapiens
ggttggaggtgagaaggctcagaaggctgacagaaatctgaccaggacagttgtgwctcttgactttcaagttacctttgtagcccaaaagcttagggaggaataattgtgcaatgagaaaaaaaaaaaaaaggaaattcttagtgtgggttaggcaaaagcagagctaacagaagatactgtgagatttcacaattacccgtagggaataaaagagaaaataataaagaatgtcatttatttaaaaggtttagtgtttggggaagcttttgtcatacaaaattgaagctatcattttaaaatctaggattacttgaaaaaaaaagcataagaatacaactttatgctttttacccatgatacagtttttgaagtcagtcaacctataatgttcaagtggttcaagaacaataatacaatgtgtttcctgagggtttcaaaaatgaaatgaccttgactatggatggaactccagttagccactataattctgtaagcaacatctaaatatcaaaagaaaaattgacatttcattcttcatgtgggagtaaaggttttaatcttgtctgaactaacaacaactgattcatacactttatagaaggacatattgaaaacat

SEQ ID NO: 624406 - DNA, 620 bp, Homo sapiens
ggttggaggtgagaaggctcagaaggctgacagaaatctgaccaggacagttgtgtctcttgactttcaagttacctttgtagcccaaaagcttagggaggaataaytgtgcaatgagaaaaaaaaaaaaaaggaaattcttagtgtgggttaggcaaaagcagagctaacagaagatactgtgagatttcacaattacccgtagggaataaaagagaaaataataaagaatgtcatttatttaaaaggtttagtgtttggggaagcttttgtcatacaaaattgaagctatcattttaaaatctaggattacttgaaaaaaaaagcataagaatacaactttatgctttttacccatgatacagtttttgaagtcagtcaacctataatgttcaagtggttcaagaacaataatacaatgtgtttcctgagggtttcaaaaatgaaatgaccttgactatggatggaactccagttagccactataattctgtaagcaacatctaaatatcaaaagaaaaattgacatttcattcttcatgtgggagtaaaggttttaatcttgtctgaactaacaacaactgattcatacactttatagaaggacatattgaaaacat

SEQ ID NO: 624407 - DNA, 620 bp, Homo sapiens
ggttggaggtgagaaggctcagaaggctgacagaaatctgaccaggacagttgtgtctcttgactttcaagttacctttgtagcccaaaagcttagggaggaataattgtgcaatgagaaaaaaaaaaaaaaggaaattcttagtgtgggttaggcaaaagcagagctaacagaagatactgtgagatttcacaattacccgtagggaataaaagagaaaataataaagaatgtcatttatttaaaaggtttagtgtttggggaagcttttgtcatacaaaatygaagctatcattttaaaatctaggattacttgaaaaaaaaagcataagaatacaactttatgctttttacccatgatacagtttttgaagtcagtcaacctataatgttcaagtggttcaagaacaataatacaatgtgtttcctgagggtttcaaaaatgaaatgaccttgactatggatggaactccagttagccactataattctgtaagcaacatctaaatatcaaaagaaaaattgacatttcattcttcatgtgggagtaaaggttttaatcttgtctgaactaacaacaactgattcatacactttatagaaggacatattgaaaacat

SEQ ID NO: 624408 - DNA, 620 bp, Homo sapiens
ggttggaggtgagaaggctcagaaggctgacagaaatctgaccaggacagttgtgtctcttgactttcaagttacctttgtagcccaaaagcttagggaggaataattgtgcaatgagaaaaaaaaaaaaaaggaaattcttagtgtgggttaggcaaaagcagagctaacagaagatactgtgagatttcacaattacccgtagggaataaaagagaaaataataaagaatgtcatttatttaaaaggtttagtgtttggggaagcttttgtcatacaaaattgaagctatcattttaaaatctaggattacttgaaaaaaaaarcataagaatacaactttatgctttttacccatgatacagtttttgaagtcagtcaacctataatgttcaagtggttcaagaacaataatacaatgtgtttcctgagggtttcaaaaatgaaatgaccttgactatggatggaactccagttagccactataattctgtaagcaacatctaaatatcaaaagaaaaattgacatttcattcttcatgtgggagtaaaggttttaatcttgtctgaactaacaacaactgattcatacactttatagaaggacatattgaaaacat

SEQ ID NO: 624409 - DNA, 560 bp, Homo sapiens
gggctgggttccagggtcacaatcgcacacagcatggattctggtgagcttctgatgtgcaataggggaaatggagttagcctctgcacttagcaaggcaacctactggtgagctaagatttggggatggctgtgaatttaccactttataataccatgccctttccttcccacttcaccaaggcaccattgcaaacctccctctctgtcctccttcagtggcgcagaggcgaggtaatttagagaacagatctcccacaaattgactcttggaaacctcagctgctaatttacctaagtttcttcctggaccttccattggccttctgatacaaataattatattaattgtaatcctgtttgctgacacactctcttcagtgatatatgtatgtcctgcttttmtttacctagttatctatttaatttaatattttaaataatttaataagtgcctatgagactatcgctacccttaaaagtctagagctttggaaataacctacctatatccgtatggctcctcctcatctcaactcccactccccaccaaataacct

SEQ ID NO: 624410 - DNA, 600 bp, Homo sapiens
accaatcctgcacaaactcagaaagtaaaggaggaagaaacactttctgatttattctatgaagttagcattactctgataccaaagccagacaaagacatcaaatgagaaacaactgtagaccaattcatttaggattaatgaatacaaatacaaaaatccttaacaaaatattagcaataccaaatcttgttaacaggtcagaaggattatacatcatggcaagtaggatttacccacttggatgtgaagatacaaagtttgtttaacatccaaaaatcaaacagtataatacataatatcaatagaatagayggcaaaaaccacatggccacctcaatagactcagaaaagcatttgaggaaattccagcatccacttatgattttaaaaaatactttaaacaaacagtgaatagaagacaacttcaactttataaaggaactctttaaaaactctaggactaacaacctatttaatagtgaaagactgaatgctttcacaattagaccagaaacaaagccaagatgtttgctctcattgcttctattcaattctgtgccaggggtttcagacaatgctatcaggccataaacataa

SEQ ID NO: 624411 - DNA, 495 bp, Homo sapiens
aattagaccagaaacaaagccaagatgtttgctctcattgcttctattcaattctgtgccaggggtttcagacaatgctatcaggccataaacataaactaaagggatatrgattggataaaaagaaataaagctgtttttatttgcagacaacatgatcttgtgtgtagaaaatcttaagaaaacataaaaaggaaagaaacctacaattagtaaacatctttgaaaggttgcaggatacaaaccaaaattgagaaatcaatggtatttttaatactagcaataatcaaaacttgaaattaagaaaacaattttattcaaaatagcatcgaaaagaaatactatacttatgaaaaaatttaacagaagaaatgaaatactggtacacaaaaacctacaaaggattgctgagagaaattaaatacctctaacaaaatgaaaagctattatctattcatagactctaagacaatatcttaagaggtcagttctccc

SEQ ID NO: 624412 - DNA, 605 bp, Homo sapiens
taagttatcttccagtacctgacatatgggaggaaactttctaggaagaaaatgctttcttttaccatgacagtggcaccacgctgcaaagtgacaaggtgccatgcccatttttagagtggggaagcctcaccttgttatagttttccccagaggcaagaccttggtcccttgctcatgcttcttctctctcccctttgcttctttcacaaagtactctcattattcattaggactctgacctgaaattgtacccaaatctcctggcccatcacccctatatgcctgctttccccttcatcttgatagagactcagaagatgacctcartaacaactctctgggctggaatctgtagaagcctctagtgctaagcctcttgcctggattatgtgttttataagtcttccagggcagcaagagcacaattatttttgagaaagtgaaacaatgacaaagaaattcttgaaatattagtaatctttataaggctgattttatgcctctaaaaatttcctctgtttataaggctgattttatgcctctaaaaatttcctctgttatgccacaggttaaaatctgtgaactgacttagactgatagcc

SEQ ID NO: 624413 - DNA, 607 bp, Homo sapiens
gcaatgcaaccaacgatgcttgactgtcatatttatcaaccctgcaacgtgcctaaataatgtaccttgctcccagttttacactgtgrccctgaattctgctttattttttttttgaatcccattaggaaaattcttacatgaaaaaatgaaggatacaaaatcatggctaatgaagccaccattagcttttggtcttttccaagactatattccacatgggatgaaatcaccacctttgccatgaggatccatttcaggtctcatgggtaccactactgtaaacttctgagaaacaatccacaggaataagataaataacatagaaatgaaacatctttttctttctaatattcgttggaaaaaaaataaagtagagctctgctttctgctcatggtgctttgaagcaggctaatattttgaggggctcttctttcagaaaatctccaaatattgtgtttgagaaaaaaaatgaacctattattccgaccaaagcattaagacacaatctggctcagttggtggtaagatgttaaagaatcttacaaaaatctgtgtgtgagaaaatgcaatcctatggagagaaaagcgggctgttaaaaactt

SEQ ID NO: 624414 - DNA, 632 bp, Homo sapiens
tacactgtgaccctgaattctgctttattttttttttgaatcccattaggaaaattcttacatgaaaaaatgaaggatacaaaatcatggctaatgaagccaccattagcttttggtcttttccaagactatattccacatgggatgaaatcaccacctttgccatgaggatccatttcaggtctcatgggtaccactactgtaaacttctgagaaacaatccacaggaataagataaataacatagaaatgaaacatctttttctttctaatattcgttggaaaaaaaataaagtagagctctgctttctgctcatggtgctttgaagcaggctaatattttgaggggctcttctttcagaaaatctccaaatattgtgtttgagaaaaaaaatgaacctattattccgaccaaagcattaagacacaatctggctcagttggtggtaagatgttaaagaatcttacaaaaatctgtgtgtgagaaaatgcaatcctatggagaraaaagcgggctgttaaaaacttataagctccttttttctgtttatgaaaattaaaggaaacaaatcataaatgatctttaaagagttcctcagagacccagctgccaacctcaccactagccacca

SEQ ID NO: 624415 - DNA, 547 bp, Homo sapiens
caaaggagaatcaaaactcctcttaaattctgcttatttttttacttgttaaaacagttttattgagatatagttaatgtacaagcaattgcaccaaagtatatactatttgataagttttcaaatatgtattcactaaaaccatcaccaaagtcaagataataaaaattttcatcaccccccaaaagtcacatcatacttcttttcaatgtttcccttcctcctttccctaccctcctctagctccaagcaataatggatctgttttctatcactacaaatgagtttgcaatttctagaatctgatataagtggaatcatactgtatatatttttgcctgactttcacacagcataattattttgagattcattcatgttgaatggttcatttctttttattgctgrgtagtattctattatatggatacacaacaatatgtttgtccattcatcaatttctagacaatagggatcttcctagtttttgactatttgaaataaaactgctgccaatatttgtgtacaaatctttttatgaacatat

SEQ ID NO: 624416 - DNA, 594 bp, Homo sapiens
tatttgtcctgattggctagcaacttagaactttttaaaagaggcaaaggcagaggagaacaaaggaaggaggaagtaacttatggattgctgagaaatgtaaaaacaccttcaaataaagaagaggaayaggctatgacctaatgcttgcttggactagtataagcatgccagggcaaatatttaggctaaattgtgagagctaaaaacataaagtacattgatttctttattacagctagcagatatttaagaatgttagcacaggtctttgaataaattttgcttctaagagaagttactatttattcctaattagatggagaggaaagtctttgaagaggagcctctactttactttttacaactctgatgatagtttcttttgctatgcacaagcccttcagtttaattagatcccatttgccaattttggcttttgttgcaattgcttttggtgtttcagtcatgaagtctttgcccgtgcctacatcctgaatggtattacccaggttttcttgtagggtttttatggttttaggtcttatgctttaatcttgaatccatcttgagttaatttttgtataggtgtaa

SEQ ID NO: 624417 - DNA, 594 bp, Homo sapiens
tatttgtcctgattggctagcaacttagaactttttaaaagaggcaaaggcagaggagaacaaaggaaggaggaagtaacttatggattgctgagaaatgtaaaaacaccttcaaataaagaagaggaacaggctatgacctaatgcttgcttggactagtataagcatgccagggcaaatatttaggctaaattgtgagagctaaaaacataaagtacattgatttctttattacagctagcagatatttaagaatgttagcacaggtctttgaataaattttgcttctaagagaagttactatttattcctaattagatggagaggaaagtctttgaagaggagcctctactttactttttacaactctgatgatagtttcttttgctatgcacaagcccttyagtttaattagatcccatttgccaattttggcttttgttgcaattgcttttggtgtttcagtcatgaagtctttgcccgtgcctacatcctgaatggtattacccaggttttcttgtagggtttttatggttttaggtcttatgctttaatcttgaatccatcttgagttaatttttgtataggtgtaa

SEQ ID NO: 624418 - DNA, 576 bp, Homo sapiens
tttcattatatggaacgtggccttgtatacacgccaaaccagaaaatttctgtatactgggagggcagcaacacattcatattgctttgtggagatactgtcactccatatggcaacttgcaatagattgtcagtagtaaatatacaaattcaatgaagaggacttttttgtttaccactgttcttttttcttttttagcattatatggaagagtacatgtttatattgatttgcccagaaaaataattaaatggtgtttaaaaataagtttactattaaaaaaactagaaaaaaatgactctataatttatcatgagcaaaaccaaaagattcaagtcaatatgaagttaaacacaggatatacgaaggacttcaaaaagcttgtggaaaatggaattaaaaatataaatacaaatataaacttctgttctcaacataagttctakgaagttcaagacacttttgtatgtgattataacagccatttagtccatctcgaaagaactgagggtcctaagagtttgactacatcaatgccaccttttttacattattaactgaagaaaactaagtac

SEQ ID NO: 624419 - DNA, 577 bp, Homo sapiens
aaagaataaaataaatggcaacaataatggggattaaaacaaatctttgcaatagagaaaaaagttggagggcaaagaattgtgtgcaaggaactttcattcaatttacatgcaacatatattaatcaactcacaaacttagaagatcaagaaatgtaacttcattttttaaccagatctgatatgagctggtgtgcaccagcacaagcataacagatgttaaatattaaaatgttccattatcagtcaagagcattcctctccactgtcactgccaccctaagccctactccacaaagccccagctctctgaatgtcccagaaatttragagatgatgtcaggcacagcaggcagctgccaagatttttcagccaacctctgatctgattcgttggtaggggtgttacacagttactaaatatttaatattacccttgcctttatttaaatttaatttcaatttttagttcccattccactgagtggcagaaacagtgtcagttacgccaaggtccccatctgctttcccaggggggtttacctaggttccagaaagcttaaataggacaaaagca

SEQ ID NO: 624420 - DNA, 372 bp, Homo sapiens
ggcataattaaaagctccccctttcattttaaaaactgtcttggtttggataataaatgatagtcacctaattatagtctctaaatagtattacattgttcctcatatatccctatgaaataaataatattgtctaagtttgtaaataaagacactgagcatcaggaggaattaagcacttggccacagtcacagagtcaatccaggggcagagttcattcactgtccctggcattaaagcccctgttctttctcctccattatgcatagcagttttggtcatcstaggttctgcagggttggaaaaactttctttggagattttccacctcaattccaattttactgcctctcagctgtcagctggttgaa

SEQ ID NO: 624421 - DNA, 623 bp, Homo sapiens
ctgccgcttttctttaccttcattttggcccctccttatctcttattccttacaaaggaattatttgccactggaaggcagggctgtgtcccaggcatctttatataccaacagtgccccataactgctctattaatgttcctgcataaataaatcagtyaattaatggattcaaaaagaatccaggtcagctttattcctttgtttagactgctcagcatgtcacattccctgggcatcaaagcctcaggattaaagatagagctggtaataagaagatgcagtggaaactcacactgaagtttatgagacactactaccacctccattggatttagattttgttttgttttgttttgtttaaaaaaaaaacacaagagctaaaagacttaagtcaatatatctccaattgactggtgacttaggtttgttgttgcctatatttacatctcacatagtctttaaaatgcaaaaattttaaatggtcatttcattgctttcctgtctcctaaatgattatcacctctccagactgtaagctataagcagtcaccctgactcccagctctttgacctataaagtagactcataaaaattacagcctggaaagcaacatctggag

SEQ ID NO: 624422 - DNA, 623 bp, Homo sapiens
ctgccgcttttctttaccttcattttggcccctccttatctcttattccttacaaaggaattatttgccactggaaggcagggctgtgtcccaggcatctttatataccaacagtgccccataactgctctattaatgttcctgcataaataaatcagttaattaatggattcaaaaagaatccaggtcagctttattcctttgtttagactgctcagcatgtcacattccctgggcatcaaagcctcaggattaaagatagagctggtaataagaagatgcagtggaaactcacaytgaagtttatgagacactactaccacctccattggatttagattttgttttgttttgttttgtttaaaaaaaaaacacaagagctaaaagacttaagtcaatatatctccaattgactggtgacttaggtttgttgttgcctatatttacatctcacatagtctttaaaatgcaaaaattttaaatggtcatttcattgctttcctgtctcctaaatgattatcacctctccagactgtaagctataagcagtcaccctgactcccagctctttgacctataaagtagactcataaaaattacagcctggaaagcaacatctggag

SEQ ID NO: 624423 - DNA, 387 bp, Homo sapiens
tggaaactcacactgaagtttatgagacactactaccacctccrttggatttagattttgttttgttttgttttgtttaaaaaaaaaacacaagagctaaaagacttaagtcaatatatctccaattgactggtgacttaggtttgttgttgcctatatttacatctcacatagtctttaaaatgcaaaaattttaaatggtcatttcattgctttcctgtctcctaaatgattatcacctctccagactgtaagctataagcagtcaccctgactcccagctctttgacctataaagtagactcataaaaattacagcctggaaagcaacatctggagcagcccatggacaaggctgataaatcattttatgcattcataaaaact

SEQ ID NO: 624424 - DNA, 387 bp, Homo sapiens
tggaaactcacactgaagtttatgagacactactaccacctccattggatttagattttgttttgttttgttttgtttaaaaaaaaaacacaagagctaaaagacttaagtcaatatatctccaattgactggtgacttaggtttgttgttgcctatatttacrtctcacatagtctttaaaatgcaaaaattttaaatggtcatttcattgctttcctgtctcctaaatgattatcacctctccagactgtaagctataagcagtcaccctgactcccagctctttgacctataaagtagactcataaaaattacagcctggaaagcaacatctggagcagcccatggacaaggctgataaatcattttatgcattcataaaaact

SEQ ID NO: 624425 - DNA, 595 bp, Homo sapiens
ctacagtgctaaatgaatagaaaaagcccaccctccaaggcatcaaggagaattcaattacagcaggggctgctgagaccaaatcactaaacatagctgcttacgataagtacagagattgataaaatgagccagctctggagattggttgctcaacaatgtgatgtacttaacactactgaactttacatttaaaaactgttaagacagtagatgtgatgttatgtatattttgtcacaattataaaaacccaaacaaaccaacaaaaattaaaaagtcaagctcagaaaagtttcacatgcccctgaatactacaggtctagggttattatttcacaaagggaaagtctaagttaygctaatagaagaaatatcctttcctcatataagaccaggcagtcctttggagcaaaaacaaaagcaaaaccaacaacattgttctctgtggttacatgtgttttcttcttttatctaaagaaaaaaaaggagggagacacctacaacccctgctcctgtacattgaggagtccaaaccactacagttagtcacccctttgccttcagaatcagcaaacatgaaatgcagagaggcat

SEQ ID NO: 624426 - DNA, 605 bp, Homo sapiens
ggagcctgactgatgaggctccagggtttggggttgcaggggtctcatggtctttattttcacagccaattaatgcctagatgttggtgcaagttgccccaaacagcgagagagtagtccaggttttaagcggatcccgtgttcccaaactagagttctgacaaccaakgagacagcaacaatcatcctgatatctttcagaccagcagatttgcttggaatcccagcttacataaatcagtgatcgttttctcaatctatttccattggcattatgagtaaaagtcttcacagatttactcttcacagagtctagcagtaaattgcttgacagttctagttttctgtgtggtgaaattaaatattttattaaaatgtttttgtatagattcacatgtgaactatgcaagtctctttctctgcttctttgttccttattttttcttccttcttctctttctttctttccttggattgggtagagtagggtgggttgcaggtagtgaaggcagcagacagtcaaatgagtcttaatatttagtgtttataataatcccgtcacttggcagaagatgagctgtagatctcttcattcttattacagg

SEQ ID NO: 624427 - DNA, 605 bp, Homo sapiens
ggagcctgactgatgaggctccagggtttggggttgcaggggtctcatggtctttattttcacagccaattaatgcctagatgttggtgcaagttgccccaaacagcgagagagtagtccaggttttaagcggatcccgtgttcccaaactagagttctgacaaccaatgagacagcaacaatcatcctgatatctttcagaccagcagatttgcttggaatcccagcttacataaatcagtgatcgttttctcaatctatttccattggcattatgagtaaaagtcttcacagatttactcttcacagagtctagcagtaaattgcttgacagttctagttttctgtgtggtgaaattaaatattttattaaaatgtttttgtatagattcacatgtgaactatgcaagtctctttcyctgcttctttgttccttattttttcttccttcttctctttctttctttccttggattgggtagagtagggtgggttgcaggtagtgaaggcagcagacagtcaaatgagtcttaatatttagtgtttataataatcccgtcacttggcagaagatgagctgtagatctcttcattcttattacagg

SEQ ID NO: 624428 - DNA, 359 bp, Homo sapiens
tacaattcttacaagaggtttgtaaaacacaccaatcaacattctgtagctagctagaggtttgtaaaatgtaccaaccagtactctgtaaaaatgctccaatcagtgctctgtagctagctagaggtttgtaaaatggaccaatcagcgctctgtaaaatggaccaatcagcaggacatgggtggggacaaataagggaataaaagctagccaccccagccagcagaggcaacccactcgggtccccttccaygctgtggaagctttgttcttttgctcttcacagaaaatcttgctgctgctcattctttgagtccgtgccacctttaagagctgtaacactcaccacaaaggtctg

SEQ ID NO: 624429 - DNA, 629 bp, Homo sapiens
tagccatgggatctttaaccttcaatgagataccatctgtctggtggttgctttttcatatttatatgtatttttatttttgagacagagtctcgctctgccacccaggctggtgtgcagtggcacgatctcggctcactgcaacctccgcttctgggttcaagcaattctcctacctcagcctcccgagtagctgggattacaggcaccctacactatgcccagctaactgttgtattttcagtagagatggggtttcaccatgttggccaggctgggctcaaactcctgacctcaggtatctgctcrccttggcctcccaaagcgctgggattataggcatgagccaccttgcacaacttggtggttgcttttaagaaaggtcctcaggagagcacctttctggacactggacactttgtctctttttttatactccatttctctcgctgttttgaatcagcctcttctaaatcctgaaatatggtctatcctatatttaattccatctttcagtctttaaattccattatatttttgtggtgccagaattgaactccttaatatttttcctagttcccaagctaaggaagcctcagaagtttctgccatccttgcccaggttagga

SEQ ID NO: 624430 - DNA, 370 bp, Homo sapiens
tatatcaaaacatagtaatgtattttagatgggaattgagaaaaaaataaaacatttgcttaaatagtaaattatcatgatataggcrttattatcacccatgaggaatagtttggtatttctagatttattgtaggatacataaataagcgtgtgaaagtttttctattttggaaagtggggggaaattgcatttaatactgtcaagtcccctgttagtcacttttctcatattttcttttccacttattttgtggtttttggcaatgcaaaaaaagcagtcactgcaggtgggaagaagagttcaaattctgaccctaggtcttacaagttatgtaatcttgtagaatttatttcgaatctctgagcc

SEQ ID NO: 624431 - DNA, 626 bp, Homo sapiens
tgctaccgattaaaaggaacttaaaatacctatctcaagaaaataggcaaaactatactgcctaattgtaataatacctgagaaatttaaaactatacaaatgcaaataacaaatttgtttatgaggggaggaagggatatgaaaaaaatcaaaatggattctaaagttgatggtacatgctacttattgatctagatggtggatacaagtggaaataagagtgtttgctatagaataacataaaaatttattaaaataacgagtcaaaacgccatctataaaacaagacaaaaaagaggttaagtcagacatgtaaaatacagaatatttaaaatgtaactaaggtgggtagttacaaagtttctyggcagaggagcaaccaaagtttcttataaattctaaaatctgcatatattactacttaacaaataaaacgttattattgtggagccccaagaaaaggtgacaacaaattctgcttgttttagagaactccttttttaaaaaagcaaagcataagtatataatgtacttactttatttagaaattgtgaaaaatattgtaagaaacaacttatatttcttgtaaaattgaaacatggtagcaattgtaagagaaaaccac

SEQ ID NO: 624432 - DNA, 560 bp, Homo sapiens
gcactgtaaacttttctcttgacaatccttttgctgaattccagagattttgatgtgttgtgtctctcttttcatttacttccaagattttttttttaatttctggattaacrtttttttaccttgaagtcattcagaagcaagatgtttgatttccatgtaattttgtatttttcagggatatttttggtactgttttctatttttacttcactgttgtctgagactatggttggtatgatttcaaattttttgaatttattgagacttgctttaaaatcaagtaatgcggtcaatcttgaagtatgctctgtgtataatagagaataacatacattctgtggttaacaggtgaagtattctattgatgtctattctgcccaatttgtcaagtgttggatttatgtacagaatttctttgctagtttcctgtctaatactgtcagtcaggtgttgaagtcttccactatgcttgtgtggttgtcaagtctttcataggtttagaagttcttcctttataaatctgggtgctccagtattggaagtgtatatatttagga

SEQ ID NO: 624433 - DNA, 472 bp, Homo sapiens
atagtcaaatgtcactaacatgccttaacatacaaatcaccatgtctcctgtgagggagrcaagtcaatacctggctctcacacaagaaaggcaatcccaaagatatgtgtggtgcctctggaaataattattgtttatagttgtctcccccttccacccaaatggaatatacatcagtcagtatgcacagcttgacagtgccattctcatacttccagaggggttttctagcaggtatcatctaaaagcagtcagttcaatgtgtcctacttgtccagtacaccaatttattgatccccatagaataaataagcataaagataggacaaatgtagagatatttttggtgtgggacaggctgttttgttgtcagtggcatctggttatggctgagaaactcagtggagagtttaatccacaggtttccacaacggtttgcaagagtagcaccacactgttttcctttgagaa

SEQ ID NO: 624434 - DNA, 442 bp, Homo sapiens
acttctcagcctccagaatcatatgctaaataaatgtattttctttataaattactcagtctgtgatatttcattatagcaacaaaaaacaaactaaacagaaaattggttctgagaaataaggccgttgctataacaattccctaaaaatgtgggagccgttttgaaaatgagtgatgggtagaagccatatgaatttggaggaacaggctagaaaaattctgtattgtggtaaatgaagtgttaacagtgattctggtgagggcttggtaggagagatcagagaaaatcctgaayttcctagagataatttaagtggttgtgaacagaatgtggatagaaatacagacattgaatatgacttcgatggttctcaagtagaactgaagaacaaggttttggaaaccaaggcaagggccaacctcatataaagtagaaagga

SEQ ID NO: 624435 - DNA, 617 bp, Homo sapiens
aaaagaggaggttcttaacaagtgcttacttgtattgagaataatgggacaaaaaaattattttcttaatctctattttttcctggttatgtagtttactaaattatataggatgctctttatttactgtgtgcttaatttgcataatttttacggttataatataaatacaataagttagctgaacaraatgcttgctttgtgctgattttatttcttaacaatattttttactagtcactaacctttatcccttaaatgtctttccatataaaagactgtctctctgaacacctcttttctcttaatacttctgatagtaaaaatatcaatatcaatattaagatcctaagtataaattatatgaaaggatactagtatacctagtagaaataacattttgtatttttaaaagttattttttaagtataacataacctttacaaagtacacatatcttaagtgtgcagtcaaataaattttacaaaactaaggcactcctgcacacctattattttctattcaccctgtacttgttgacgtctccccatctcagtcattacctgtcctcaatatcattatcttattttgttgtaaatctagtaaccccaagagtt

SEQ ID NO: 624436 - DNA, 617 bp, Homo sapiens
aatgcaaatcaataaacataatccagcatataaacagaaccaacaacaaaaaccatataattatctcaatagatgcagaaaaggcctttgacaaaattcaacaacccttcatgctaagaactctcaataaattaggtattgatgggatgtatctcaaaataataagagctatctatgacaaacccacagctaatatcatactgaatgggcaaaaactaggaaataatttaaagtgaatttgtgatatggactattgcacaggaaaaaatccagacttaagcatagggtagtattataatagaaaaaaatgtaaaawtatatatgaaacacaataaaggatgattaatctatttctaagaattctacagagaaaaaaagaatagggaagtaacaagtagccaaagagatgatgggtgtaaattttcaatactagtgaaaatcatctgtctacagatcctacacacctgtgccttagtaaagataaatataaagagaataactcctagacatatgacagaaaatggttaattttttatatttacaatgaaaaaaatctcataaggagtcagaaaaaaatatttaaaggaatatatagtaggaagatgaacttttaaaaa

SEQ ID NO: 624437 - DNA, 539 bp, Homo sapiens
ttttttatatttacaatgaaaaaaatctcataaggagtcagaaaaaaatatttaaaggaatatatagtaggaagatgaacttttaaaaaatatatattagttttttccttraaatattggtatgtaaccatttcataatctcagtggtttattgcaaacatgctttatttttttcatttcatgggtcttgtagatcaactggagttcacctaatctcagcagggcttacctgctggaccagtgtggattgaagacttgcagtcaggtaagatctattccatgcgttctttctagagccctgtaagaagcaacagcagctacagggagcagactcttcttgtgatggaccatagaggcaagccaaaccacacaagtatatttaaagctaagcttttagtcttattggctaacattcgattggccaaagtacagctgcattaaatagttgggaaagtatactttgcctactgtaattggaggaaattggaaagtcacatgcaaaaacccgtggatgtataattctacacagaaagcatgta

SEQ ID NO: 624438 - DNA, 434 bp, Homo sapiens
gatttaaaaataccctccctaaagataaatacataaaaaagaaaagaaatatattccaaatagtctcaacgtgaatgaaccaaggatggtcttctgtccacgcttgggtcaaagtgtcacatgaggaataaatgccttggagatcagtggactaagggctctatcagttctaatgactaatcacaagaaggcataaaacaaggtrttttagttttctattgctgtgtaacagcaacaacaacaaaaaacacaaacttagcagctcaagacaacacacgtttattatctcacatttcccttgtgtcaggagtctaacatgttttaattgtgttctctgttcagaaattcataatgctgaaatcaagacattgagtgattgtgccattatctggaggttctacactggcaagatcacttgtcagatcatttggaat

SEQ ID NO: 624439 - DNA, 630 bp, Homo sapiens
cagcactccccattgcagtaaaaaggtaagtgggagattgtcagcagtctacaytatcactgtagacttctgcactcctagccatggagtcccttgacccttggggccctgtgactaatacagagtgctgcctagagttcaagtgacagcattgttccagagagagtgttcacactgaggcccacacaccctcctaagacccaagcagctgaagcataacatcattatgagaacctggcccccacaagaatacaccctgctctgagtcccaacagcccctgtacctctacatctctggatgcccaattactttttctcatgcccacccagagggctgcagcattatgacaccagctggatcaaccaagaagaaaagtgaagacccagataaattatataggaaagaaaaaaggagacattacaaattatatgacaaagtacaaagaatcattaaagactattgtttgctaacaaattagaaaaccaagagaaaatggacgaaattttgtaaatcaacaacctagcacaattaaaccagaaagaaatataaaacctgaatagaccaataaaagtaatgtggttgattcagtaataaaaagtataaaaagcatcccaacacaaaaaggccag

SEQ ID NO: 624440 - DNA, 630 bp, Homo sapiens
cagcactccccattgcagtaaaaaggtaagtgggagattgtcagcagtctacactatcactgtagacttctgcactcctagccatggagtcccttgacccttggggccctgtgactaatacagagtgctgcctagagttcaagtgacagcattgttccagaragagtgttcacactgaggcccacacaccctcctaagacccaagcagctgaagcataacatcattatgagaacctggcccccacaagaatacaccctgctctgagtcccaacagcccctgtacctctacatctctggatgcccaattactttttctcatgcccacccagagggctgcagcattatgacaccagctggatcaaccaagaagaaaagtgaagacccagataaattatataggaaagaaaaaaggagacattacaaattatatgacaaagtacaaagaatcattaaagactattgtttgctaacaaattagaaaaccaagagaaaatggacgaaattttgtaaatcaacaacctagcacaattaaaccagaaagaaatataaaacctgaatagaccaataaaagtaatgtggttgattcagtaataaaaagtataaaaagcatcccaacacaaaaaggccag

SEQ ID NO: 624441 - DNA, 552 bp, Homo sapiens
gaataactccacaatcaatctctgtagctttaaagactttcctaattaagtctgacattcaaatttaaaataatatttttctggaattacctraaaatattaaaccacatgtatttatctaaacttaaaataacattttctggaattatctaaaaatattaaaccacattgtgatggttaatattatgtgtcaacttgatcggattgattgatgcaaagtattgatcttaggtgtgtctgtgagggtgttgccaaaggagattaacatttgagtcattggactgggaaaggcagacccaccctcagcctaggtgggcacaatctaatcagctgcctgcgaggccagaataaaagcaagcagaagaacgtgggaagactagactggttttgtcttctggcctaaatctttctcccgtgctgggcacttcctgccctcaaacatcagactccaagttcttcagctttgggactcggactggcttccttgctcctcagctcgcagatgacctattgtgggacctcgccttgtgatcgtgtgagtcaataaccctt

SEQ ID NO: 624442 - DNA, 424 bp, Homo sapiens
cccccatgtgtggaaggagggacttgtggggaggtgattggatcatgggggccgttcccccatgctgttcttgtgatagtgagagagttctcatgacatatggtagtttaataagtgtctggcatttcctcttcgctctctatctcctgctgccatgtaagatgtgmcttgcttctccttcaccctctgtgatgattgtaagtttcctgaggacccccagccatgcataatcatgagtcaattaaaacttcctttataaattacccagtctcaggtagtttctttataacagtgtgaaaatgtactaatatactcatgttgagatacaatccccaatgttggaggtggggccttgcgggaggtgtttgggtcatggggacagatccctcataacttggtgctgtcccactgatggtgagtgagt

SEQ ID NO: 624443 - DNA, 424 bp, Homo sapiens
cccccatgtgtggaaggagggacttgtggggaggtgattggatcatgggggccgttcccccatgctgttcttgtgatagtgagagagttctcatgacatatggtagtttaataagtgtctggcatttcctcttcgctctctatctcctgctgccatgtaagatgtgccttgcttctccttcaccctctgtgatgattgtaagtttcctgaggacccccagccatgcataaycatgagtcaattaaaacttcctttataaattacccagtctcaggtagtttctttataacagtgtgaaaatgtactaatatactcatgttgagatacaatccccaatgttggaggtggggccttgcgggaggtgtttgggtcatggggacagatccctcataacttggtgctgtcccactgatggtgagtgagt

SEQ ID NO: 624444 - DNA, 585 bp, Homo sapiens
ggtctggactaactgggatcctggagagtaacaatatgttttacttttaaaaacttttcagtaattgaagaataaaccttgaaaacatatttttaaaaattcttgatttttttaaaatgtatttatccagtttcacaccacactgagtacaggtacaggaacaactcttcaacattgtcctcaacaaaaagtacattggacacagaaacaacagacagaaattcgggcaaaatgtgggggtccttgaaataatctggaattagatgcggtttttccccccaaaagtcctggtatgctattttattttcctgccttttaatttgtccttttgacacagaactttgactcatgttaccttaaaatgtgctgtccaggattgggtgcaagacatcaaaacaccasggcataatcttattcttggtgtgaacagttttctgggcactaatggagccttggactgatataatgtttgtactttgataagaaacatctacctactagctcactgtaaacaggagatcaacacctcatccacagaatatcacgaaagaagtggtcaaagctttgttaaaaggcgcttaaaat

SEQ ID NO: 624445 - DNA, 546 bp, Homo sapiens
tgagaggacaaggcaagggaattgcttgagcgcaggatgtcaagaccagcctgggcaacatggttgttataaaagtgagctcagcttgctcttgctgcctttttcatgcctgcttacttgctttctgcttttccaccatgttatgacacagtatgaaagccctcctcagaagcttccaccatgtccttggactttccaacctccagaaccatgaaccaaatagacttattttccttataaattacccactgtctggtattctgctatagcaacagaaaaaagactaagacagattaatacttatttgcagcttaattaagaaagagcttacctggcccagaatatcagtttttctggaaaattatcaaactrtaaaaaactctttaaaatttcattcttaaagtaccaatactgaagtcttcaatacttaacagacgtcttttacaaattatttgtcttgggggatagtgcctgggagaggcaagaaagtgaatgcagagggaggctttgagctccattttcagaagcaataataagtaagaattc

SEQ ID NO: 624446 - DNA, 515 bp, Homo sapiens
agttctaggagctttttgggtgagtctttagttttttctaggtgtacgatcatagcatcagcaaaaagcgacagtttgattttctctttactgatttggatgtcctttatttctttcttccccttggctgattrctctgactagaactcccaatactatgatgaatagaagtagtgaacatgtgcatccttgtctgtttaataatgttggctgggtgtgtgggcatagatggctgttattaccttaaggtatgtcccttgtgtgctcgttttgcctagggtttaatcacaaagggatgctggatttcgtcaaatgctttttctgcatctattgagaggatcatatgatttttgattttaattctgtttatgtggtgtatcgcatttattgacctataagttggcttcattttggagttgatttctaattctattttactgtggtctgagcgagtatttgatataattttgattttcttaatttaccaatatttgttttgtggcctatcatatggt

SEQ ID NO: 624447 - DNA, 565 bp, Homo sapiens
ccaaaactttgctgaattcatttatcagttctaggagctttttgggtgagtctttagttttttctaggtgtacgatcatagcatcagcaaaaagcgacagtttgattttctctttactgatttggatgtcctttatttctttcttccccttggctgattactctgactagaactcccaatactatgatgaatagaagtagtgaacatgtgcatccttgtctgtttaataatgttggctgggtgtgtgggcatagatggctgttattaccttaaggtatgtcccttgtgtgctcgttttgcctagggtttaatcacaaagkgatgctggatttcgtcaaatgctttttctgcatctattgagaggatcatatgatttttgattttaattctgtttatgtggtgtatcgcatttattgacctataagttggcttcattttggagttgatttctaattctattttactgtggtctgagcgagtatttgatataattttgattttcttaatttaccaatatttgttttgtggcctatcatatggtctatcttggagaatgttccatgtg

SEQ ID NO: 624448 - DNA, 598 bp, Homo sapiens
tacttggaacctgtttcccctttcttctttgctgttgctctcttttggaatgggaatcctgtgcctgtcctgccattttgggatgtatcattgctgaagtgaacttaagtcacctgactgaggtagtgtttgtcagttttctctgttgtaaagttattctcgtkttctccatttccatttccttttttccatatagacttctctttgaaaggaagtcaatatgtgaagcccacactgaaggagtggggagttatgatgcacctccctgacagcacagtatttacacaaactatttggaatacttttatgtgggatgtttgtcccttccctcccatttatttatgtattcaatcaattgtttattgatatcaatttgaactcatggatatttactttatacttcaggttataatccaatactactctacttgttttgttgctcaaattttttcacctttggccactgggagcactttcagttgactcttgtgtccctttgacatactcccatcattgtgtgtgtgtgtgtgtgttcttcacactttcttactttttgacacaataatgtactccaggctcatgttgtatatttcctgcc

SEQ ID NO: 624449 - DNA, 568 bp, Homo sapiens
tgggaaagggctgttatcatctttgtttcacagctaaaccataaactaagttcctctcaaagttattttggcctgtgcccaggaatgaacaaggacagcttggatgctggaagcaagacrgaagcagttaggtcagatctctttcgctgtgataattctcccagttataatttttgcaaagtcggtctcaggagcagaggcataggtttgacttctttcactcagtcttacatctatgaatttttcatgttattcatgtggttatttgtttctgtgtgtattcctttgtatgaatataggccaatttatttatttattctactgttgctgaacatgttgacctaaaagaaagaggctgaagcacaaaatagaatctagagtttacttgagccaacatgaagacagctgcctggaagactcacaccaaaagaaccttggatctgagctccctttggcctttgtcacaagcaggtttttaaaggtcaaaaggggggatgcacaatgggctgacagaaaggtgcctgtcaggaattctcattggttttcagaaatagcattgatgagagct

SEQ ID NO: 624450 - DNA, 526 bp, Homo sapiens
atttttgcaaagtcggtctcaggagcagaggcataggtttgacttctttcactcagtcttacatctatgaatttttcatgttattcatgtggttatttgtttctgtgtgtattcctttgtatgaatataggccaatttatttatttattctactgttgctgaacatgttgacctaaaagaaagaggctgaagcacaaaatagaatctagagtttacttgagccaacatgaagacagctgcctggaagactcacaccaaaagaaccttggatctgagctccctttggcctttgtcacaagcaggtttttaaaggtcaaaaggggggatgcacaatgggctgacagaaaggtgcctgtcaggaattctcattggttttcagaaatagcattgatgagagcttggctatcccttgttatagggtgtgggatacagtgtttggtgtggcattattagattaatttacagctacctggggtgatagcaagcagttkcaacagatgaatacatagctcaaaaggaaggaagc

SEQ ID NO: 624451 - DNA, 567 bp, Homo sapiens
gctcaggcatggcgggctgcaggtcccgagccccgccccgcgggaaggcagctaaggccccgcgagaaatcgagcacagcgccggtgggctggcactgctgggggacccagtacaccctcctcagccgctggcccgggtgctaagcccctcattgccctcactgctccgagtgcggggcccgccaagcccacgcccaccctgaactccggctggtctgcaagcgccgggcgcagcccgggttcccgctcgcgcctctccctccacacctccttgcaagctgagggagccggctccggccttggccagcccagaaaggggctcccacagtgcagcggtgggctgaagggctcctcaagtgccgccaaagtgggagcccaggcagaggaggcgccgagagcgagcgagggctgtgaggactgccagaamgctgtcacctctcaaaatgacgtagagtttacagataacctactcacatcctcccgtatgctatgtaaatagttgttatgtggtattgtttagggaataatgacaaagaaaaaagtccatatatgtacagtgcaaacaca

SEQ ID NO: 624452 - DNA, 567 bp, Homo sapiens
gctcaggcatggcgggctgcaggtcccgagccccgccccgcgggaaggcagctaaggccccgcgagaaatcgagcacagcgccggtgggctggcactgctgggggacccagtacaccctcctcagccgctggcccgggtgctaagcccctcattgccctcactgctccgagtgcggggcccgccaagcccacgcccaccctgaactccggctggtctgcaagcgccgggcgcagcccgggttcccgctcgcgcctctccctccacacctccttgcaagctgagggagccggctccggccttggccagcccagaaaggggctcccacagtgcagcggtgggctgaagggctcctcaagtgccgccaaagtgggagcccaggcagaggaggcgccgagagcgagcgagggctgtgaggactgccagaacgctgtcacctctcaaaatgacgtagagtttrcagataacctactcacatcctcccgtatgctatgtaaatagttgttatgtggtattgtttagggaataatgacaaagaaaaaagtccatatatgtacagtgcaaacaca

SEQ ID NO: 624453 - DNA, 525 bp, Homo sapiens
aggaaagtttatagctataagtgcctacttcaaaaaagaagaaaagctgaattagtaacctattgacatatgttaaagaagtagaaaaggaagatcagaagaaaataaataataaagtgagtagaataaaagaaataataaagatcagagcagaaataaatgaaattgaaatgaaaaaacaatacaaaaggtcaatgaaataaattttttataaaaaaagataaaattgacaaaccaataggcagattaactaagaaaaatacagagaagaccmacacaaacaagatcagagacgagaaagaagacaccaatacagcagaaattcaaaggatcattagaggttagtaagtgcaactatatgtcaataaatgggaaaacctagaagaaatgcataaattccttgacacatgcaacctaccaagattgaaccatgaagaaatttaaaatctgaacaaacaaataacaagtaatgagatcaaagccataataaagtctctcagcaaataaaatattgagagccaatgg

SEQ ID NO: 624454 - DNA, 543 bp, Homo sapiens
tagaaaaggaagatcagaagaaaataaataataaagtgagtagaataaaagaaataataaagatcagagcagaaataaatgaaattgaaatgaaaaaacaatacaaaaggtcaatgaaataaattttttataaaaaaagataaaattgacaaaccaataggcagattaactaagaaaaatacagagaagacccacacaaacaagatcagagacgaraaagaagacaccaatacagcagaaattcaaaggatcattagaggttagtaagtgcaactatatgtcaataaatgggaaaacctagaagaaatgcataaattccttgacacatgcaacctaccaagattgaaccatgaagaaatttaaaatctgaacaaacaaataacaagtaatgagatcaaagccataataaagtctctcagcaaataaaatattgagagccaatggcatccctgctgaattttatcaaacatttaaagaagaataaataccaaacctattcaaattattatttaagatagaggcaaagagaataacttccaaact

SEQ ID NO: 624455 - DNA, 659 bp, Homo sapiens
atggggaaaaaatgaaagccttttctttaagatctggcacatgatgaggatgcccactgtcactactgttatgcaacatagtactggaagtcctaactacaggaatcagacaagagaaggtaataaagggcatccatattggaaaggtagaagtcaaattatccttgctgatgatataatcttatatttgaaaaaacctaaagactccactgaaaaattattacaattgataaattcaacaaaggtgcaggatacaaaatcaacatacaaaaatcgatagcatttccakatgccaccagtgaaaaatctgaagagaaatcaagaaagtatttccatttacaatagccacaaataaaattaagtacctagaattaacttagccaaagaagtgaaagatctctaaaatgaaaactataaaacactggtgaaataaattaaagaggatagaaaaaaatgaaaacatatttcgtgttcatagattagaagaatcaatatagttaaaatgtccacagtacccaaagcgatctacagattcaatgcaatgcctatcaaaataccagtgacattttttaaagaaatagaaacaacagttctaaaatttatatggagccacaaaagacccagaatagccaaagctatcctgagcaaaaagaacaaaa

SEQ ID NO: 624456 - DNA, 408 bp, Homo sapiens
tatttcctaggttcactgaagatgcctgtaaatagtaataatctaataggaatcaatacctctaatatgtagattcagtttttcaaatatcctttcctactaaaataaacacgaattctttggagtaatggataattccatacttaaggcttaaaatatgctagatccacatgttttactaaacaataagaagtccaccaaagtagagtasatgtgatggtaaatactgagtgtcaacttgattggattgaaggatgccaattattaatcttgggtgtgtctgtgaggttgttgctaaaagagattaacatttgagtcggtgggctgggaaaggcagacccactcttaatctgggtggatacaatctaatcagctatcagaatggctagaatataaagaaggcagaaa

SEQ ID NO: 624457 - DNA, 515 bp, Homo sapiens
cattaattgtgttaaatctctgactttatatacactattctttaatattttgtgtgacaaaagaggtgatttgaatagagcgcttctgtcagttggcaaaacggaatggttgtttcagaaaaaaaagaagcgtttgtataattttttgatctgtgagctgaaattagcaactttataaaaaattggacattacctttacttgaaagaatgatagacagacaaacgtgctttgaaacatttggatattaggccaaattttctgggaaacaaacaaaagagctcatcaggtcaagaaaaaacagacaatatttattgccaattataaaatttaaattttcaagcaaaaatyagaattttggaaaatttttatccaccatcatgagcttcatggctttccaatatgtaaagacttttctaatatatgttgtaatatttaaaatgtgatattttgaaattatatgatgaaacatgccaacatttagatgaaccatgtaatttggtgaaccaacatttct

SEQ ID NO: 624458 - DNA, 597 bp, Homo sapiens
atacagtccctctactgttttattttatttcagcttcccaccctgtttgcaaatccgtattcccatttccctctatagctataagaacccatctggtagcttgataattacttaaatatgcatatgtcttcatcaaataagtgcattgttttgttttaaatggcattatgctataaattgcattctgtttcttctttcactccacactagagatctagtcatgytaccatatacacatttagagtgtctatgtgttgattgtagctgctacagagaacactacagtatgcagtggctgcattttatttatccttccctgaaagtatacctagtttgcttccagctctctactatccagaacataacaagaataattgtccttgtttatgtttcttacaatctgtttgtgaactaattggtttatatatccaggagtgctacctatagtgacactgaagatacacattcttaattctgttaaatactgccagatttatttttttaaaaaaacaattttcaaaaaacattagacttgtaccagcacatagtgccataattttggcatgagaatttttaccccaaaacttattgtcaaca

SEQ ID NO: 624459 - DNA, 584 bp, Homo sapiens
ggctaagatagggaatcaacctaaatgtccatcaacagatgagtaaagaaaatgtggtatgtgtacagaatggaatgctattcagccataaaaaagaataaagtccagtcatttacaacaatatggaagaatctggagggtattacgttaagtgaaataagccaggcacagaaagacaaataccacatgatctcacttatacacagagtcttaaaaagttcatctcataaaagtaggaaaatagaatggaatttaccagaggctgggktggttggcaggaaggagacaatggagagaagttggtcataagatggataattacagtaaagtaggagaaataaggccaggagctctattatgaaagcatggtgattatagttaatgatgatatattttattcttaaaaaatgcaaagagaatgaatgtaagttttctcattacaaaagtaatacctatgtgaggcaatacatttgctaattacctagaattaactattccacaatgtacctatacttcaaaacatcctattggacacaataaatgcatacaatttcatctgtcaattaaaaaaatttaacaactcc

SEQ ID NO: 624460 - DNA, 522 bp, Homo sapiens
atatcttgaaacacaatgtcttgttcttgtgtttttagtgaatgctgaagttgatcagtgggtacaggtggggttaacctaatttataccacaaagtttytcattaacatttcacttaatacctttagaatccatttaataattatgtcttggggccattagcttactttgggtgattttctaattctatcatgcttcttgcattttttaagctgaaccttttctataaagaacaatttttcctcactttctattggttattctgaaaatcaagccatttagtaattatagaataaatgcttgaacattttcctttatttttcaatgttaatgttaatgaattggtgcactagtagtcagcaatgctgtccaatagggacttttaaaaaataatttaacaatacagtaattttatatatgatttattttaatcaattgcaatcaatattattttaataacaaaattagtccaacattactagtagcaggcccttcatgttggttcctaggttgcatgtcatg

SEQ ID NO: 624461 - DNA, 604 bp, Homo sapiens
gtcaaccaggtacatgtttttttttgaaaatgaaaaaagttaagatataataccttgcaatctcagagtattcttcaagcaaactgacacagggcacaatttttatctcaaaagttttttgaaattgaattacagaaactgacatgttcttgctctgtcagcaaagaagcaatgttactccaaaggcgatgtrtttttatggaacagatctttatttttaatactattctccaataaaagatgtcatggcttcttaaacaaatgagtggtctagcactggagaagaaaatttatgagataagtctagagcatcttttagagccagacagtatggtgaatatggtgaactaaaaaatcaaaccccacaatgagtgggtatatcaaaagtacacaggagcaaactgaaatagtccgtgattgtcaaagctggcagaatttgagtaacaagataaataatgtagtgttggactatagcccaaagtataaattaaatattcataaatccatagacacatatgcaaatgattgaataaataaataaataaatagaggaaaatatacaaatctcctatgtcgaataatttcaaataatttatattgatat

SEQ ID NO: 624462 - DNA, 604 bp, Homo sapiens
gtcaaccaggtacatgtttttttttgaaaatgaaaaaagttaagatataataccttgcaatctcagagtattcttcaagcaaactgacacagggcacaatttttatctcaaaagttttttgaaattgaattacagaaactgacatgttcttgctctgtcagcaaagaagcaatgttactccaaaggcgatgtgtttttatggaacagatctttatttttaatactattctccaataaaagatgtcatggcttcttaaacaaatgagtggtctagcactggagaagaaaatttatgagataagtctagagcatcttktagagccagacagtatggtgaatatggtgaactaaaaaatcaaaccccacaatgagtgggtatatcaaaagtacacaggagcaaactgaaatagtccgtgattgtcaaagctggcagaatttgagtaacaagataaataatgtagtgttggactatagcccaaagtataaattaaatattcataaatccatagacacatatgcaaatgattgaataaataaataaataaatagaggaaaatatacaaatctcctatgtcgaataatttcaaataatttatattgatat

SEQ ID NO: 624463 - DNA, 538 bp, Homo sapiens
gaaagtgaataaacagaatatggaaagggcaagaaaagagtcacctacagtggagaatcctgatcggtactagttcagccagggaattaaaagttaatgctgtaaataataattcatgttgatatgatcttgtgtgagtgaggtaataaaaatgacgcttgatctctgtgatctctacccttcactgaagaaaacgcccacaaatccaatttaaacaaaagaaaaacatcaaacaaattcccacagaggagcattctacaaaatacctagccagcactyatcaaaactgtcaaggatatcaaaaccaagtctatagaatattgaacaaaacgaagagtttaattgtgataacaacaaatatgataaaatacttagaaataaatttaacataaatgttggaacacataaaaatatcaaatactctggaattttacaaaagtaatattgaaaaaaatagctctttaggatatcgaaacagcatcaagatataaattctccctaaattaatttatagacttaatgtgatatgaataaaaat

SEQ ID NO: 624464 - DNA, 458 bp, Homo sapiens
ctcattagttttaaagaagtttttgatttctgccttaatttcattatttacccaaaagtcatttgggaacagcttattcaatttccatgtaattgttggttttgtctgaatttgttagtcttgaggtctaatttaattgcactttgttctaacagtttgttatgattttagttttttgcatttggtgaggagtgtcttactttcaattatatgatcaattttaaagtaagtgccatgtgtcaatgagaagartgtatgttctattgttttgggatgaagaattctgtagatttccttcaggtccatttgatccagtgctgagttcaggtcctgaatatctttgttaattttctgtctcagtgatctatctaatattttcagtggggtgttaaagactcccactgttattgtgtgggattctaagtctctttgaaggtttctaaaaacttgctttgtaa

SEQ ID NO: 624465 - DNA, 645 bp, Homo sapiens
ttatgtttcttacaatctgtttgtgaactaattggtttatatatccaggagtgctacctatagtgacactgaagatacacattcttaattctgttaaatactgycagatttatttttttaaaaaaacaattttcaaaaaacattagacttgtaccagcacatagtgccataattttggcatgagaatttttaccccaaaacttattgtcaacaattgttattattgtttttctagtttttgtgattcagatgaatatgcatgttatttcaatttgcatttttcaaatttgctactgagttttagcatctccatatgcttgttatatacgtgagtttccgaatctatgaattgcctattaaaatcttcttatcttttagccatctttttaactgggtattctgccatatattccttggttttgaaatatttcactttacagtaaatatataaatccctattgtggttttaagaattgaaaatatcttttcctaaacagtcatctattatctatcaattttgttcatgtaatctcattgacctcagagctattatcttaatatcaacaaatcaatcaagttttttgacatatgatctatgctgtttggaccttttaaaaaaatctacccacttttaagtgacaaaaa

SEQ ID NO: 624466 - DNA, 502 bp, Homo sapiens
ttcttagtgatcttaaaagatggaaaggaaccattctgtgttagtccattctcgcactgctataaagaactacctgagactggtagttctccaagctttataggaagcatggctgaggaggcctcaggaaactttaaatcatggcagaaggcaaaggggaagaaggcacatctcacatggctgaagcagggggaagccagcaagaggggaggtgctacacacttttaaacaaccagatctcatgagaactctatcatgagaacagcaccaaaggggaaaatttacctccatgatccaatcacctctcaccaggccccacctcaaacactggggattacaacttgacatgagatttgggtggggacacaaatccaagccatatcacattccttacctaaaataagtttccttccttccttcttttttttttctttctgtttttcaacatgaccaaatcaagctttgkacaaggaataggcacaatgtctctgccgcactgaga

SEQ ID NO: 624467 - DNA, 605 bp, Homo sapiens
acatttggtcactgaatattataggataaagagacaattgtaaaatcctgtcctccaacctggatctgagagcaggagataggcatcatagagggaatacctttaaaaagatttttcaaaggcatttaactttcaaaggcattaacatcgttaacttacataattcaattattacttcaacaacttatttaaacaaaaatttattgctatcctacataccaaaaactatgctctctgatgagaaaataatgataaaataatatagaaaagttttttgttctcatggaacttacatcctagtaagacaaaattacattgttggggaatagggggcatattctgatgtatggaaggaaagtaggagacaaggtcttaggatagagagtagggtggggcctacttaagtaaggaagatcgatgaaagctttcctgaagagcgtgcatttaggtgaggtctggttcatatgcaggatctagcaaggtggaccaaggaaagagtgctcaagatgaatggaagaacctgggcaagggcatcacctggggagcagcttgatgtctgttggggwtgttggccaacccatgactggggcctcatgactcaggta

SEQ ID NO: 624468 - DNA, 586 bp, Homo sapiens
ccagaatatcagaccacaattcctgttttgcagtgaagtgactttatggacatggccaaatcatctaaatttcctggttcctagtttagctataaatatacagagttgaattttgatgcttgaaaagtccraagttggcaaacttcacaaaaaatatgtgtcataactcctggtgttctaataataagacataaattattcaatggtagtcactaaacattagaaatagaactagtgtcatgaatattccaaacccaatttctccacattctaggtaaatttaattattcacttgctcctctgaacccctatacttgtacaatattatttaaagttatctgaaaagtctttgtgctttggtggtaaacaaaatgaattcacatacagaatttatgtgaccagatcagttgactagacacaaatgttaataattattcttcctctaacagtttgtgtcaacacaattgaccagattaagattgtctcaatatgtctaatgcagtgattttcaacaatgagaagttttgcccccaggggatacttggtaaagtttggagacactttttcttttcacaagggcaaggag

SEQ ID NO: 624469 - DNA, 596 bp, Homo sapiens
cttgctaataagcttaatgaacactcrctgagttggctgtacaatgaggtggattaatatccacagagcagatcattatatccatttgattatcgaaagcctcatttgcagtagaaacatttttagaaaacattcacatagtataaaaatattcctacatttaagacccagtctactacatatcttgttctcaaaccaccttgtcttcaatcatccagtcttattccttccaagttcttggttatctaccagactatttcccaggaatcaatgaatcacaacaatgactattggaatttctggttaccattaatattttctgacatcagtgtgcccttcatggtcacataagcgggaccgccacataaatctacttctatcaagtgccactgtgtcctgccaagaaacctgaataactggctaaaatgttttcttctcaattatctgatcatagggaaccccatcaaacccaaagtaggggtcaagactgggttggcagtggaagtttaggcacaacattcacaggagaaacctgcttatgaaactcccttgtgcatttagcacctacctatactcactctcatatacactacatt

SEQ ID NO: 624470 - DNA, 283 bp, Homo sapiens
attaaaaaaaaaaaagtttacaatatggtcgtgtggtagagaagaaaagaaagttttcaggaaaggaatccaagggtgctataaagcaaccacttgytagatagcacagataaaatggagccaggtgctaccagtcaaggcaatgagcaaaagaccccaaaggcatttcagaaatctttgaggatgtgcttcccatcaaagacccagaggtctaggagaatagaagtgtttcaagaaagaggcctgtagctctgttgccctgcaccacctcaggatgctgcct

SEQ ID NO: 624471 - DNA, 491 bp, Homo sapiens
aggatttcattctgttttatggttggataatattccattgtgtatatgtactacattttctttatccattcatctaatgatggacacttatgttgattccattatcctggctactgttaatagtgctgcaatatatttgagagtgcagacatctctttgataatactgattttctttcttttggatacatacccagtggtcgatccatggtagttctatttttagtttttttttttgagaaaactacatgctgttctccacagtggctttattaatttacattcccaccaacagtgcatgaaggttcctttttttccacatcttcaccagcatccattattgcctttttttttcctgtaggattttactttagttttaattgacattttgcmcaaaagcacagaacggtaactatttcaatggtttaatgttacaagattacaaaattcttaaacagttacagtattctacatcaattatttcacattaaa

SEQ ID NO: 624472 - DNA, 579 bp, Homo sapiens
acacacatacatacatatatattcttttacatatatttcttttatacacacatacacacacatattcttatatgtaatccaaaaatacatacacacatatatatacatatatacacaatgtaaagctatatacatrtaacaccttatatatacatagtatgtgctaaatttgaaaggcgaatgactaaaaagttacaaaatattataaactcatcaaagtgagcttgactatttgcagaaacatttcaatgggatttcagtagaattcaatagaatggaccattcagtaaaaatatgaacttggacaagggacttttacaaattatctgagaaaatacatggatagaggggacaagacaattctgaaaaactaaaaaggagatttgtgtttcttttagacagttacatatttttatagaggaaaaaataactaaaatgatgtgatgtttctgaacaaatagacaaagtattggaataggccagaaagccttaaaatattctttatttatacataaaactaatatttataaagaaggattcatcaatacatggagctggagtaattatttattttttaaa

SEQ ID NO: 624473 - DNA, 491 bp, Homo sapiens
gggtttatcaggggtttccacttttgcttcctcctcatttttctcttgctaccaccatgtaagaagtgtctttcgcctcctgccatgattctgaggtctccccagccatgtggaactgtaagtacaattaaacctctttttgggtatgtctttatcagcagcgtaaaaacagacaaatataccatccttgaatgggacacacaggagcccagaagttcctccctgaggagtcagcaccagaactcaaaatagatcacagactaaatgtgaagttcaaaactataaaacttccaaaagaaaaacatatagcagaaaatctaaatgatcttgggttggcaatgagttgttagttacaacaccaaatacattatccaaaacgcggttctggccaaaggaagagcaagtgctcagtctctgagatgcacatgcacttgtactttgaagagaaggtcagaaagcaggcagctratcatagagaggcgggaggagcc

SEQ ID NO: 624474 - DNA, 392 bp, Homo sapiens
aaatcgaagtgggacgggggcagtggataacagggagctgctcttgtggtagctgggagaagggctrggaacctgcctctacttccctcacagcagccctggaatctcctcttcagctgaccccaggatggctcctaagaacacactttgcaaccattaaactaggtccaagtttcctaagcttcaggcattcacatgctaccttgtgatgtttgccggaatcagcatatattgtgtgctatttattcattcattcagccattcaacaaggatttactgaggacctactctgggatgaagatccagctaaaccaaagtccctctgttgggggtgtggctacattcttaggaagccgtatctctcggtggttaggagtctaggctctgaattc

SEQ ID NO: 624475 - DNA, 592 bp, Homo sapiens
taagcagtggctaacaccctttcttggtcattttgcacatcccttcaagctagttagcttaaccccctggtcccgtgccccaactaacaccaatgtagagaaaatgtctttgtccataatctaagtggaagatggaaatctgacttccatctctgcaggaagatgaactgccccctgccccctttttaatagtattatggccacagattgctgtcctgtgtgatctccaccaagaactctacctggagatctccaggctggatggtggctccaaggaggcacagtcatggcatagtggctctaggggtgcacaccacagcttcctatggtaggtccctccagattcggaccctatgtgcctgtgcctgtgtctatgccggtcagcrgcatcatcttcttccctcacagatgtgtcccttttccttctgcatgccccactgcagggaagtagaaggttggaggaccaatgtacaggagcaggggtgactatgtgtatctgatctagtgtaatccctgggtgtggttctaggaagtttgtcaaccttaaactaatttacttccctatcactaattcacgagttctattgactga

SEQ ID NO: 624476 - DNA, 592 bp, Homo sapiens
taagcagtggctaacaccctttcttggtcattttgcacatcccttcaagctagttagcttaaccccctggtcccgtgccccaactaacaccaatgtagagaaaatgtctttgtccataatctaagtggaagatggaaatctgacttccatctctgcaggaagatgaactgccccctgccccctttttaatagtattatggccacagattgctgtcctgtgtgatctccaccaagaactctacctggagatctccaggctggatggtggctccaaggaggcacagtcatggcatagtggctctaggggtgcacaccacagcttcctatggtaggtccctccagattcggaccctatgtgcctgtgcctgtgtctatgccggtcagcagcatcatcttcttccctcacagatgtgtcccttttccttctgcatgccccactgcagggaagtagaaggttggaggaccaatgtacaggagcaggggtgactmtgtgtatctgatctagtgtaatccctgggtgtggttctaggaagtttgtcaaccttaaactaatttacttccctatcactaattcacgagttctattgactga

SEQ ID NO: 624477 - DNA, 384 bp, Homo sapiens
ttgttgctgcttcataggaaatgacttctatgatgagagcatcaagtgagatcataggggtgagctgagggggctgggagatgggacagaaagggaaactgttaacatttatgagtgtctcttctgtgcaatacactttgcattatggtattaatcttttccaaaaccatctaagacagttttcatgccccctaatctgctagagaggaagcagaatttcagagaggttcattaacttgacttgcccaaggccacacagcaagtaggggcagagttagttttttttttttaattatcattattattattattattattattattattattattattatactttaagttttagggtacrtgtgcacaacgtgcaggttagttacc

SEQ ID NO: 624478 - DNA, 519 bp, Homo sapiens
gttcaaaacaatttattgagtgccaactgtactttaagcacatgttatttctttctttctgcatcaccatgaaaggtaaatgtatattatcacactgactgccatttatattatgggttgaaacgtgcccttgagcatgatattgctattgtgattagaatctagtagcagaaaaagcaattaaagtgagacaagtgcattatcatcttttaaatagcatttgttggacctgtgtgaacattgtctataccttttataaatattgcccaatactgtgtttttaactagagttatgcaggcataaaatatccttggcttgcaaattttctattaacttgaacatactgggaatgcttagcagcaatgaagtgctgaaaatgccaaagaaattaatggctttgtgctgtactactgaaacatgtccgctaatatttaaaattccatgkcccaggacatcacttatatctgctgactgaagctgaatggcctggaatctgctgggtgcatcaggccatttct

SEQ ID NO: 624479 - DNA, 577 bp, Homo sapiens
ccctcagatgatgtctgccagagaaagcagagtgtctgtgctaaccaggccatggcaatgacctarttgaggactctcagtgtaacttttgtgtgatctctcatcactagaagaactagtacatattatattccttgccatgaaaataagggtatgattttacatgggtaattagtcagttcatgtattgcttacatgcctagtctgggtggttctcattttgtttctccacaaacatttgttaagtacccactctgtgccaggctgtgagacaggcacaagaaaaatttacctgctactcaacatctccttgtcaatggtctacaagtgcctttaacttaacacatctgccactaacctcattacttaccccacccaaacaatagaaatgacaacaacagcagcaatagccaaaacaacccagtctttcacctctgtattttctacctcgatgaatagggtcatgcgtacactactagtctcttaacctaaaaaccttagtgatccatagtctcccattctctccctcactcaccatatccaatggtagactaagtctatttatgctcccccttaa

SEQ ID NO: 624480 - DNA, 429 bp, Homo sapiens
ccctgctcagctacactgctcccaccaggcaccatcttgactctctgcttttatgcatatgctcctcctgcctgggacttcctctcccacctctgcacttagccagttcctgctcattctttgggtccagctgaaacattacctcctctaagaagcctgcccagttatatttcctttttctgtgtcccacggaattcyatatctattccttttgaaataggcataatggaaacatttatttatgtgtgtgtgtttctcactaaattctgaattccctgaggatgtgaactttgatattcagttttttttttaaaaaattctgttactagcacactctttggcatgtaaaatacatccaataaatgcttctagaataaagaaatgagtgaaaaaaatctcacagccagaaaaatgggaactgaccaacaa

SEQ ID NO: 624481 - DNA, 563 bp, Homo sapiens
taaagtttaatttataacttagatacaataagagattaacaataactaataataaaatagaaaaattatagacaaatagaaacattttaaaattatgaattgttcatttctagaatttcccattcaatatttttggactgcagttgtccataggtaagtgaagccatagaaagcaaaactgtagctaaggagagattattgtatttacaataatataattttattattgacttgggaggctagtttatattgtcattataaaatttacttgatctaaataagcaatttttgcttattattatgtttaccttttgccacactcttaatagattttaattcttgtcttgcattgcaaatgctaacatcattggttaacccatatgttccttccaaagggaatattacaagaactaytgtattttctgcgtatgcatctaggcaaatgccttcatatcaaatccattattgaaagattcattcttcatcgtgctgagaagattatagatatctcctataatttagaaactgtgttctggtagagtttgccattaggtaaaacgttg

SEQ ID NO: 624482 - DNA, 299 bp, Homo sapiens
acaggcttacgctgccacacccagctaatattttgtgttttcagtagagatggggtttcaccatattgccaggctggtctcgagctcctgacctcaagtgatctgccagtcttggcctcccaaagtgctgggattacaggcgtgagtcactgcacctggcctggaaataattttaaamagggcctttacaactcggtattcccttggaatccaggacattgtcttgcacatagttgcagctcagtaaatatttctttagctagaaaagaccacagaactagtattcagaagatgtgtgt

SEQ ID NO: 624483 - DNA, 299 bp, Homo sapiens
acaggcttacgctgccacacccagctaatattttgtgttttcagtagagatggggtttcaccatattgccaggctggtctcgagctcctgacctcaagtgatctgccagtcttggcctcccaaagtgctgggattacaggcgtgagtcactgcacctggcctggaaataattttaaaaagggcctttacaactcrgtattcccttggaatccaggacattgtcttgcacatagttgcagctcagtaaatatttctttagctagaaaagaccacagaactagtattcagaagatgtgtgt

SEQ ID NO: 624484 - DNA, 427 bp, Homo sapiens
aatagaacatattctacttgtaatgatgaataactggtgttaacagcagctacagaggcagagccattagagagatggatgaatgtaccagtaagtagaggcacacatatctgctaatgggaaggtcacaaagcaaacattaacaatcgagaacattaatacattctcccacaccaatgctttctcaagactgacttttgacaggtacaatctggctcccatatgtctctgtctacaccgcggggtcagtttttgttcagaacacaaacatacttgcaaatttgccttcaagatgatagaaacaacagagacaaagtgttaagatttttgtattttgtatacagtggaacaygtctcttctctgaatagatgaatgaggagactggtctatgaagtacaataatgccatgttttattgtgctttgca

SEQ ID NO: 624485 - DNA, 629 bp, Homo sapiens
ttcttcacatctgtgccagcatttattattgcctgtcttttggatataagccattttaactggggtgagatgatatttcactgtagttttgatttgcatttctctgataatcaatgatgttgagcaccttcttatatgcctgtttgccatttacrtgtcttcttttgagaaatgtttattcaaatattttgcccatttgtgattggattattagattttttttctatagggttgtttgagctccttatatattctggttattaagtccttgtcagatgggtagcttgcaaatattttctcccattctgtacattgtctcttcactttgttgactgtatcctttgctgtgcagaagctttttaacttcatgtgatcccatttttccatgtttgctttggttgtctgtgcttgtggggtattgctcaaaaagtctttgcagagattaatgtcctgcagattgtccccagtgttttcttatagtattttcatagtttcaggtcttcattccattttgattttatttttgtatatggtagagctagaggtctagttttattcttttgtatatggctattcaattttcccagcatcatttttcaggtcttccgatatgatgtatcaacagaata

SEQ ID NO: 624486 - DNA, 565 bp, Homo sapiens
tctcttttacttttacctttgctttcctcaagcaagagttttgccccataactaccacagctggtaatgtgctgagtctcacctgaagccagcaagtctcaagggccttgatgtatacctggatattgctgctggttattcagggcccaagggcttttcagttagcaggtaataaatgctgacacactcggtcctttctttcaagtcagcagctacccttctggcccagggtgtgtctagaaatatcacctggaatgggacctggaatgggggcctcatgactttgactggtrccctatcctactgtggctgggctggcatcctagatgcaagacaaattccttcctactctttcttctcctcatgtggaaggaagggttgtcttttggagccttgagctgtgcaacctgggtttaggggaggggtgatgccagaactcccttggctgccccagctggtgtttcagtaggtcacatgactccaacccacctcagcagtcaactgtctctgtgcctagttcagccctagaactcgcctatgagagttgcagtccttatggtctaga

SEQ ID NO: 624487 - DNA, 565 bp, Homo sapiens
tctcttttacttttacctttgctttcctcaagcaagagttttgccccataactaccacagctggtaatgtgctgagtctcacctgaagccagcaagtctcaagggccttgatgtatacctggatattgctgctggttattcagggcccaagggcttttcagttagcaggtaataaatgctgacacactcggtcctttctttcaagtcagcagctacccttctggcccagggtgtgtctagaaatatcacctggaatgggacctggaatgggggcctcatgactttgactggtaccctatcctactgtggctgggctggcatcctagatgcaagacaaattccttcctactctttcttctcctcatgtggaargaagggttgtcttttggagccttgagctgtgcaacctgggtttaggggaggggtgatgccagaactcccttggctgccccagctggtgtttcagtaggtcacatgactccaacccacctcagcagtcaactgtctctgtgcctagttcagccctagaactcgcctatgagagttgcagtccttatggtctaga

SEQ ID NO: 624488 - DNA, 565 bp, Homo sapiens
tctcttttacttttacctttgctttcctcaagcaagagttttgccccataactaccacagctggtaatgtgctgagtctcacctgaagccagcaagtctcaagggccttgatgtatacctggatattgctgctggttattcagggcccaagggcttttcagttagcaggtaataaatgctgacacactcggtcctttctttcaagtcagcagctacccttctggcccagggtgtgtctagaaatatcacctggaatgggacctggaatgggggcctcatgactttgactggtaccctatcctactgtggctgggctggcatcctagatgcaagacaaattccttcctactctttcttctcctcatgtggaaggaarggttgtcttttggagccttgagctgtgcaacctgggtttaggggaggggtgatgccagaactcccttggctgccccagctggtgtttcagtaggtcacatgactccaacccacctcagcagtcaactgtctctgtgcctagttcagccctagaactcgcctatgagagttgcagtccttatggtctaga

SEQ ID NO: 624489 - DNA, 573 bp, Homo sapiens
taagcaaacaacatactgtgatgtgtactttatagatggatcatttttgtccataagcaattttgcgttatcatgtgttgtttaatggctgaggaccttccaaaataggcttagaggattatgcaatacataatttcygacttttaaaagttcagaaaaagtagttatggtttatttggagatatcacatagtttactgaagtctcctgagcttgttgacatctctgacactttgtgaatgaggccttttttattttcccttcatttgtttagttctttacctaattgattttctgtgctaatacactaaaggtctgaagaaggcagtgcctcaggtgtgacagatgaaataaggtgcttttagtcattgcttttatcttccatgtctaatgtgttggttacagctgtgcagtttaacagcaaaatcaatacatcatttgctgcaggtacctacaataatttgaaagtccttcggtattttaactattagatttcctctgtatttttatttatgtatttattacttatctacttatttatatgctttctgatattgaatgccacaaggtgaca

SEQ ID NO: 624490 - DNA, 446 bp, Homo sapiens
aaagagtaattattaacttatatatgatttatctcagttggcaaataaatttaactgaattctaattttcaaccatttgttttagttttttcttttttaataggctactttttcaggtttcatgattggtatatataataattaacctggttaacttttaacttattcttggattaaatgtaatgtgattcttcctggaattttatagaaactggctgatatggtttgcatatgtgtctcctccaaatatcctgttgaaatttcatcccaaataytggaggtgggcctagtgggtggtgtctaggtgatgggggtggattcctcatgaatgccttggtgttgtcttcacagttatgagttctctctccattagttcacaggtgagatggatatttaagagactgtgccacttccttctctttcttgttccctctcttgccaagtga

SEQ ID NO: 624491 - DNA, 446 bp, Homo sapiens
aaagagtaattattaacttatatatgatttatctcagttggcaaataaatttaactgaattctaattttcaaccatttgttttagttttttcttttttaataggctactttttcaggtttcatgattggtatatataataattaacctggttaacttttaacttattcttggattaaatgtaatgtgattcttcctggaattttatagaaactggctgatatggtttgcatatgtgtctcctccaaatatcctgttgaaatttcatcccaaatattggaggtgggcytagtgggtggtgtctaggtgatgggggtggattcctcatgaatgccttggtgttgtcttcacagttatgagttctctctccattagttcacaggtgagatggatatttaagagactgtgccacttccttctctttcttgttccctctcttgccaagtga

SEQ ID NO: 624492 - DNA, 441 bp, Homo sapiens
catatcaaaggaaatttttaagccaaaaaagggatgttacgttgcgacttttatctgtataacaaagagcaccagaaatgttaaatatgtgagtataaagtgtattcatataatttctaaatttattttaaaactatttaactattatagcttttacaacatatgtagaaataacttatataatcctttggtgatgagaagaatgggaagaaaatggaagtatactgctgtaaaattttacatatattgtgaaagaatataatataatttgatggtagggtgtgatacattaaaagtgtataatcaacaacacagaagtattattagaaaaattttaaaacagaagagttaatgagttaatgttgaagataaaataaaatgttaaatattctagttcaaaagaagataataaaygaggacaaaaatcaacacaaatgagaa

SEQ ID NO: 624493 - DNA, 598 bp, Homo sapiens
cccatgtggatgggagaaggcatggagagagtccatttggtaaaatgaggagatttgaacttaggaagcaaaattgcctttggttagtttagaatactttgagtatgggtaaggtaggtcaaatgagctgcaatagaagtgagtgtacatgatttctttctctattttgttttgtgrtatgtatccaggatttagatcagtgtgtggcatgtgagaagcactaaatatttgttaaaagaggagatcaattaataaagatgggtatataaagagtacaatgagctatgaaaatgaaagtcatttgctatccaaacacctagtagagtgtctgagcatatattatacttaatatgggtggttttaataactaatatttcataattttggctaaaattagccctgtgacaattgaagctcagggttatccatgaatattttggaatatttttcaaagaagggaaatatgtaaggttaataaaagcagtacagttataagaacgatattttaactttgttaaaaatttctcacttcccatctgttcatattatatttcagtgctttagggaaaaaacctctttgacctgaagttcagagcta

SEQ ID NO: 624494 - DNA, 642 bp, Homo sapiens
tttttaaagtaagaatggtaatagtacctgtaattgcttcatggataatgcaatgattaaatgagttaatacttataaagtattaacttataaagtaaatacaacattatatggcttgtttagctagtgttaaattattattacatataacttataaataagtagaggcacatatattgagaatgtatatatttaaaaacttgttaaaatagcacataatcaaaatataaaaatccttaaaatatatgcatttctaatccaggaatactaagatgtcatgagaataggtcttaaaagtaatggcaattttctaaattggtggataagaaaacccacaatgtgatgcataaaaaggtcctgtgatgaaaatgttcttcttgctgaagcatatcatgacaaaagcatttcaattgcttagaaagacacacataggtttgtttctggccaataartttttgtgagatcttggacaaattagttcagcaatctgagaatcactttctcatctaataaattgcaatagtaatatttattttatagagttaaacaatttattacatgtaagatgctgagtgtattgcttgccacaaaatcaatgctaaataaaagaatcagtttaatttcctatctccagtcacagca

SEQ ID NO: 624495 - DNA, 585 bp, Homo sapiens
ctggcctctgcctcagtctctcacctcttttactctatcctccctattgctgcttcccctccagccacattgcacagctagaagtgctttggagttctaagtcttctctcatctaggccactctgcatatattatggatccatatacatggatctctcttcctggataacttacctatctcttaataaatgcttcttatcstttgttttgggcttaaattttagttcctctgaaaagccttctctgattccctcagactacagaggtcccgcttatatacattctcatagaaacaagcatttcttctcatacattaaccagaattgttatctaaaaattatttgcttaattacaagcttcctgaaggcaagcactgttcagaatattttatacatagctggtaaccaatcagtatgtctcaatatgtataaatgtatgaaagaatgaaatgtatgaaagaacagtatctgcctagcaaagcaataatcctcatataatgttttaataacataaaaagtcattaaaacttaatgactgtcattttccatttgaatttattaattttgctcccattttttgtatgca

SEQ ID NO: 624496 - DNA, 585 bp, Homo sapiens
ctggcctctgcctcagtctctcacctcttttactctatcctccctattgctgcttcccctccagccacattgcacagctagaagtgctttggagttctaagtcttctctcatctaggccactctgcatatattatggatccatatacatggatctctcttcctggataacttacctatctcttaataaatgcttcttatcctttgttttgggcttaaattttagttcctctgaaaagccttctctgattccctcagactacagaggtcccgcttatatacattctcatagaaacaagcatttcttctcatacattaaccagaattgttatctaaaaattatttgcttaattacaagcttcctgaaggcaagcactgttcagaatattttatacatagctggtaaccaatcagtatgtctcaatatgtataaatgtatgaaagaatgaaatgtatgaaagaacagtatctgcctagcaaagcaataawcctcatataatgttttaataacataaaaagtcattaaaacttaatgactgtcattttccatttgaatttattaattttgctcccattttttgtatgca

SEQ ID NO: 624497 - DNA, 566 bp, Homo sapiens
gtaatacagcatcagacatgggaatgtcttcctcttttggccaggctgcattgtagcctgcaatcatccagctaaggaaggggatggcccaatcctaattattaacatcataagggtgctgcctcagggctgggtgatttgtaacattttactcatcttgagtctggagggtattataccctctgctcccatgtcccayagatggagaaaccactctgcaattgactatctccccttctgcctgaacctatttcccagctctaccaattccacagcagtatagtcccacattgtggagtgccgtcatcttttaggtgggggtatgctttgcagggctactcccatcatagaagcgactatgggatgggaagagaggatgggaacctctaggtttcatccctttcctcattctcgtccccactagggctctccattgggtctcaagacttaggatcccaagacgattcagtcatgatagccctaacccattggcatgggagtcagcaacccttcaaagggttacctaacaaaccagggtctctattttgtcatcctatgcccacagg

SEQ ID NO: 624498 - DNA, 620 bp, Homo sapiens
aaatatgaaaaagaaataaagtctttcaaaggtaagtaaaaaaatgaaggaaggcatcaccaatagatcagccctacaataaatgtttaggggactcctacatctagtaatgaatgaaaaaaatgtatcattatgtaaacataaccatgaaacacactgatggagaagacacagaaatgagaaagtgaaagaactcaaatgttactactacagaaaaccaccaatctctaatgatatacaagagataaatamattaactaagaatacgcaaaacaactagaaacaattaacaaaatgacaagaataggtactcacccatcaataatatctttcagtataaatggattaaattcaccaattagaagatatagattggctgaaatgattaaaaaagaagacccagatatatgctataagaaactcacttcacttgtaaaagacacaagtagactgaaaataaagaaatggaaaataatattccacgaaatagaaaccaaaagtgagtaaaagtagctagagttgcagcacataaaacaggatttgagtcaaaaagagtgagaagagacaaataaattcattaaataatgataaagggataaattcagcaggagaatataaca

SEQ ID NO: 624499 - DNA, 580 bp, Homo sapiens
caaattagcagaagtaaagaagtaataaatagcagagcagaactaaatgaaataaagagtgtaaaaacaatacaaagtatcaatgaaatgaaaaattctttttttgaaaagataaacaaaattgataaactgctaaattgactaagaaaaaagactcaaataaatgaaattaaaatgaaaaaaggttcatcaaaaygacagtggatcatcagagactattatgaaaaattatgtactaacaaactggaaaacataaaggaaatggataaattcctgtacacgtacaacctaccattatcattcattatctcttcaggttttttatttctttctaagccagaaagaaatataatttgaatatttagaaaaagtacctttgaggaatcagttttaatatctccttttttattttgatttcatttgagtcttctttttttcttaatcagtcaatttggcagtttattaattatctttctaaacaagaaagaaatagaaaaatagaagagaccaaaaatgataatgggaatgagtaatgatattgagtgaataataaaaattttcccaacagagaaaaagccca

SEQ ID NO: 624500 - DNA, 439 bp, Homo sapiens
agtttgaaaccagcctgggcarcataacaagaccctgtctcaaaaacaaaaaaacaaaaaacttagccaggtgtggtggcacgtgcctgaagtcccagctactcaggaggctgagatgggaggattgcttgagcccaggagtttgaggctgcagtgagccataattgtgccactacactcagcctgggagacaaggcgagatcctgtctcactctcttaatgaatctttttgaacaggaataaacattcctacttggtcttgcctgtaggcatacaaatccacctaatatgtagaagtcctctcatggtaggcagaacaatgaaacttcccattactcaaagatgtctatgtcctaatccatggaacctatgattatgttatgttgcctggcaaaatagagttaaggttacatatagaattaaggtcaccagttaactg

SEQ ID NO: 624501 - DNA, 564 bp, Homo sapiens
agcacgttaattaaacctccattaaaacttgatttctttacaaaaaattgaaagggaattgagtaacttgaagtataaatcttgcaatattataacccaagagacaaaattaagatggtaagatgtccaaattatctgatttatgaactgtaatgactttaaaatacagtaacaattttagttagtataaccagatatgtggacactaattagcaagttgaatgttgcatcaatsgtctagtctaagaagtagttttatccatttaatagaagtgatcatagataagctgtctgtcgaagtacaaaatatttctaataatgttataaatattaagtttacaaattggtaatttttttaataacgcgagcacaccaggtaacagtgccaagagcatggcatagaaaataatctataccacaaaagcctctcctgtgcctcttcctcagtcatcatataccttaaaggtagtcgctattacgacttctatcaactcgattcatttcaattgattttgacatttaccatgaaattatataggacgtactattttgtgtttgagattc

SEQ ID NO: 624502 - DNA, 564 bp, Homo sapiens
agcacgttaattaaacctccattaaaacttgatttctttacaaaaaattgaaagggaattgagtaacttgaagtataaatcttgcaatattataacccaagagacaaaattaagatggtaagatgtccaaattatctgatttatgaactgtaatgactttaaaatacagtaacaattttagttagtataaccagatatgtggacactaattagcaagttgaatgttgcatcaatggtctagtctaagaagtagttttatccatttaatagaagtgatcatagataagctgtctgtcgaagtacaaaatatttctaataatgttataaatattaagtttacaaattggtaatttttttaataacgcgagcacaccaggtaacagtgccaagagcatggcatagaaaataatctataccacaaaagcctctcctgtgcctcttcctcagtcatcatataccttaaaggtagtcgctattaygacttctatcaactcgattcatttcaattgattttgacatttaccatgaaattatataggacgtactattttgtgtttgagattc

SEQ ID NO: 624503 - DNA, 453 bp, Homo sapiens
aatctacaatatttactctaaacatttagagaaagattgtcaactactgccttaatgtattcctagcatgtttcttcctttacttttttgtttctttcttcctcactccctcgctgcctaccttcttgcctccttccctcactcgcctccttccttcctccatttctcttttttttctctcattcctctgttccattcttctttttttccttcctttcctcctccttccctccctcccttcctttcttcctcccttctttcccccttctggaaaaatgtattgtctactatgtaagccaagctctaagctaaactctgagaatatcacagtaagatccaatggctataacatagtggtggacgtagacaagtaaaagacaactaaaatacggcaagtgctatgaaaagacaaytaatagatgggtgtcctaatcatgttttggggattcaagg

SEQ ID NO: 624504 - DNA, 449 bp, Homo sapiens
gaatccccaaaacctgattaggacacccatctattaattgtcttttcatagcacttgccgtattttagttgtcttttacttgtctacgtccaccactatgttatagccattggatcttactgtgatattctcagagtttagcttagagcttgrcttacatagtagacaatacatttttccagaagggggaaagaagggaggaagaaaggaagggagggagggaaggaggaggaaaggaaggaaaaaaagaagaatggaacagaggaatgagagaaaaaaaagagaaatggaggaaggaaggaggcgagtgagggaaggaggcaagaaggtaggcagcgagggagtgaggaagaaagaaacaaaaaagtaaaggaagaaacatgctaggaatacattaaggcagtagttgacaatctttctctaaatgtttagagtaaatattgtagatt

SEQ ID NO: 624505 - DNA, 570 bp, Homo sapiens
ttggggaaaaaaaggaaccttgttactacatatttgaccctcttaagaaaaatggttaatatgccataattttgtctttagtgttttctgtgacttgcaccatatttagttcccacagtgcttgattatagcaaattcargatattttcacattcaaagtagatggataattcttaataatctccaaagtgcttgcatagtcacaaacagtaatgttctttcaataagggtaccatttcgatagactttttgacagaaaaaaacacaacagggaagataaaaatttatcaaattttgttttttcttttagatataaatcaatgttttaaaacttctcctgcttttataagagctattaatacacaatggtttttttcctaagcaggggtcttaattttgattgaaaactttgagaattttgaatataataggagaagcaattatacatatggaaaataagactgtattagtccatttcatgctgctgataaaaacatacccgagactgggcaatttacaaaataaagagtttattggacttactgttccacatggctggggaggcctcgc

SEQ ID NO: 624506 - DNA, 557 bp, Homo sapiens
tttgtggcattggtttagtggtccagtggaagacaatgagaaaacagatatagctgattgggacactgaatatctcttttattttttagmaaaacatttggaacataaattggaattgcttcaaagacaaagtgcctcaaagcttcaggaaaaaagccaaaatgttagcatatattgattgttatttcctgtgtatagcaagattttgaaggaaggagagtaggttggggggaaatattggcaagtgtgcaagcagaaataaaagcaaatatacgatgtactgatttttccatttattctccctatgtctcttacttattttcttttcacttttaggagtaacatgatgtgatttcatttgttaatgaatctcattcttactaatacatggagagtggattggaggccagagtggaagtagagaccagttgaaaaggtattgcaataataaagattagacaggatgaccatttggaataaggggaaacagaaggaagtaaattcattgatttgatatatattaagggaagtgtatgctacagtgtaaggcctatagg

SEQ ID NO: 624507 - DNA, 607 bp, Homo sapiens
aagtccacctgttgcaatattcagctctcttgccataaataaagtgagcttggttttgagactgtggttcagaaaccatcctacaaggcagtacccagagggcacatattttcagaagcctggcccagggctttgggcagccgggccttggatcagaggtaccaggtttcaggcagggccctgtgctgacctacaggactaggggtcagaccctgcagggctgagggccgagggttkcatggggatgccagggtaaacctagactcaggctggagaccctcaagggaggccaagccagcaccccctgttaggccagaagagacatacaggtccctgcaggcgtggcaaatgcagcctccggagctttctgagcctggattacatcccacctttggcaggaaaagtcctactcctctgccaggcaatgggtttgtagcagtttaccatccgagcaggctccagcctgaccatctccagcctcctgccataccatatctgaacctggagcagtgaggctgatgcccaggctccaggcagctggaaggaagccctcaagctttcttcaggatagagagagcccaggatccaagggaggcagcaaacctag

SEQ ID NO: 624508 - DNA, 584 bp, Homo sapiens
taaaacctgaatttaaaactcactggtactagtgtattctttataggaatattttaaattaaattcaatttctgtaacagtcataggaatattcaggtttctcttcagtcagttttggtactttatactttccaaagattttgtccattttgtctaagttttcaaattcactggtttaaaattgttcacagtgttctcttatgatctgtgcctatgctgtatctaacctttccatgatgtggtatggaagaaagtaagtcaaaacgtagcctataaaataccaagttacacagtaaaagtgtaagactgtttattgccgtgtaattatttttgaattattaatgatatttktttccttctttatccttgtgtacatttttttaattttctaatataagcatgtatagcttttaaaaccagggaagagacatacatatcatttgattccaaaaaagataaaaatacttcagaaaaataaagctgagactattattaaacagcatttgctcagccttcctctctgtttttaactctccaccacagaccatgcctgtcctctgggcatttttcttccttctccaatc

SEQ ID NO: 624509 - DNA, 567 bp, Homo sapiens
cattgatctatgcaaagattttataggtaagacttcaaaagtacaggcaacaaaagcagaaaaagacaaatgggattatatcaaactaaaaagcttctgcacagcaaaggaagcaatcaagagagggaagagacaacctacagaatgggagaacatgtttgcaaactattcatccaacaagggattaatatccaaaatatataaggaactcaaacaactcaacagcacaaaaagcaaataatcagattttaaaatgggcaaaggatctgaatagatatttctcagaagaaggcatacaaatgakaaacagcatattttttaaatgctcaacatcactgatcatcagggaaatgcaaatcaaaaccacaataaaatattatctcaccttagttagaatggctattatagaaaagacaaaaaataacaaatgttggcaaaaatgtggagaaaagggaactcttatacactgttggtggaaatgcaaattagtacagccattatggaaaacagtatggaggtttctcaaaaaactaaaaatagaattactgtatgatccaacaataccac

SEQ ID NO: 624510 - DNA, 567 bp, Homo sapiens
cattgatctatgcaaagattttataggtaagacttcaaaagtacaggcaacaaaagcagaaaaagacaaatgggattatatcaaactaaaaagcttctgcacagcaaaggaagcaatcaagagagggaagagacaacctacagaatgggagaacatgtttgcaaactattcatccaacaagggattaatatccaaaatatataaggaactcaaacaactcaacagcacaaaaagcaaataatcagattttaaaatgggcaaaggatctgaatagatatttctcagaagaaggcatacaaatgagmaacagcatattttttaaatgctcaacatcactgatcatcagggaaatgcaaatcaaaaccacaataaaatattatctcaccttagttagaatggctattatagaaaagacaaaaaataacaaatgttggcaaaaatgtggagaaaagggaactcttatacactgttggtggaaatgcaaattagtacagccattatggaaaacagtatggaggtttctcaaaaaactaaaaatagaattactgtatgatccaacaataccac

SEQ ID NO: 624511 - DNA, 567 bp, Homo sapiens
cattgatctatgcaaagattttataggtaagacttcaaaagtacaggcaacaaaagcagaaaaagacaaatgggattatatcaaactaaaaagcttctgcacagcaaaggaagcaatcaagagagggaagagacaacctacagaatgggagaacatgtttgcaaactattcatccaacaagggattaatatccaaaatatataaggaactcaaacaactcaacagcacaaaaagcaaataatcagattttaaaatgggcaaaggatctgaatagatatttctcagaagaaggcatacaaatgagaaacagcatattttttaaatgctcaacatcactgakcatcagggaaatgcaaatcaaaaccacaataaaatattatctcaccttagttagaatggctattatagaaaagacaaaaaataacaaatgttggcaaaaatgtggagaaaagggaactcttatacactgttggtggaaatgcaaattagtacagccattatggaaaacagtatggaggtttctcaaaaaactaaaaatagaattactgtatgatccaacaataccac

SEQ ID NO: 624512 - DNA, 567 bp, Homo sapiens
cattgatctatgcaaagattttataggtaagacttcaaaagtacaggcaacaaaagcagaaaaagacaaatgggattatatcaaactaaaaagcttctgcacagcaaaggaagcaatcaagagagggaagagacaacctacagaatgggagaacatgtttgcaaactattcatccaacaagggattaatatccaaaatatataaggaactcaaacaactcaacagcacaaaaagcaaataatcagattttaaaatgggcaaaggatctgaatagatatttctcagaagaaggcatacaaatgagaaacagcatattttttaaatgctcaacatcactgatcatcagggaaatgcaaatcaaaaccacaataaaatattatctcaccytagttagaatggctattatagaaaagacaaaaaataacaaatgttggcaaaaatgtggagaaaagggaactcttatacactgttggtggaaatgcaaattagtacagccattatggaaaacagtatggaggtttctcaaaaaactaaaaatagaattactgtatgatccaacaataccac

SEQ ID NO: 624513 - DNA, 375 bp, Homo sapiens
ggattttaaatcatcccaacacaaagaaataataagtatttgaggtgatggaygtgctaattacccaatttgattattttacattatatatatgtaacaaaatatcactctgtaccccataaatatgtacaattattatgcatcaattaaaaataaaaaatttaaattgctttattaattaacacataactgatttctctcagcccctgtttatcaccttcaggattttgcaacaaaagcaataggaaagagactctggaaatatgacaaagtaggaagcaccaggaatctctctccccacccagacaacaattgcactgacagaatcagtctgatgtaactattttggaactccagcaactatagaaggcttgc

SEQ ID NO: 624514 - DNA, 547 bp, Homo sapiens
tgcacctcccctgattaatgtaagtccctcccgctctggctgacgtgacctccaggggatttaaaggactggcacccttttctcccttagttttctctttttccccttttgggagccagatattacagattaagttatttaaaaacaactgcatatacaggataattagaaagtgaccatgcattcccaggtaaaggcgatggctctgcaaagatctgagaagaccctaagtttacacctcaggataatccttggcacagagacagccaccaacagtaaaaaaaataaataaaataaaaaaataataacaaaacaccaaaccatggggaagggagagaatctgatttccagagttgccacattactatgctcaaawgtccagttttcaaccaaaaaaaaaatcagaagttatataaagaaacaggaaagtacagtccactcaaaggaaaaaataaatcaacagatactgccctttcctgaaaaagaactgagtgcaaatctaccagaccatctttaagaactgtcttaaacatactcaaagaattaa

SEQ ID NO: 624515 - DNA, 533 bp, Homo sapiens
ggagttggtttctcttggaaaaccatcaggggaagtaattgctaggcccaatgataagggtatttttaactttatgataacctccatagtgtttttcaaagtggctgtaatatttaacacttcaactagcaatgtatgagagtaccaggtactccgcatcttcaccagcacttagtattctaagtatttttaattttaacctttctastgaatgtgttgtggcatctttctatggtttaatttgcatttccctgatgactgacagtgttgcacacctttttttgcgcttattgtccatttgtttatgaagttacacttctattttatgtatatatacatgttattgtatattatatacaataatattataaatattattttcctaaatgactgttcaaatcattcacctgtttttaaattgggtcattttttccttattattaagttgcaatagttctttatatattttagataaaagtgttttgtcatatatacattttttttccccaggtggtttggaattgttggtggga

SEQ ID NO: 624516 - DNA, 446 bp, Homo sapiens
cattctggcttgggagactttttttccccacctttgaatttagaacgcttgaaaaatgccatgtcattgtcttctggcttacattgtttctgagaagtcagcagaaattctttgtttaatcttcttttttctcttactgcttttacaattttwtcctttaccatagtccccagtgttgaattgtagtccagaaatttgattataaaatgccctgtgttgtagttgttgttgtttttctttttggtatttattctgcttcaagttttgaccatggtggtctgtgacttcacagttttcatcaaatttaggaaaattacagccaatatttcttcaaatatattttatcctccccagtctgtaatctccagttacacatatattggactgcttgctattttcccatagacccctgaatgtctagtcactgatctgatgtttttttaagt

SEQ ID NO: 624517 - DNA, 522 bp, Homo sapiens
atgctaatcatagccaatgcctggccaatggcaagtgcttcacaaatgccacttcataagtattcagtggcatactgaactgaactgacgaccatgtaaaaggggtacagcaaaaggacccactgagagacaaatgttaggtggcataattttctatgaaaggctcatgattgcaaatgtctgtcctatttgccattctgacccagaacctagaaggatgcatggctacacatagtgggggtgcaacacrtatttattgaatagaaggggcacacgtttcctctgcaaacatcacttagcaaacacattgaaacattgtaattaagaagtgctacgccaggcagctgcacccttcagccaagtcaggattatcagcagaacttgaattcagcagactgaaaaatttgagatcaaatcttagctgcatctgtttgagtcttggtttcaccttagatgaaacagagatggcaatcatcagggtccctatgttgctgtgtcactgagaggattaaatgaatagtg

SEQ ID NO: 624518 - DNA, 522 bp, Homo sapiens
atgctaatcatagccaatgcctggccaatggcaagtgcttcacaaatgccacttcataagtattcagtggcatactgaactgaactgacgaccatgtaaaaggggtacagcaaaaggacccactgagagacaaatgttaggtggcataattttctatgaaaggctcatgattgcaaatgtctgtcctatttgccattctgacccagaacctagaaggatgcatggctacacatagtgggggtgcaacacatatttattgaatagaaggggcacacgtttcctctgcaaacatcacttagcaaacacattgaaacattgtaattaagaagtgctacgccaggcagctgcacccttcagccaagtcaggattatcagcagaacttgaattcagcagactgaaaaatttgagatcaaatcttagctgcatctgtttgagtcttggtttcaccttagatgaaacagagatggcaatcatcagggtccctatgttgcygtgtcactgagaggattaaatgaatagtg

SEQ ID NO: 624519 - DNA, 558 bp, Homo sapiens
cgtccttattattagtgttgttacctttaattgtacacatgtaaagtgatatattctgaagcccactcttgattaggatgctagattatgatcttcctcctttttatagtattctcttcgctttggacaatttctcagacccacttatagaatgtgtatattgagttcaastcagaagcaatagttggaacagatcctcactcctttgcccaacttcctcttcttcctgggctggatgtcttcctctttactggcaacctgtggttagcagaataatgcctatcatatgtctatgacctgatccccagagcctgtaaataatatcaccttacatggtgtgacggttaattttatgcatcacctcccacttgactgggttaagggatacccagatagctggtagagcattatttctgggtgtgtctctgagggtgttttgggaagagacaagcatttgaatgggtagaatgagtaaaaaagatctgccttcacccatgggaacaggtgtcatccaatctgtcacgggtctgaatagcacaaaaaggcagaggaagggta

SEQ ID NO: 624520 - DNA, 558 bp, Homo sapiens
cgtccttattattagtgttgttacctttaattgtacacatgtaaagtgatatattctgaagcccactcttgattaggatgctagattatgatcttcctcctttttatagtattctcttcgctttggacaatttctcagacccacttatagaatgtgtatattgagttcaagtcagaagcaatagttggaacagatcctcactcctttgcccaacttcctcttcttcctgggctggatgtcttcctctttactggcaacctgtggttagcagaataatgcctatcatatgtctatgacctgatccccagagcctgtaaataatatcaccttacatggtgtgacggttaattttatgcatcacctcccacttgactgggttaagggatacccagatagctggtagagcattatttctgggtgtgtctctgagggtgttttgggaagagacaagcatttgaatgggtagaatgagtaaaaaagatctgccttcacccatgggaacaggtgtcatccaatctgtcacgggyctgaatagcacaaaaaggcagaggaagggta

SEQ ID NO: 624521 - DNA, 349 bp, Homo sapiens
ttctctgtaaaaaattattaattcttaaaccttttgtcagccatgtagtaaggtgtatatatttatgaagtacatgagatattttgatacagatgtgcaatgtgaaataaacacatcatagagattggggtatcccttccctcaagcatttgtyttttgagttacaaataatcttatggcaccctttcacttattttaaaatgtactttaaaaacattttaaaactatttttttcctttacagatagctgcattgtatctgtcatgatgccctgacattacacacatagtgagtgtctggtgatattgatggaatgagctattatgagactaagtgggtgggtttgggt

SEQ ID NO: 624522 - DNA, 512 bp, Homo sapiens
ttgttttttgagttacaaataatcttatggcaccctttcacttattttaaaatgtactttaaaaacattttaaaactatttttttcctttacagatagctgcattgtatctgtcatgatgccctgacattacacacatagtgagtgtctggtgatattgatggaatgagctattatgagactaagtgggtgggtttgggtttcactcacattttggtctcttaaccaggcttgttgaagattgtgaagctggggtggaggagaaagtctggtcacttgttgttggtccaatccttcctcagtctctgtcttcaagtgtgagcrtgggctgtctcttccttctttgcaactgggtgttgtcatctactttttctggatcaagggactctagaacaaccctacccctggagaacaggtcccagtcagcgcagctggggaggggaggcagagtctgctcatcccagggccctcagataccctcactgttctagtgtgggtgtccctggccccatg

SEQ ID NO: 624523 - DNA, 423 bp, Homo sapiens
ggtcccagtcagcgcagctggggaggggaggcagagtctgctcatcccagggccctcagataccctcactgttctagtgtgggtgtccctggccccatgtacctgcyctgggctctcctctccacctgggccctgggagccccttgccacaggtgtagaagcctgagacaccgggaaggacatgttccccagggtggccctattccaatggccaacagctggagagggagacctgcccagttccctcatcttgagctgtaacaacctcttgaggtataacttccactccaaacttccttgtatgatctgctgatattggggctgtgcctgagagggcaccatgctggaccagcactccttcctaccctgcttcccctctccacctttatttccagaccacattctcctgaaagcacacagacc

SEQ ID NO: 624524 - DNA, 408 bp, Homo sapiens
cagctggggaggggaggcagagtctgctcatcccagggccctcagataccctcactgttctagtgtgggtgtccctggccccatgtacctgccctgggctctcctctccacctgggccctgggagccccttgccacaggtgtagaagcctgagacaccrggaaggacatgttccccagggtggccctattccaatggccaacagctggagagggagacctgcccagttccctcatcttgagctgtaacaacctcttgaggtataacttccactccaaacttccttgtatgatctgctgatattggggctgtgcctgagagggcaccatgctggaccagcactccttcctaccctgcttcccctctccacctttatttccagaccacattctcctgaaagcacacagac

SEQ ID NO: 624525 - DNA, 504 bp, Homo sapiens
gggctctctattctatttgtctatatgtctgtctttatgccagtaccacattattttgatgactgtagctttgtaataggttttgaaaacaggaaatgtaagtcctccagctttctcttatttttcaagattattttggctattcagggtccctakagattccattttaattttaggatggggttttctatttctgcagaaagcatcatctagacgctgatagggattatgttgaatctgtaggtcactttgggtagtactgacatcttaacaatgttaagacttcaaatccataaatacgagatgtgttccatttacaattgactcttgaacaacattagagttggggtgctgacctcctatgcagtcaaaaatccatgcataactttttacttcccaaagacttagccactaatacccaactactgagtggaagccttactgataacataaacattcaacgaacacaaattttgtaggtggtatgcattatgcattcttaca

SEQ ID NO: 624526 - DNA, 504 bp, Homo sapiens
gggctctctattctatttgtctatatgtctgtctttatgccagtaccacattattttgatgactgtagctttgtaataggttttgaaaacaggaaatgtaagtcctccagctttctcttatttttcaagattattttggctattcagggtccctagagattccattttaattttaggatggggttttctatttctgcagaaagcatcatctagacgctgatagggattatgttgaatctgtaggtcactttgggtagtactgacatcttaacaatgttaagacttcaaatccataaatacgagatgtgttccatttacaattgactcttgaacaacattakagttggggtgctgacctcctatgcagtcaaaaatccatgcataactttttacttcccaaagacttagccactaatacccaactactgagtggaagccttactgataacataaacattcaacgaacacaaattttgtaggtggtatgcattatgcattcttaca

SEQ ID NO: 624527 - DNA, 537 bp, Homo sapiens
aaaaaagtaaaatttaaaaatcccaagataaatgataattgaaaacaaagtgaggtcattacatagcaaatagaattatttcactgactatcctttatcaacacattcaaagcacaagtagtgatgcaaagcaatcttaaattttgtttgaaagtcttattacattttaaaagtcttmtataaaaaataagcaagttcattaattatgtgtatattgctaaggtgtcagatttttagtgtaaaaagagagataccattataaaaccaaagaaataaaatccatataaaggtaagtttgaacggggaatgtcagtacgatctcatgatatctttgtgttttgaataaatgcaggtgctggtggtgctcactaaaaatgcccagaagcaaaaagtgttcttggcacccagactggcgtctccaaatttcattcatcatgaaaacgaaccagggaactctggggataaaaatattctgattccaggcctgagtaggaaatatacaaggtgtgcttgcctaaaacatcttgttccccaaaa

SEQ ID NO: 624528 - DNA, 305 bp, Homo sapiens
ctgggagagcttggggcatcttttcacatggcacaaatgggtagtgtcctctttgctggcaacatgatatgacactattcattctgcatggtcagcactgaacaatcacaggctccctagctaatggtccaagtgcccagaaatcaaagtatagsatattgatttatttttatgcacctatttggagtaggataatgtatactgtaaatggaaaataaatctcaggaccccaaaatctctaagtcacagggaaaagtcaagctgggaactgtgtcaggcaaagtttcctcctattttattcctaa

SEQ ID NO: 624529 - DNA, 422 bp, Homo sapiens
agggcctataaaacagtaacacaatggaaaaaaacccaggtattaaggcaacaactaacatgatgaatagaacagtacctcacatcttaataccaacgttgaatgtaaatggcttaaatgctccatttaaaagatacagaatggcaaaatgaataaaaatccaccaaccaagtacctgctgtcttcaagagactcaccaaacacgtaaggactcacataaacttaaggtagtggagtggaaaaagatatttcacacatatggaaacccaaaatgagcagragtagctattcttatgtcagatgaaagagactttaaagcaacaacagtaaaagaagacaaagagggacattatataatggaaaaaggaatagtccacaggaaaataccacaattctaagtatatatgcacctaacactggag

SEQ ID NO: 624530 - DNA, 553 bp, Homo sapiens
gtattttatttcccaagttgttataattagtgctttcactcgttgacaacacttagtaaatttttttgtatacccatggacatttcaactctatacaaaactgctttcattgtaaccatagagaacctaggaactgtccatcatcttttcttgtcctgttcatctgctctaaaaatgtctatctttattattggcagcaacacaactttggtcattgtccccaacaaaagtggcactaccctggcctgaccagaggttagacccacctagcagtgtactgcagccttgtggcactttccatgacaaccactctggaggacaaggagtcygggtgctgccatggtctcgaccactatctccaggaagtcatcttccaacacttactagttgatacacacatcactacatcacacttattaagcagtattacgaagtgctattaagtgttattagcactattagtgttactaagcgctgtgagagcaaaccctagccaaacactttcagagctgttcctcacaggtttggtctatttaacaagccaagctcatcg

SEQ ID NO: 624531 - DNA, 580 bp, Homo sapiens
gaggcacatttattttacttaggtcactgttcgatgggagaccatatcctgtacccctctgccaggggtgatgtattatctggctcaaccatgtgtctggagttgggcctcagcagaaataacctgcagctattcctcttaaaagttatgtgactttgggcagttagttttcaaccctgtgcctgtttctttatctgcccaatagggataaaaatcctttacttgctcatctggtgactgatttttataaagaactgacgtcctcggcccaaggactaccccagctccagcactccccataggaatagctaagacttttattgcaacatctttgtaatccagcttcttctctgcctaatcttgcattctttacccctcaaagatattgttgccaagaacccttcccaacacrcccactgtacacaaatctcagtgtatcagagtctgattcctgggaacccaaactataacaccccttttcaggaaaaatggacaaaatatctattcatagaggcttgtaatgctaaacatatcttctagaggtcatgcaaatcaggttaaacaacaagaaaaccttggt

SEQ ID NO: 624532 - DNA, 580 bp, Homo sapiens
gttttcaaccctgtgcctgtttctttatctgcccaatagggataaaaatcctttacttgctcatctggtgactgatttttataaagaactgacgtcctcggcccaaggactaccccagctccagcactccccataggaatagctaagacttttattgcaacatctttgtaatccagcttcttctctgcctaatcttgcattctttacccctcaaagatattgttgccaagaacccttcccaacacacccactgtacacaaatctcagtgtatcagagtctgattcctgggaacccaaactataacaccccttttcaggaaaaatggacaaaatatctattcatagaggcttgtaatgctaaacatatcttctagaggtcatgcaaatcaggttaaacaacaagaaaaccttggtgatctagtttctaactcyttcaacaccttctgttctggaagcttaattagagcaacttaactcaagagggtaagacagtttaccatgaattggtggtcctcactcccagaagcaattccaagcatttactcttttctctagatttgcctttccttcccatgtcagt

SEQ ID NO: 624533 - DNA, 453 bp, Homo sapiens
cctctttttattcctggcattcaaatgatgctggtaaatcctcagcacagcctgagtgaggataggttgggccagccaagggaggagacagactatacatcaaaggagttgcaggatctggattatagagatcagcaagggtggaaaagtatgcatgggycttgttcttgagggttctggcttagggagcagtggagtatacagttggataagggggagttattcatacaggagcactctcccataatacaggattaaacaccctggcaaggactctgggtacagtgcttatatgctgctaggatggctctttaagcttggaaaatgtgatggtccatattaagtcaagttgagacagaactttcctgccacatggtggaggaaggaatcaaaagtctcagagtatcagatgtgctagagtggatatataatgtaaggccaaaaacccctcag

SEQ ID NO: 624534 - DNA, 558 bp, Homo sapiens
aacacttaccttcttcagtcactatccagaaaagtattgcagcacattgttgtcatatgtatcaaagtcttattgctgttactaaattttaccactctttaatcattagaaatactatcaatgtatactcaaaagtagtcaaaacaacgatctgataacactgaaagtgaaaacataaaacaagcacaattgtacacacaaaaaaattgtaacagaaatgagtagataacctggcctgtaaggagtaatattttcatcctctaaatttgcatatgataaaattaggagttgcctgcatttggaagcaaattgttacggaacatcaagaaaattggtaagaatacttacatttttatatayacatatataaatatgaatagaagatagatggatctatagagagacagattgatattgcttggctgtgtcgccacgcaaatctcatcttgaattgtaactctcacaattcccatgtgtcatgggaggtgattgaattatgggggcgggtctttcctacattgttcttgtgatagtaaatgagtctcatgagatctgatg

SEQ ID NO: 624535 - DNA, 389 bp, Homo sapiens
gagagatggaaaccataattaagagtcaaaaattggccggacataggggctcacacctgtaatcccagcactgtgggaggctgaggtgggtggatcacctgaggtcaggagttcaagaccagcctggccaacatggtgaaaacccgtctctactaaaaatacaaaaaattagcccggcgtggtggcacacgtctgtaatcccagctactcaggaggctgaggcaggagagtcgcttgaacctgggaggcagaggttgtagtgagctgagattgcgttgttgcamtccagcctgggcaacaagaatgaggctccatctcaaaacaaacaaacaaaaaagttacacactctattttcattcttctggttattttcccaaatccttaagacc

SEQ ID NO: 624536 - DNA, 556 bp, Homo sapiens
ggggttttttcgcttcagtgtactgcttttctccagtagactttgtctcatgtgttgctctattttcagcatttagaacaatgtttggcacacagtgggtcctcaataaacaaaggttaaatgtaagaatgaatgctcaccatcgtcattcaaagaagaatcgagacctcatggatgggcgaataatcactgtgtctgcgctgtgctcagrgaatgagccagtcaccctctggtctagcagactgccaccatgcttgtctctcttggagggtgctcagcagctttggatttgaaatgacattgcaaagatcctctcctgaaatcacatgggttgcatagctaggaagggatgctgccctttgtccaaatccctaaggccctttgtccaaatcccaagggccttttgtctaggggagtgtatcagtaggttcctcctacatgtgaatgggaggtctgtgttggtcagttggaagttgggcccctaaactgggaaagacaggcacttggaaggtttccagaggttagaagttgacttcatacccttggcataggagca

SEQ ID NO: 624537 - DNA, 580 bp, Homo sapiens
cccactactgggaatgtattcaaaggaaaagaaatcagtatatcaaaggaatacctgcacctccatgtttatttcagcactattcagaatagccaagatacagaatcgacctaagtgtccatgaataaataaagaaaatatggtatatatacaatggaatactattcagccataaaaagaataaaagcatgtaatttgcagtaacacggatggaactggaggacattatgttaagagaaataaaccaggcacagaaagacagttattgcatgttctcactgcatatgtgggaactaaaagttgatctcatggaggtagagattagaatgatggttaccagaggctgggaaaaggtagaggtatgaaaagaggttggttaatggatraaaacatacagttagagagaaggaataagttctagtgtttgatagcacagtggggtgactatagttactaataacttattgtctatttcaaaacatctaccagagaagatttgaaatgttcccaacacaaaaaaatgataaatattcgaagtgatggatattttaaacaccctgacttgatcattacacattat

SEQ ID NO: 624538 - DNA, 482 bp, Homo sapiens
cttggccaggtgcagtggctcatgcctgtaatccgagcactttgggaggctgaggcgggctgatcacctgaggtcaggagttcgagaccagcctgrccaacatggtgaaaccccatctctactaaaaatacaaaaattagtctggtgtggtggcaggtgcctgtaataccagctaccatggaggctgaggcatgagaatcacttgaacctgggaggcagaggctgcagtgagctgagatggtgccactgcactccagcctgggtgacagagcgagactctgtctccaaaaaaaaaaaaaaaagaatattatttttacttaatatgcagggtggtcagcaactgcaggattaggaaactctgcccctgttgctctggggcaggatggtgtgtcgacccagctgtatctactcacagagcatctgctcagtgatgtcaagttagttctcagcaccaaccttgggtgaaagagatatttttaaat

SEQ ID NO: 624539 - DNA, 482 bp, Homo sapiens
cttggccaggtgcagtggctcatgcctgtaatccgagcactttgggaggctgaggcgggctgatcacctgaggtcaggagttcgagaccagcctgaccaacatggtgaaaccycatctctactaaaaatacaaaaattagtctggtgtggtggcaggtgcctgtaataccagctaccatggaggctgaggcatgagaatcacttgaacctgggaggcagaggctgcagtgagctgagatggtgccactgcactccagcctgggtgacagagcgagactctgtctccaaaaaaaaaaaaaaaagaatattatttttacttaatatgcagggtggtcagcaactgcaggattaggaaactctgcccctgttgctctggggcaggatggtgtgtcgacccagctgtatctactcacagagcatctgctcagtgatgtcaagttagttctcagcaccaaccttgggtgaaagagatatttttaaat

SEQ ID NO: 624540 - DNA, 532 bp, Homo sapiens
atagttgagctcaagccagctgatctattccagagctcccctttttcaccactgtcatgagaagcctaaaataggccaataattcagctgctaattcagtggagccattaccttattccccttgatgattcctcctttgattctaaatcctctrtatcagtggagccctgagttatggagaacgtaagcaaaatttcccacgtggaagtgggcataactccagcttccatcctcttgattcacatatgagtatattcttgctgtggcagaaatggcaccagagattgaccacttgttcaaaaaataaacttcacccccacactgtaaactcacctgcctttctttctaataagacaccataatggggcctttgaagggcagttccattcctctgttgtaggcagtgtggttatgggtagtagcggttatgagtagcagcagttacaagcacaagctctggagctggactgtctgggttcaagtctcagaccccacttactgagtgacaagagtcagtctattaaccatactt

SEQ ID NO: 624541 - DNA, 513 bp, Homo sapiens
ggcacataagcacatgtaagctactgccaatattttatattatttaagaaagttaagtgatgcagaaggggcacataagcacatgtgagctactgccaatattttatattatttaagaaagttaagtcaawaaattaaaaatgacagtattttatgagaaaaaaggattatgattaatgtaattctgtgactataaggcccaaaatgcatttattttctctcctatgctcctatacgtttatctctaattgttagtgattgagctattgatggacaagaaattgcctctgtgtcactgattaaataataagttggttagggtttgtctcaatctggtaacctggaatttggatgtcctgttatagaatcttaaatggagtattcaaactccaagtgctcaaataggagaaagagaggacagttgatgtacatgaaccttctccaaggagtattcggttatctccttctcagacaagctaggagcctagagttcagagctctaggaatgaagat

SEQ ID NO: 624542 - DNA, 555 bp, Homo sapiens
gtaagttttcaaaagtactgctacaactggtggtagtctcttctattcctttaaagaaagcaaacaaataaaaaatgataaaaaccctcaccatttacgatataatcaataacaataaataaaaatatatactagataaaataataaatagagaagtacagtgaaaataggaattgttgggattcagaaaatgataactcaaagtatggcactttggcatgctgagtactttgaacaaaaggtgattgaaaatcccttaaaagcaaagtctctctctgaacttctcatgccctcctttctccttgctcccttttctcccccaagggcaagccatagaaactagaatttctcttccccaaggtggatcatagaaactagaacccctctctccaaagccagccataaaacctagaaatagtattctaacattctcccatttttctgtgtaagagctgaccawacagaaattctctgacctactctgtctgcaagtagattataagaccctcattctaaaaggggtcttgcactatccctggaaaaaggaatgccaca

SEQ ID NO: 624543 - DNA, 520 bp, Homo sapiens
acataggaaggccttgcctctacaaacatttaaaaaatttagtcaggcatrttggcatgcacccatagtcccagctacttggaagggtgaagtgggaggatcacttgatcctgggaagttgaggctgcagtgagctatgatagtaccactgcactccaggtgaggcaacaaagtgagactgtgtcttgatgataataataaaataaaataaatgtaataattttggcaaataattgaaggcaattaaatgtccaacaatagggaacttagtgagtgaattaaggttcatcattagcggcaatactatgcatttgttaaaaaatcatattatagaagaagatttatttgagaaatacttataagaccaataagtagaaagtcatttccaaaataatatgtacagtattttactatgtattaaatacatatatatatatatagagagagagagagagagagacggaaaaaaaagactggaaggacatataaatagtggttatctctaggttaggaccgatag

SEQ ID NO: 624544 - DNA, 520 bp, Homo sapiens
acataggaaggccttgcctctacaaacatttaaaaaatttagtcaggcatattggcatgcacccatagtcccagctacttggaagggtgaagtgggaggatcacttgatcctgggaagttgaggctgcagtgagctatgatagtaccactgcaytccaggtgaggcaacaaagtgagactgtgtcttgatgataataataaaataaaataaatgtaataattttggcaaataattgaaggcaattaaatgtccaacaatagggaacttagtgagtgaattaaggttcatcattagcggcaatactatgcatttgttaaaaaatcatattatagaagaagatttatttgagaaatacttataagaccaataagtagaaagtcatttccaaaataatatgtacagtattttactatgtattaaatacatatatatatatatagagagagagagagagagagacggaaaaaaaagactggaaggacatataaatagtggttatctctaggttaggaccgatag

SEQ ID NO: 624545 - DNA, 420 bp, Homo sapiens
ggtcttgctgacttcaagaatgaagccgctgacctcgcggtgagtgttacagctcttaaaggtggcgcgtccggagttgtttgttccggagttgtttgctcctccctgtgggttctggtctctctgacttcaggaatgaagctgcggtccttcacggtaagtgttacagctcataaaggtagtgcagacccaaagagggagcagcagcaagatttactgtgaagagcgaaagaacaaagcttccacagcatggaaggggaccggaggagtttgccgctgctgtctggggtgcccagcttttattcccttatttggcctcacccacatcctgctgattggtccattttacagagtgctgatccgtgcrtttacaatcctttagctaaatacagagtgctgattggtgcatttttacagagt

SEQ ID NO: 624546 - DNA, 600 bp, Homo sapiens
ttgggacccaggtcatgatttaattctgggkcctgtgctttggaagaatccactaaactgtgctgtgattcttgggggtagctagaaagaaaagaggatgcttcaacctgatactcaacagcagccaagtctcttatatgcaattccccaaaattcctttcccaaatacaaagcctggccatctgctgccatgttgatggagcaggggctgcccagaaaggatgtcctgtctcttccacacacacccctcaagccccacataatgactcctcctcattgcaaagttctcctcaagcctgcactcaccattcctgatgcttctgctctcggtttcctggaccaaagccagccttgactttaccagtataaagagatacagggagaggggtagaggccaggaaacatactctacaccttgaattcttcagcaaagcaaaaactggagtagacaacaatctaagcttctcagaaacctgaaacctatgctaatcaatatctaggaaatggttagttttaccttgaagcccaatgctttattccacatagcatttaaaataattccttttcccctttataggaaatactttttccccataaaga

SEQ ID NO: 624547 - DNA, 657 bp, Homo sapiens
ggaccactgcactccagcatgggtgacagaaggggaccctgtctcaagaaactaaattaattaagcaggcaaaacaaggtgaccaaaaggatctatctgttcaaaggcctagaaccaaaaagagaatattagctacttcracaggaatgtggctatcaggggagacatggtgtaagagcagcacaccaaaggtgagattttgaaggacagaatatgtaggattttgtaagctgagttgaaatctttgggactgattctccttgtgataggaagccatgggagtgttttcagcatgtgaacccaggctacctctggtactggaagtgatttcagaggaacagaatctcaaccgatgggtctctcaattggtgacaattccatgtcaatctcactggagtcctctggggctgtcattagaaagctgcttgatgaattttagtcgctagaagatcctgtgtcaccctctgagctgatgaatggcacaaagaatgagccaggtggaggctgagctttgggattatctctgtttcactcagctgggcattttcctcctgggcactcatgtttacagtgaatttggaggacagaaactagtgattagctgtgtctgtgctggaaatgttcagtacattggacaagttgttcttcctgaagcat

SEQ ID NO: 624548 - DNA, 406 bp, Homo sapiens
gttattatcaattatagttatttggcttattcagaatactacagaaaaggagctagatcctggaacgtcttggaagccatggaaaggatgatggagagaatcgaagttagttgtagggagcaaggtttttcctaggagaaactgtccaaaaatgtgccaccctgagtacctctgtcttaatcagttttatattgctgtgaaggaayacctgagactggggaatttgtgaaaaagagattgacttggtttacagttctgcgggctgtacaagaaacaggtgccagcatctgctcctggtgaaggccccaggctgctttcactcatcgtggaaggtgaacaggagccagagctggcttgtgcagagatcatatggtgagagaggaagcaagggagagccaggggctgg

SEQ ID NO: 624549 - DNA, 566 bp, Homo sapiens
ttcaaggctcaggaagggaatttgcacaatgaaaataacttaagaactgtgaaacttaaccagttttttaaacttataccctgttaccattatttatttgaagtgttgttttaaagaaaacaaaaaatttgtgaagttctttgctttctagggaatgttggtcattcaaatttctgcaaaaacagcagaaatgtctctgagctagaggaccaactgaaagcagaagcgataatcctgtcttcatgctgatttagatgttgacagaaagctgagtgtgaaattctgcagcacatcacgaagatgaaaaatcatttaagtttgctgagccctaataatgaaaacttggaaaaccaccccatagaggacagtgatactactcaccaaaaataattgctccaaatttatcaagctgctgtcatgccaatttatatatttttaattcccttagtttcttaggcccaaacatgacaatttaaagactttccatctsaattgtacagacaaccatagagaggtctgtgattgtatatgaaatggttcatgattttacatcacgagattagaac

SEQ ID NO: 624550 - DNA, 533 bp, Homo sapiens
aggctacttgggaggctgaggcaggaggatggcttgagcccagaaggttaagcctgcagtgagccatgattgcaccactgcactctagcctgagcctgggcaacagagtgagatcctgtctccaaaaaaaaagtaacctccaatatttgcacaggtccttatggttcatacttagtccccacaagaacgcttaggtagtacatatccccattttatacmtaagaaagctggcttaggcacacgctgccagaatttggaagcagtcagcagagcagtcctagggagtgctaggtctgagcgggactggaccctttatctccctctgctttcctctctgccctggccagagaagagcaccaaacacatgctgtcaatcctcactctgtctccacagggacgccaaacgtcctgtgctactaacagactttccacatgtggaactccttatggttcacagcagttgggagacaacgactctgttgatcaaccaactgctctgctgctggtcttaacaagcaatgataaaaaagacc

SEQ ID NO: 624551 - DNA, 505 bp, Homo sapiens
ctgtggcacttcacgcattgcaggtgggagagyaaaatgctgcaacctctgtggaggggaatttagcaacaattaccagaattacatacatatttatcctttgatgcagcttctaggaagccccctaaaatacatctctgccagtacaaaacaagtttgctcgactccattaattgcagaattatttgaaatagcaaaggattggaaatacaaatgcctatcagtgaggcataagcaaatactaaggcactagtacacaatggagtcctcagccacatgaaaagaatgaggaagagttgggtaaacagagtgttctccaggatacaccgctaagtggaaaaaggtgggaaacagtgatacggtgtgctgtatttgcatatgaaagcagagaaaataagcatgtaaatatgcacatataaatatattacttatgcatgcatatatgaatatgtttctatgtatatgttgtggttcttttgtagaaagaaacactggaagaataaac

SEQ ID NO: 624552 - DNA, 505 bp, Homo sapiens
ctgtggcacttcacgcattgcaggtgggagagcaaaatgctgcaacctctgtggaggggaatttagcaacaattaccagaattacatacatatttatcctttgatgcagcttctaggaagccccctaaaatacatctctgccagtacaaaacaagtttgctcgactccattaattgcagaattatttgaaatagcaaaggattggaaatacaaatgcctatcagtgaggcataagcaaatactaaggcactagtacacaatggagtcctcagccacatgaaaagaatgaggaagagttgggtaaacagagtgttctccaggatacaccgctaagtggaaaaaggtgggaaacagtgatacggtgtgctgtatttgcatatgaaagcagagaaaataagcatgtaaatatgcacayataaatatattacttatgcatgcatatatgaatatgtttctatgtatatgttgtggttcttttgtagaaagaaacactggaagaataaac

SEQ ID NO: 624553 - DNA, 630 bp, Homo sapiens
ctgggctgcagaatgaagaaaaccagctgccttaggcacagattttgctaaacatgctggagaaaaccaacatttttagtgagaagcttggcatatggcatgatagcctcttgggcatcaccagtatcttcagccccagggactcagtgggctggaaggagattaatgccatgtggaggcagacaactytggtgctcagatcctgtccaataatatgggactgacatttcaggggcattgacttgttccctgtggaaatcattcctatttttgaagtctttgacagggaactgcccctgaaccactctggagactcaaaacttttcttcgatatacattttagtgtataatggaggttttcctggatgagtctgagaaagatgaacttggtcattgtctaccctacacaaccaatgaggacagaggaatgactgataagcaaagaagaagagatgggtcctatttcaaaagaaccctgttaagatcatttgttgcttttaattgcttcttatatccctgatcttttattggaatcattctcattgttcccaaaaaacaccttttagcattttatttagtgcagatctgctgatgacaagtattttgtttttgtttgtctgaaaacattaa

SEQ ID NO: 624554 - DNA, 630 bp, Homo sapiens
ctgggctgcagaatgaagaaaaccagctgccttaggcacagattttgctaaacatgctggagaaaaccaacatttttagtgagaagcttggcatatggcatgatagcctcttgggcatcaccagtatcttcagccccagggactcagtgggctggaaggagattaatgccatgtggaggcagacaactttggtgctcagatcctgtccaataatatgggactgacatttcaggggcattgacttgttccctgtggaaatcattcctatttttgaagtctttgacagggaactgcccctgaaccactctggagactcaaaacttttcttcgatatacattttagtgtataatggaggttttcctggatgagtctgagaaagatgarcttggtcattgtctaccctacacaaccaatgaggacagaggaatgactgataagcaaagaagaagagatgggtcctatttcaaaagaaccctgttaagatcatttgttgcttttaattgcttcttatatccctgatcttttattggaatcattctcattgttcccaaaaaacaccttttagcattttatttagtgcagatctgctgatgacaagtattttgtttttgtttgtctgaaaacattaa

SEQ ID NO: 624555 - DNA, 634 bp, Homo sapiens
aggattgcttttggttgtgaatatcagaagccagactaatatagccttaaacacatatggatttatttacttattttttgcttcattcagcatagttcagagtaggcaagtggttcagaggttgaagttayaacaaagtcaacctttctggaattctcttggtctacccctcatggtccctggatggctgccacagtatctatcaacacatctagaattcaggcatggggaaaagagtggtgtctgtatcaggaaatcagactttccagacagtcagagaactcttctgctcatacctcatcggcttgaactgtgtcacagagctattttttttcatcagcaaggtagtctgagaagatggattttttaccacctgtagtcaaacaagaaaaggaaaataaggttgaactgggtttgtttgagccaccctatgttactttttcatggcagatttcttttggaactttagttccccctcgcagtgacaagaactacagcagatagcaaatggctgcaaactcttggcatgagaaattacacctacgaatggttatcttgggacagctaaataaattttccagctgactatgaaatctgaaagtgaaagtaaatatctgtatcagatagtaaataa

SEQ ID NO: 624556 - DNA, 546 bp, Homo sapiens
acagtgtatcaagaaggatggcaccctatctttcggagtgctgtctctgagctggcacttcagcgtgccctcacaaagccattcccaaactctatgaggctggctgcttctgcatgaacactgtgtgatatarcaagtggtcaggggcacaatcccccatatctcatggtgagggaagtgacagagtgtgcagtagcctccatttatcctctttccagatccattttctgttctgtgccttgctctatttcccagaaggtgaagactttgggatatcatcaccaggttggattcaggcaatgggggtgaggcgggtggctgggaggaagaaccacgaaattgaagggaaggtggataaaaagtttcagatttttttttttctgccagtcttccctgctttggtccaacagaggctgtgcccctccatgtgctttcatagttaccattctcactagactccagattcactctttcctcggggtggtaatagcttccctccacatttcccttaagcttgccccggttagatactagtctgtgtggatc

SEQ ID NO: 624557 - DNA, 363 bp, Homo sapiens
cttccttttctgcctggagaaagaacttgtgaaagcatccaccactgtgtagcccgggtatgagaggtgccaactgtttatacatcacatgcccagaaaccacccgaaggttagttcttttcacagaaaggaaaatacaaatttgtgaaccatatccgaaggctgagtaagatgacttggagggcaggtttcagaatgaatttgaaatatacagtcagatygctatttttccatgcctttgtgtgtgtgtgtgtgtgtgtgtgtgtgtgtgtgtgtgtgtgaaagagagagagtgagagagagttaaacgtgtccctactggtgacccagtcaaagagcaattgttgaattcctgcatttcag

SEQ ID NO: 624558 - DNA, 634 bp, Homo sapiens
tcctagtatgagccacaagatttgttttacagacaggcctggtaccatctgcatgcttctagaaccaggttctycaagatgggtccacaatgccgtacaacctctggtctggctttctgttgtgttgttaggggagttggcacaagagtgggtgatgggaggattttttgaggccattcttttaccagaacagttagcaataacttggaagtgatatctcaaactaaatgattctcaaataaagtttctcttggctggattccaaaaatgcccacggccccaacaccaatagacaggtgggaaagtgtgattagggttgggttgggtggggtctcaaagtcatggtggactatagttgatcttgtgaaaatagttcacttctgcaaattttataatatgtgacatggaaagggcccatgcaagcttaaccctcattgcagcctcatagtaaatctacttctgataataaaacacatcacattggcacttggcaatctactcacctagagtgaagtattatgccaatcacaaaatagagccacagagctggctctaatacaagctgggcaaatggtggccattttctttgtgagaggccacgtgacttctgaattccacaacacaaaggctgcag

SEQ ID NO: 624559 - DNA, 549 bp, Homo sapiens
gcccatgcaagcttaaccctcattgcagcctcatagtaaatctacttctgataataaaacacatcacattggcacttggcaatctactcacctagagtgaagtattatgccaatcacaaaatagagccacagagctggctctaatacaagctgggcaaatggtggccattttctttgtgagaggccacgtgacttctgaattccacaacacaaaggctgcaggctgcccttctgtgtttttaggtgcatgtttccacttaggtaataaagcagacagcgatggcatgatggrcaatgatacttactgcagattaagatggatgaaaagagtctactccccttatttgaggtaaaggccacttccgatttactcctagaaaagtgcctgcacatttaaaataaagagtattttctagaaatcaaagtcttgttttgaaaagaaatattttactcactgctctatagggctggaattataacaaccatggattatatgtggaaaatgagttaattttgcaacgcacacttcgtgtcatctagataccaggt

SEQ ID NO: 624560 - DNA, 562 bp, Homo sapiens
gcctagtcagtctcaatgtgagaacctggatatttcagttgaaggtgctgaattcactcatcccttttcattcccctctgtgagtgctgcagaccacacctgcttttgatcagtcatcttgtttgttccaaaaatatctttaaattagatcaggccaagtgtggtggctcacacttgtaatcacagcaatttgagaggccaaggcaggcagatcacttgagsccaggagtttgagaccagcctgagaaacatgatgaaaccttcctataaaaaatacaaaaattagccgggcatggtggtacatgcctatagtctcagctactcaggaggctgaggattacttgagcctgggaggttgaggatgcagtgagccgagatcatgacactgcactgcagcttgggtgacaaagcgagtttctgtctcaaaagaaattaaatcaaattaaattggaacttttagcatcttttgcttcctctttaatcaccaaaattcctctctctaaggaataagacataaaaattgctgctctaactttgtctagggggagaaaagggccaagaa

SEQ ID NO: 624561 - DNA, 624 bp, Homo sapiens
gtcacaatccccgtggcactggagaatagaaatatctctattagcaccaccrataggaccctgtggaaaggaagcccaaagtggaagccagcaattgagtgcagtgacacctgccagtttctggtgcgtggtaagggcagtatataaagataaagctcctccctgagaaaaccctcccaaaataattctgttagaaggaatgccattcttcacttcttgatcaatcaaagcttttatattttgtgctgcctgtttaatcccagattcatcctcctgtgaatctggtgaaagcccaataatatcaaaccatgaaggcatagctatgttcatatttaatgttaacaggcctaacaggcgcatgcgggcagatatatttgatatgtgaacttatgataccggcaaaggcttctgcccatccgtgcccagtatctcccaatccatgcaggaaaatcacctcagtggtggccttccggggggcgggcacgatggtgggcagcggggttgacatgttattgccgcacatacaccgcctcagctcacagcgcaagcggaaggaagagcaggcgccccgccgctgcccaagggcgtgcgagcggcgagtcccagccggccccaccggcgaga

SEQ ID NO: 624562 - DNA, 624 bp, Homo sapiens
gtcacaatccccgtggcactggagaatagaaatatctctattagcaccaccgataggaccctgtggaaaggaagcccaaagtggaagccagcaattgagtgcagtgacacctgccagtttctggtgcgtggtaagggcagtatataaagataaagctcctccctgagaaaaccctcccaaaataattctgttagaaggaatgccattcttcacttcttgatcaatcaaagcttttatattttgtgctgcctgtttaatcccagattcatcctcctgtgaatctggtgaaagcccaataatatcaaaccatgaaggcatagctatgttcatatttaatgttaacaggcctaacaggcgcatgcgggcagatatatttgatatgtgaacttatgataccggcaaaggcttctgcccatccgtgcccagtatctcccaatccatgcaggaaaatcacctcagyggtggccttccggggggcgggcacgatggtgggcagcggggttgacatgttattgccgcacatacaccgcctcagctcacagcgcaagcggaaggaagagcaggcgccccgccgctgcccaagggcgtgcgagcggcgagtcccagccggccccaccggcgaga

SEQ ID NO: 624563 - DNA, 624 bp, Homo sapiens
gtcacaatccccgtggcactggagaatagaaatatctctattagcaccaccgataggaccctgtggaaaggaagcccaaagtggaagccagcaattgagtgcagtgacacctgccagtttctggtgcgtggtaagggcagtatataaagataaagctcctccctgagaaaaccctcccaaaataattctgttagaaggaatgccattcttcacttcttgatcaatcaaagcttttatattttgtgctgcctgtttaatcccagattcatcctcctgtgaatctggtgaaagcccaataatatcaaaccatgaaggcatagctatgttcatatttaatgttaacaggcctaacaggcgcatgcgggcagatatatttgatatgtgaacttatgataccggcaaaggcttctgcccatccgtgcccagtatctcccaatccatgcaggaaaatcacctcagtggtggccttccgggsggcgggcacgatggtgggcagcggggttgacatgttattgccgcacatacaccgcctcagctcacagcgcaagcggaaggaagagcaggcgccccgccgctgcccaagggcgtgcgagcggcgagtcccagccggccccaccggcgaga

SEQ ID NO: 624564 - DNA, 624 bp, Homo sapiens
gtcacaatccccgtggcactggagaatagaaatatctctattagcaccaccgataggaccctgtggaaaggaagcccaaagtggaagccagcaattgagtgcagtgacacctgccagtttctggtgcgtggtaagggcagtatataaagataaagctcctccctgagaaaaccctcccaaaataattctgttagaaggaatgccattcttcacttcttgatcaatcaaagcttttatattttgtgctgcctgtttaatcccagattcatcctcctgtgaatctggtgaaagcccaataatatcaaaccatgaaggcatagctatgttcatatttaatgttaacaggcctaacaggcgcatgcgggcagatatatttgatatgtgaacttatgataccggcaaaggcttctgcccatccgtgcccagtatctcccaatccatgcaggaaaatcacctcagtggtggccttccggggggcgggcacgatggygggcagcggggttgacatgttattgccgcacatacaccgcctcagctcacagcgcaagcggaaggaagagcaggcgccccgccgctgcccaagggcgtgcgagcggcgagtcccagccggccccaccggcgaga

SEQ ID NO: 624565 - DNA, 612 bp, Homo sapiens
ggccctcactattcaagaaattcactttggggaaaaggttatgcagtattaagggcacaggttttggaatcaaaagatctaggttataaccctagtccttttctttacaaatagtgttaatcttctcaaatgcaaattagaatataaataatcatatggttttaagaactcaaagggtaatggctagtatctattaaacactttctatgcaccagttactccatctggattacatcaatgtttctcaaattttaatgtacacacaagtcactgagacatcttattaaaatgcagatgaggtcgggcgtggtagcacatgcgtatmatcccagcaattcaagaggccatggcagatggatcacttgaggccaggagcttaagaccagtctggccaacatggtgaaatgaaaaattagctgagtgtggtggtgcacgcttataatcccagcgatcccagtggctgaggcaggagaatcgcttgaacccacgaggcggaggttgcagtgagccgagattgcaccactgcactccagcctgggcgacagagcgagaccctgtctcagaaaacaaaaacaaaaaaacaaacaacaacaacaacaaaaacaaatgcag

SEQ ID NO: 624566 - DNA, 634 bp, Homo sapiens
actttcttacaagctttcagagagaaagaactaagtattttaaaaggtaaaatcagactggcattaatctcctcatgcaaaattggaagttagatcaggcagaacaaaaagagaacaaaaactgtgtgccccaaaggttccatacacagtcttttcctatgagacaacatttccctattagactgagagaaagataattgtgcayttgctagtttttgatatcacccacatatctgaagaaaaacgtctaagaatgatgtcaagaagcaaatgtatcagaacacagatctcaggatagaaaagaatgaggaagaaaagaaaaaatagtgagaaattctcattcacagagcttatttccagaatattaaggtggctcaatatcaggactctatcaacattatcacttacgttaacgaattaaaggataaatgtgtcatagatgcagaaaagttatctttggtaaaattcagcagctatttatttaaatactaaggaaaattgttatatgaaagcagaggtaaaatatgcaaataccatttaccaattaccagcagtgaatatcattcaaaactgtgtaatactaacccattaaaattaaaattaattaattaaaataaattaattaaaatcaata

SEQ ID NO: 624567 - DNA, 634 bp, Homo sapiens
actttcttacaagctttcagagagaaagaactaagtattttaaaaggtaaaatcagactggcattaatctcctcatgcaaaattggaagttagatcaggcagaacaaaaagagaacaaaaactgtgtgccccaaaggttccatacacagtcttttcctatgagacaacatttccctattagactgagagaaagataattgtgcacttgctagtttttgatatcacccacatatctgaagaaaaacstctaagaatgatgtcaagaagcaaatgtatcagaacacagatctcaggatagaaaagaatgaggaagaaaagaaaaaatagtgagaaattctcattcacagagcttatttccagaatattaaggtggctcaatatcaggactctatcaacattatcacttacgttaacgaattaaaggataaatgtgtcatagatgcagaaaagttatctttggtaaaattcagcagctatttatttaaatactaaggaaaattgttatatgaaagcagaggtaaaatatgcaaataccatttaccaattaccagcagtgaatatcattcaaaactgtgtaatactaacccattaaaattaaaattaattaattaaaataaattaattaaaatcaata

SEQ ID NO: 624568 - DNA, 634 bp, Homo sapiens
actttcttacaagctttcagagagaaagaactaagtattttaaaaggtaaaatcagactggcattaatctcctcatgcaaaattggaagttagatcaggcagaacaaaaagagaacaaaaactgtgtgccccaaaggttccatacacagtcttttcctatgagacaacatttccctattagactgagagaaagataattgtgcacttgctagtttttgatatcacccacatatctgaagaaaaacgtctaagaatgatgtcaagaagcaaatgtatcagaacacagatctcaggatagaaaagaatgaggaagaaaagaaaaaatagtgagaaattctcattcayagagcttatttccagaatattaaggtggctcaatatcaggactctatcaacattatcacttacgttaacgaattaaaggataaatgtgtcatagatgcagaaaagttatctttggtaaaattcagcagctatttatttaaatactaaggaaaattgttatatgaaagcagaggtaaaatatgcaaataccatttaccaattaccagcagtgaatatcattcaaaactgtgtaatactaacccattaaaattaaaattaattaattaaaataaattaattaaaatcaata

SEQ ID NO: 624569 - DNA, 563 bp, Homo sapiens
ttccatggtgcatatgtaccacattttctttatccaatctatcattgatgggcatttaggttgattccatgtctttgctattgtgaatagtactgcagtgaacattcgtgttcgtgtgtctttatggtagaatgatttatattcctttggatatatacccagyaatgggacttctgggttgaatggtatttctgttttgagctctttgaggaattgccacactgctctccacaatggtcacatctatttacattcccagcaacagtgtaaaagtgttctcttttctccacaacctcatcagaatctgttatttttttctttttttatttttttggctttgaaatactcattctgacttgtgtgagatggtatttcattgtggctttgatttgcatttctctaatgatcagtgatattgagcttttttcatttgcttcttggctgcatgtatgtcttcttttgaaaagtctgttcatattcctctgcccacttatttatgtggttgttttttgcttataaacttatttaagttacttatagacgctcaacattagaccgttgtc

SEQ ID NO: 624570 - DNA, 563 bp, Homo sapiens
ttccatggtgcatatgtaccacattttctttatccaatctatcattgatgggcatttaggttgattccatgtctttgctattgtgaatagtactgcagtgaacattcgtgttcgtgtgtctttatggtagaatgatttatattcctttggatatatacccagcaatgggacttctgggttgaatggtatttctgttttgagctctttgaggaattgccacactgctctccacaatggtcamatctatttacattcccagcaacagtgtaaaagtgttctcttttctccacaacctcatcagaatctgttatttttttctttttttatttttttggctttgaaatactcattctgacttgtgtgagatggtatttcattgtggctttgatttgcatttctctaatgatcagtgatattgagcttttttcatttgcttcttggctgcatgtatgtcttcttttgaaaagtctgttcatattcctctgcccacttatttatgtggttgttttttgcttataaacttatttaagttacttatagacgctcaacattagaccgttgtc

SEQ ID NO: 624571 - DNA, 563 bp, Homo sapiens
ttccatggtgcatatgtaccacattttctttatccaatctatcattgatgggcatttaggttgattccatgtctttgctattgtgaatagtactgcagtgaacattcgtgttcgtgtgtctttatggtagaatgatttatattcctttggatatatacccagcaatgggacttctgggttgaatggtatttctgttttgagctctttgaggaattgccacactgctctccacaatggtcacatctatttacattcccagcaacagtgtaaaagtgttctcttttctccacaacctcaycagaatctgttatttttttctttttttatttttttggctttgaaatactcattctgacttgtgtgagatggtatttcattgtggctttgatttgcatttctctaatgatcagtgatattgagcttttttcatttgcttcttggctgcatgtatgtcttcttttgaaaagtctgttcatattcctctgcccacttatttatgtggttgttttttgcttataaacttatttaagttacttatagacgctcaacattagaccgttgtc

SEQ ID NO: 624572 - DNA, 563 bp, Homo sapiens
ttccatggtgcatatgtaccacattttctttatccaatctatcattgatgggcatttaggttgattccatgtctttgctattgtgaatagtactgcagtgaacattcgtgttcgtgtgtctttatggtagaatgatttatattcctttggatatatacccagcaatgggacttctgggttgaatggtatttctgttttgagctctttgaggaattgccacactgctctccacaatggtcacatctatttacattcccagcaacagtgtaaaagtgttctcttttctccacaacctcatcagaatctgttatttttttctttttttatttttttggctttgaaatactcattctgacttgtgtgagatggtatttcattgtggctttgatttgcatttctctaatgatcagtgatattgagcttttttcatttgcttcttggctgcatstatgtcttcttttgaaaagtctgttcatattcctctgcccacttatttatgtggttgttttttgcttataaacttatttaagttacttatagacgctcaacattagaccgttgtc

SEQ ID NO: 624573 - DNA, 558 bp, Homo sapiens
aaactcttctaccttatgttcaaatctctttttgtcttcagcaagaatcctgggttgcaaggacaatggggatgattgaatgttttgtccatgtcacacaaaacattctcaaaataacactatcaaaactactaccagtataattactgaaaaactgtttcaaatgtttttacatgatattctcattctctccttgttttcttttaattatgctgtatctatattgtcagagcatagagccattaccacactctgttcttatgtccttcctttgttcttcacgtaaatatatgctcaaygcccaccatccatctttatgtcaatatttctctagtaattttggttgtctgaagctactgtatacccaaggaaggattcacagaagcagtatttttcagttctggcttccaggtgacagcttgctccctttatacttaaaaaaaagtgtggttgaatataaaatcttgggcttactgtttctttcccttcaacattttaaatgtgttactctgttttcttctggtaggagaaattgttattgaaaagcatgataacaat

SEQ ID NO: 624574 - DNA, 558 bp, Homo sapiens
aaactcttctaccttatgttcaaatctctttttgtcttcagcaagaatcctgggttgcaaggacaatggggatgattgaatgttttgtccatgtcacacaaaacattctcaaaataacactatcaaaactactaccagtataattactgaaaaactgtttcaaatgtttttacatgatattctcattctctccttgttttcttttaattatgctgtatctatattgtcagagcatagagccattaccacactctgttcttatgtccttcctttgttcttcacgtaaatatatgctcaacgcccaccatccatctttatgtcaatatttctctagtaattttggttgtctgaagctactgtatacccaaggaaggattcacagaagcagtatttttcagttctggcttccaggtgacagcttgctccctttatacttaaaaraaagtgtggttgaatataaaatcttgggcttactgtttctttcccttcaacattttaaatgtgttactctgttttcttctggtaggagaaattgttattgaaaagcatgataacaat

SEQ ID NO: 624575 - DNA, 558 bp, Homo sapiens
aaactcttctaccttatgttcaaatctctttttgtcttcagcaagaatcctgggttgcaaggacaatggggatgattgaatgttttgtccatgtcacacaaaacattctcaaaataacactatcaaaactactaccagtataattactgaaaaactgtttcaaatgtttttacatgatattctcattctctccttgttttcttttaattatgctgtatctatattgtcagagcatagagccattaccacactctgttcttatgtccttcctttgttcttcacgtaaatatatgctcaacgcccaccatccatctttatgtcaatatttctctagtaattttggttgtctgaagctactgtatacccaaggaaggattcacagaagcagtatttttcagttctggcttccaggtgacagcttgctccctttatacttaaaaaamagtgtggttgaatataaaatcttgggcttactgtttctttcccttcaacattttaaatgtgttactctgttttcttctggtaggagaaattgttattgaaaagcatgataacaat

SEQ ID NO: 624576 - DNA, 582 bp, Homo sapiens
tgttatatgaaaagtgttcagttgtggtagataatatttttcatgttctctatgatcttagtaatttttttttgtctagtgattctattatctgtggagagaaagagatcttaaatcatgatgtagatttatctgtttctcttttaattctgtacattttggctttatacactttgaagctgtgttagtaagcttatacacatttaaaattgttatgtcttcctaattcattaaccttttaattatatgaaaatgtccttctttatctttagtaatactctttcttgaaatccaragatttatctgatattaatgtagtcacgctaaccttctaatgcttactgttttcgtggtaagtctttttccatccatttactttcagcctgtgtctttacatttaaatatacccattatagataccatataattgtatctttttttatctgttccaaaaatctctgtcttaattgatgtgattagtcaattaacatttagcataattattgatatgtttaggtttggtctgccattttattatattttattaacttttcacatttcacttacagttaatattttatt

SEQ ID NO: 624577 - DNA, 558 bp, Homo sapiens
aaatggaatcagggatgtatgggttctgactagctctgtcattaaccaggccctgggcaagtcatttaattcaataaccctaaatctgttcatgacacacaatccccagtttttccagacctctataaaaatgtaaggccagatctctgttccctaaatcagagtcaccaggggaaattgccagacccaagcctagagactcaactttgctagatctggggtgagctcagtaaggtaatatgattgattttttttttgatggagttttgctctttgttgccaaggctggagtgcagtggtgctatctcggctcactgcaaactccgccgcctcccgggttcaagcrattctcctgtctcagcctcccgagtagctgggattataggcacctgccactatgcccagctaatttttgtatttttaatagagacggggtttcaccatgttggccaggctggtctcgaactcctgacctcagatgatctgcctgccttggcctcccaaagtgctgagattacaggcgtgagccaccatatccggctggtaatatgaatgtgt

SEQ ID NO: 624578 - DNA, 489 bp, Homo sapiens
tcccagagtgactcctgagtcaccaaaaacaaactgagatggtcatcccatcatattgagtgtttaatttacacaagccatggaagtaacagagctatttatttcattttcaaatagactcacttaccagacacagctaattttgtttattatctggttgggggctgagaggaaggtgcatttggcactgaatcatctgcctttgtgtcagtgaacctccaagccaagtgattgaagtgggctgagcatagactggtggataagcctattacaagatctagaaagaatttatacgttcccaagagactaagtgaaagccataagtatagagagagcaaatgtttttatttaatattaacttcccctttcagagaccccactgagcrctgtgcaatgggctggcacaggcaatgacacagacaagtgagaatctgattataatgtatatgaggaaaaagtacctcatttaggactcctctcatccttcag

SEQ ID NO: 624579 - DNA, 489 bp, Homo sapiens
tcccagagtgactcctgagtcaccaaaaacaaactgagatggtcatcccatcatattgagtgtttaatttacacaagccatggaagtaacagagctatttatttcattttcaaatagactcacttaccagacacagctaattttgtttattatctggttgggggctgagaggaaggtgcatttggcactgaatcatctgcctttgtgtcagtgaacctccaagccaagtgattgaagtgggctgagcatagactggtggataagcctattacaagatctagaaagaatttatacgttcccaagagactaagtgaaagccataagtatagagagagcaaatgtttttatttaatattaacttcccctttcagagaccccactgagcactgtgcaatgggctggcacaggcaatgacacagacragtgagaatctgattataatgtatatgaggaaaaagtacctcatttaggactcctctcatccttcag

SEQ ID NO: 624580 - DNA, 532 bp, Homo sapiens
tatgaataattatgtcaaaayttgatagtccagaaaaaaaaataaattcctggacacatacaatctattaagattgacttatgaagaaaaagaaagtccgaacaggccaataacaagtgaggaaatataatcagtaatgaaaattatctctaaaaaaaatacagataaaatacagataaaaatttttttatctctaaaaaataaacagaaacaaaaaacaaaaaataccacctcagaacctgatggctttactgctgaattctaccaaacatttaaggaaaaacaaattccaatacttctcaaagtattcacaaaaaattaaagaaaaggtaatactctttctgtgaggccagtatttcctaataccaaaaccacagaaggacacaacaaaaaagagaactacaggccaatgtctctgatgaacatagatgcaaattcctcaacaaaatactagcaaaccaaattcaactgtacattaaaaagatcatcaattatgatcaagtgagattcatcacagggatgcgaggatgat

SEQ ID NO: 624581 - DNA, 532 bp, Homo sapiens
tatgaataattatgtcaaaacttgatagtccagaaaaaaaaataaattcctggacacatacaatctattaagattgacttatgaagaaaaagaaagtccgaacaggccaataacaagtgaggaaatataatcagtaatgaaaattatctctaaaaaaaatacagataaaatacagataaaaatttttttatctctaaaaaataaacagaaacaaaaaacaaaaaataccacctcagaacctgatggctttactgctgaattctaccaaacatttaaggaaaaacaaattccaatacttctcaaagtattcacaaaaaattaaagaaaaggtaatactctttctgtgaggccagtatttcctaataccaaaaccacagaaggacacaacaaaaaagagaactacaggccaatrtctctgatgaacatagatgcaaattcctcaacaaaatactagcaaaccaaattcaactgtacattaaaaagatcatcaattatgatcaagtgagattcatcacagggatgcgaggatgat

SEQ ID NO: 624582 - DNA, 584 bp, Homo sapiens
tttgaaagataaattaacaacataacctcacatccaaaagaattrgaaaatcaagaacaaatcaactgcaaagctagcagaagacaagaaataattaaaatcagaactgtactgaaggaaatagagacacaaaaaatccattcaaaatgttaacaaattcaggagtttgctttctgaaaacattaattagataggcctctagctggactaataaagaagaaaagagagaagatccaaataaacacaattaaaagtgacaaaggggatgttaccactgacttgaaacagtgcacacaaactagaaacctagaagagttgggtaaattcctgaacacatacaccctcccaagaatggaccatgaagaaactgattccatgaacagaccaataacaagctctgatgctgaatcagtaataaatagcctaccaaccaaaaaaaaaaaaaaaaaaaaggccaggaccagatggattcacagctgaaatctaccagatgtataaagaaccggtaccattccacctgaaactattccaaaaaattgaggaggagggacttctccccaactcattttatgaggccagcatca

SEQ ID NO: 624583 - DNA, 606 bp, Homo sapiens
ccaggagcttaaaggtgaaaattgtatttactttcaacatatggacggttactgtcccaacaatgacagtttgtagcttaaaaaaatagcgccaaaattctaggrttatatttttctaaagtaaagtcttcaagaagttttaacattttattaattgaattaccagcaagatgaaagcataggaaccttcctttcatctgatattctaggaatctttgaaatgtttgtatttttgctcagtttaatattgtttgaataaatctatgaatatttttattaaaataaagattagctctgcagaacaaattcagtgcaaagtacttcaaaacttaaaagataatagggtaatttttatttacaagtagcatggtatattgtgggaaggcggatatggcaagcccacaccgttataattccaagtatgccattaaaatagccacaggagaggtaggatcaacatgttctgaattgtcaaatgaatgagaaatcctgagccataagtgaagttttctcattaggttatagtatgtttatagatgtcaagactgtgattttatagtagctatgaaaatattttcagataaatgaaatatattaaaataagct

SEQ ID NO: 624584 - DNA, 606 bp, Homo sapiens
ccaggagcttaaaggtgaaaattgtatttactttcaacatatggacggttactgtcccaacaatgacagtttgtagcttaaaaaaatagcgccaaaattctagggttatatttttctaaagtaaagtcttcaagaagttttaacattttattaattgaattaccagcaagatgaaagcataggaaccttcctttcatctgatattctaggaatctttgaaatgtttgtatttttgctcagtttaatattgtttgaataaatctatgaatatttttattaaaataaagattagctctgcagaacaaattcagtgcaaagtacttcaaaacttaaaagataatagggtaatttttatttacaagtagcatggtatattgtgggaaggcggatatggcaagcccacacmgttataattccaagtatgccattaaaatagccacaggagaggtaggatcaacatgttctgaattgtcaaatgaatgagaaatcctgagccataagtgaagttttctcattaggttatagtatgtttatagatgtcaagactgtgattttatagtagctatgaaaatattttcagataaatgaaatatattaaaataagct

SEQ ID NO: 624585 - DNA, 606 bp, Homo sapiens
tattgtgggaaggcggatatggcaagcccacaccgttataattccaagtatgccattaaaatasccacaggagaggtaggatcaacatgttctgaattgtcaaatgaatgagaaatcctgagccataagtgaagttttctcattaggttatagtatgtttatagatgtcaagactgtgattttatagtagctatgaaaatattttcagataaatgaaatatattaaaataagcttaaactcaaataactgaattatgaattattatggaaggtatctagagcattcttttttgttgatcttctttattttattttattttttgagacagctttctattctgtcacccaggctggagtgcagtggcacaatctcagctcactgcagcctccacctgttgggctaaatccatcttcccacttcagcctcctgagtagctgggaccacaggcacgcatcaccactcccggctaattttgtttttcatagcacattacattaccgatttcccagtttataagtaaccaagatgctcaaacaagcaaatattttccttgagtatgacttactacaaaaaagagaaagaacagagaaattagttctgaaagt

SEQ ID NO: 624586 - DNA, 462 bp, Homo sapiens
ggcttatgtatgtatctaacacacatacaacaaactgtgtttgttcctaagtgttttcttacagatatgtgaatgagaatgcctataggtgatgtgatactttctcatatacctttctctgtcattsactcatgtgaagagagtaagagagagatttaagaaaaaaaaaaagagattctggaaagagataaaaatacaaatactttaggcgaggcgcggtggctcatgcctgtggttccagcactttgggaggtcgaggtgggtggatcgcctgaggtcaggagtttgagaccagcctggccaacatggtgaaaccccgtttctactaaaaatacaaaaattagctgggcatggtggtatgcacctgtaatcccagctactcaggaggctgaggcaggagaattgcttgaacctgggaggcagacggtgcagtgagcctgggggacaaaagcgaaactctgt

SEQ ID NO: 624587 - DNA, 551 bp, Homo sapiens
atttgtcaatgtttctgtttttcctcgtgtctagtaattctyggttgcatgctggactttgtgactgaatgcagtaaatattcctcagactctgttttttgtcttctggcaagtgctgagttttgccccagcaggcactgtaattactagtagatcacgttgaccttgtaacgttgtggttttaagcttttgtctatttctgttttactcttatttctacagtgaatcccttcatcctgggacatagattttatcccaaatgtgtttcccttctgggattctaatgaaaggtcacagggccaagctcttttatcctgggcaggatttaaattataacctttgtctctttactcagtggtgagcagcagttgaaatctctacctaactcctcggtattccgactgttattcttcccatttccaggtgctctgggtgtcctaagttccattttctgaatccaaaagccaaaaggatgacagttttgtgtttgatttttaatggggaaaagttattaaaagtttatctaaaaatttacttattttggattatat

SEQ ID NO: 624588 - DNA, 551 bp, Homo sapiens
atttgtcaatgtttctgtttttcctcgtgtctagtaattcttggttgcatgctggactttgtgactgaatgcagtaaatattcctcagactctgttttttgtcttctggcaagtgctgagttttgccccagcaggcactgtaattactagtagatcacgttgaccttgtaacgttgtggttttaagcttttgtctatttctgttttactcttatttctacagtgaatcccttcatcctgggacatagattttatcccaaatgtgtttcccttctgggattctaatgaaaggtcacagggccaagctcttttatcctgggcaggatttaaattataacctttgtctctttactcagtggtgagcagcagttgaaatctctacctaactcctcggtattccgactgttattcttcccatttccaggtgctctgggtgtcctaagttccattttctgaatccaaaagccaaaaggatgacagttttgtgtytgatttttaatggggaaaagttattaaaagtttatctaaaaatttacttattttggattatat

SEQ ID NO: 624589 - DNA, 563 bp, Homo sapiens
agtggaaagtcatggaagaaactgataggatgaaaataatatgagataaacgtagaaaactggggaagtggcaagtcctgtttgttcagattcctctcagagcccctatgtcttcagagataaggatgcttctttcctccaggtatatgaagggtacctttcacacgagggtcttatgaactgttcagggggaagtcataaaatcctttctgcacctggcatttcacagatttmttttgcttaaaatcttatctatgccaagttgccatattttggggtaggatgtcctgaaaccgaaatgtttcaatgggatcttttgaaatgcagaactattttttaaattcatttttattaattttattgtacatatttaagttttataatacatttataaattgatatacattatttactaatgtatatcaaaatatattttgatttgcatgtgtgaaattattatactttagccaatcaagttaccatatctctcacatagttacctttgtgtgtgtgtgtgtgtgtgtgtgtgtgtgtgtgtgtgtgtgtgtggtgatagcacctga

SEQ ID NO: 624590 - DNA, 650 bp, Homo sapiens
ttatacctcaaatagtcattacttatgtactaaaggactgtacaggaatccctatccagctaaaattccttttaaacaaaattataatatgcataattttttctgtagaatttcagattgattatatgcatcttataagtgatgaagtaaaaacatgtttaaagtcatgggatacttgtgtattatctacaacaagaaaaaaatggaatttataaccatctattgaagcaagagttcttgaaaagtctctaatgaagagaggaatagtaagcaaaattagtactaaatctccactattaaagatattaaaatgccattattatcttgtatactgttttgattatattttggtgaagctaaaawtacttataagggctcattagttaattcagtacttcagtacccataacctatttcccacttcctctctatctcttcctttaaactttcctcatagtgcctattctttaaacccttaataatttttatgctctcttggccacaggagaaaatgggtatatcctaacaattgaaaatactctctaaaattgtgcttgatgatgtattattcttgtttccactacgacaaatggcaacatatctatagattcccaagatatgaatggtgtgtagatttgcctttttcttat

SEQ ID NO: 624591 - DNA, 552 bp, Homo sapiens
actgaaatataaaatgtgtttactgtaaaatataatctgtttatctcaccaaagaaatattatctttaaaaaatgtcattacttctaagacatcatcagtctgcaacttctttccatagccttaatcaggatgctgtggcagctcccacattagcctcgcattctaaactggtagatgtcctaggaaaccatacatctatgtatttttcttattttatacgtttaggacaatgtatagctaattacccaactttttatttgcatacaaatctaatacaactgaacacaatcagttttatcacaggtataatggatttttcaatagtgaggaggtgcctccatgagccttctctttagaaaagtggcattcaagactcttcatttgaagtgaagattgctatgtcttttgcattgctctattttacataaattaagttataaattgacactataatcaactgacaccatgatcagtgatgawgatcaccctcatcagcactagagttgacttgtttttataacccctttgcatgtatgttgaatagcaaagtt

SEQ ID NO: 624592 - DNA, 554 bp, Homo sapiens
gtctagtgcaattttatttttagtctctaaacttgtggcaactttctcatcagtgtgggcagagtggtgggagaggggcctcagtcatgataggggtacaggaggtagccacagaggatgaccatatagcagtcatagagggccagaagccacgcaggaagtggacatatgctgagtactgattcaggaagagcacatgtcattcagcaaccaatggttaaggtgtcaggtttcaatgaccttctccatgaggtctgtgaggtcctctgacgtacttattgtgggtcagcttsgcagccacattcatcagcccctgggacaggttcttgaatttggtgttcctctcagagaacatcccaagctttccttagaaggtggtacacaccaggctcttgtgcaagtccaaaaggtccttgtcagccattagcaccttgagttccctaatgggaactcaataaatatttagtaagtgaagtattattattttagctgatgctcatttgagaccttcaagaggcttgtttaaaaggggacctttgagtttgcagtagggt

SEQ ID NO: 624593 - DNA, 480 bp, Homo sapiens
tgtaaagaatggtaaatggaactggagctatttagcctggagaataggggacttgaggatggggtttatatactggcaacccatgaggacttgaaaaacaaatttttaatgaagtaaacaaattctaatttgctttgtagcttcgagctgggatcagagagtggaagttagaatgaaacagaacttaggtcaagatagattgctaacagttagacatgtctggcaatggcttagactacctggatatgcacttctgtcccatcagtggagaattttactgcagagggtaaatacccatcttttaaacaggattaccacttggaaggagttggactaagttagaggttcacaagggagaactttggctgtacattagaatcacccggctgggggtrgaggtgttaaaagtgaacagtgcctgggccccatgctagaaattctgatgtaattgtcccaggtgagactacagaaagtccccag

SEQ ID NO: 624594 - DNA, 633 bp, Homo sapiens
ggaagagcaaaagaaaagttacaggtacataacagtaaaactcaaccaacgtcttgtgaagttttcttttttgtcttttgtttgatctcagcactgtctcagaaattgttaggtgtgcggtgttttgtttccttttttgtcagagtattgcattcagagaaaggaaratctaagaaggaatgatagtagtgtatcatcagaacatttacacatttggagtctaaaagccaggcttcctgcagtagtgtttgatcttccgaatattgatgtcctgaatgaagcacgtgaatatttattctgattttctcttatgatgtgtccataacatccactgttctcattttagatgtaaccctctagagccctactgtaagtaataggaaaactcagtaaactggtagtgggactgtgttctgtttaacaaatgctgttgctcttcagtacattttttttctttctacttaacactttttcagtttcctgttcttttatcagaaaaaaataagtcagcaccactggtaaacgtaggtgtattgatcggaagctggtgttttctcccatgacattacccacctcatatctaatgagacaagagggtgctctcaggccagtgctctcaacaccgcttgaatg

SEQ ID NO: 624595 - DNA, 608 bp, Homo sapiens
gtgtatcatcagaacatttacacatttggagtctaaaagccaggcttcctgcagtagtgtttgatcttccgaatattgatgtcctgaatgaagcacgtgaatatttattctgattttctcttrtgatgtgtccataacatccactgttctcattttagatgtaaccctctagagccctactgtaagtaataggaaaactcagtaaactggtagtgggactgtgttctgtttaacaaatgctgttgctcttcagtacattttttttctttctacttaacactttttcagtttcctgttcttttatcagaaaaaaataagtcagcaccactggtaaacgtaggtgtattgatcggaagctggtgttttctcccatgacattacccacctcatatctaatgagacaagagggtgctctcaggccagtgctctcaacaccgcttgaatgcctcatctgatctttactgagtgttacgtggactctctggttttgtgtttgtagttacagtctctaaacactctccaccccctctgctaagtacttaagatatttaatccttcatactaggtttctcagtgtcacgctattgacattttggactggataattc

SEQ ID NO: 624596 - DNA, 583 bp, Homo sapiens
cccatcatgtgactatacagttggaacttccagccccatacagggtcctctagggaggagacaaggtcggagagttgagttgatcaccaacaaccaatgatttaatcaaccatgcctacacagcggagccttcataaaaacacaaaagtcaagtttccagatttctgaacacgtggaggtgctgggagggtggcatgcctggaaaatgcaaagaaactccacattccttcccacagaccctgccctatgcatctcttccctctaactaacttcttctgtaccctataaatgggggtaaacatgtttttctgagttctgagagccattctagcaaattaatccaacccaagggagggtagtgtgaaccctctacttacttttttgccagaagaacttgcagttggcatctgaatgagggcagtcttgtgggattgagcctttaacctgtggaatctgaygctatcttcaggcagatagtgtcagaaatgaactgaattatagtatactcatttggtgtccactagagaactggttgttgggagagaaaatccacacacattttggtgaccagaggtgaggtgtt

SEQ ID NO: 624597 - DNA, 436 bp, Homo sapiens
attatcaggggaacctgcccccgatttcacatgggttcttttctattttccctaagcactggccggtttgagaaataaagggacagagtacaaaagagagaaattttaaagctgggtgtccgggggagacttcacatgtcggtagtttctgtgatgccccctgagctgtaaaaccagcaagtttttattagtgattttcaaaagaggagggagcgtacgaatagggtgtgggtcacagagatcacgtgcttcacaaggtaatacactatcacaaggcaaatggaggcagggcgagatcgcaggaccacaggaccggggcgaaattaaaattgctaatgaagttttggcacgcattgtcattgataacatsttatcgggagacagggtttgacagcagacaaccagtctgaccaaaatttattaggcgggaatttcc

SEQ ID NO: 624598 - DNA, 655 bp, Homo sapiens
aaccagtctgaccaaaatttattaggcgggaatttcctcatcctaataagcctgggrgcgctatgggagactggggcttatttcatccctacagtttcgaccatagaagacagccgcacccaagggggccgtttcagaggcctacccttagggatgcattctctttctcagggatgttccttgctgagaaaaagaattcagcgatatttctcccatttgcttttgaaagaagagaaatatggctctgttctgcccagctcactggcggtcagtttaaggttacctctcttgttccctgaacactgctgttatcttgtttttttttcaaggtgcccagatttcatattgttcagacacatatgctctacaaacaatttgtgctgttaacgcaatcatcacagggtcctgagatgacatacatcctcctcagcttacgaaaatgatgggattaggagattaaagtaaagataggcataggaaatcacaagggtattgattggggaagtgataagtgtccatgaaatcttcacaatttatgttcagagattgcagtaaagacaggcgtaagaaattataaaaatattaatttggggatctaataaatgtcaatgaaatcttcacaattcatgttcttccaccatggcttcagccagtc

SEQ ID NO: 624599 - DNA, 628 bp, Homo sapiens
atcatgccactgcactgcagcctgggcgacaaagtgagatcctgtctcaaaataaataaatgagataaaataaaaaataaataacagataaatggggcaatatctggaggagcattgacaagagagaagaatctatgaagtggtgacatcagagggcaggaaagtccattcctttatacagccatggaaggttaggaggctagtgacagaggctgtgttagtggggtcatccctgtggatactgaagcactgaaattcatgggaggaatcagggacaatagagggttgccaaataaaacactatttgctgtttgtctgaaaatcaaatttaactgggcattctgtatttttatttgccaaatctgacaactttaggtggagagaaacactgccctggaagstgttctgtgaatgagagataatagcaatatgggatagtgtaggcaccccttattcatggcagataagttccaaaacccccagtggttgcctgagaccacagatcatgctgaaccttatatatgctatgctttttcctatacatacatacctatgataaagtttaatttataaactaggcaccgtaagagatgaacaacaataacaataaaatagaaaaattataaca

SEQ ID NO: 624600 - DNA, 353 bp, Homo sapiens
tactctagtatacatataataattccaaataattattaaagatagtacactggaggtgattattattcatttatttactaaacaagtattttyttaggggtaatcatgtacgaagacagacattatccctcatattgtggagtttttggtctagtgcaacgttttagaaacttgtttgattgcacggctctaataggagaaatatttgacaatgcaccattgatatatgtatatttacctataaataacatgcatgtactattttactaatatatgaagcacattaaaaaactaattcaagaataaatcatgacagggtaagataaaaggaaacatgaattaaagttttagta

SEQ ID NO: 624601 - DNA, 556 bp, Homo sapiens
gaccttaggtgatccacccaccttggcctcccaagttctgggattacaggcatgagccaccatgcctggctgagcatttttcatatatcagccatttgtatgtcttgttyttcttttttttaaattttttttttttgagatggagtctcactgtgtcacccaggctggagtgcagtgacaccatctcggctcactgcaacctcagcatcccaggttcaagcaattctcatgcctcagtctcccaagtagctgggactacaggtgcccaccagcatgcccagctaattttattttttatttttagtagagacagggtttcaccattttggccaggctgctcttgaactctctacctcaggtgatctgcccacctcagcctcccaaagtgctgggattacaggcatgagccaccacgcccagcccgtatgtctccttttagtaatgtcaattgagatatttttgcccatgttttaatcagattatttatttgctattgagatgtttgagtgccttatgtattctggttattaatcctttgtcagatggatagtttaaa

SEQ ID NO: 624602 - DNA, 430 bp, Homo sapiens
attgagtgggtatatagaaagaaacaaaagtcaaaattagaactctgggggaacattagcatttaaggggacaggatagacaaccaagagccaaagggacwcattatatgatggagaaatgacattaattttggcagtagatatcatttgcaaatatatattagttaggtgttggtggaagaaagctaggttgcaggaaatgaggaagtaaaagatcagagaagagagacagcaaattcaaatacctttcaagaagtttggtggtgaaggaaagcagagaatccaagtgatagcttaaggatcaaggctggtttgaaaaaaaagataattggtgctttatttttcctctaggttaggacaggcttgagcacacttgtagctagagaggagagttgccagaaggacctgaagactgaaagaatggagatta

SEQ ID NO: 624603 - DNA, 594 bp, Homo sapiens
tgttgcttatatcacccccagaagtgtgttcagttccaggagtcaaaaactttaagaaggacactcctgagaaactgaaggagtataaaacaaatctactagaatgatggttgacagccaaaaaaaactatgtgagtttttgttggggggaaactagaaattttaacagaacaaaagmgagtggggagggaggttgattcaaagggcaaaacagattttacagggcagaataaagaccaattgtgggattgcatagaatgtgggacatttactgccaaattaagaatcgtctataaaacactaagcttgatgctccaaatgtatgtgcaatagctaaggggctatgttaagccatgttgctgggaatcgctatggttttatttatatttgccaagaggtttttatggagggttctaaaaaattttgagtctataattttatacacattcacacaatggttattataaactttcagcaaattcaaaaggaaagggtaatataaatcatagccattaagaaaataaagttgtaaataaagttgttgccttctaaatagcttatcagtgttaaattattaaatgtacagtaatgcaa

SEQ ID NO: 624604 - DNA, 566 bp, Homo sapiens
agtgttccaggtctctgagggtggtcagagatgtagtaaatttctttacctctggtatactagccagtggggcaagatgttggaaaatatcctgtggattactgggcttaccttgtctgaatgttggagtctcctttagcagtgcttttagggtgagattgtgttcctgtttgtagaaatctagtaagaaacatctggttctatcacagactgtggctaatgactttctaccctgatgcagccctctgaggaactactgtgtggattggccacagtctcagtgaaaggacatttgctctggtctgcccagactcacctaggyttcagatgtaacaccaagagcagcaacatttgcaatagcaactcagaatgatgccattcagccaattctctcaattttctggagatagaaacttgggacagtctcattagactaagtagataaccctgggggtccaaagggatatctggtgatgggggaaaaaaggaaaaaaaacaggctgctgcagattgtgagatagagatggagtcatattcattttatataaaataatataagcattttt

SEQ ID NO: 624605 - DNA, 585 bp, Homo sapiens
  misc_feature 549, 578: n = A,T,C or G
cgcggtggctcacgcctgtaatcccagcactttgggaggccraggcgggtggatcacgaggtcaggagatcgagaccatcctggctaacacggtgaaaccccgtctctactaaaaatacaaaaaattagccgggcgtggtagcgggcgcctgtagtcccagctactcgggaggctgaggcaggagaatggcgtgaacccaagaggcagaggttgcagtgagctgagattgcaccactgcactccagcctgtgtgacagagtgagactctgtctcaaaaaaaaaaaaaagaaaagtcctctacaatcttacagtctaaaaggagttgagacatttaggatgaaaaatttgggccctacattatccattcttcctcttaactaccatataaaaacgtgctagatattgacacctgcagccagttccaaggattgtcagagccacacattcctaatcacctcagattgggaatggcctcagggtacacccaatggtccagaccaaataatagaattttataagtgtgccatgatgtgaaaaatgtttgtttncctggcgcgcaaaaaaagattaaagtcgncataaaa

SEQ ID NO: 624606 - DNA, 597 bp, Homo sapiens
caaaaaacatgaaaaaatgctcaacatcactaatgatcagggaaatgcaaatgaaagccacagtgcgataccatcttactcctgcaagactggccataatcaaaaaatcaaaaaacagtagatgttggcatggatgcgggtgatcagggaacacttccacactgctggtgggaatataaactagtacagccactatggaaaaccgtgtgaagattccttaaagaattaaaagtaaaactaccatttgatccagcaatcccactactgggtatctacccagaggaaaagaaatcattattcaaaaaagatacttgcacatgcatgtttatagcagcacaaatcccaattacaaaatcgtggaaccaactcaaatgcttatcagtyaacgagtggataaagacaccatggtatatatacaatggaatactactcagccataaaaaggaattaattaatggcatttgcagtgacctggatgagattggagactattattctaagtgaagtaactcggaatggaaaaccaaacatcgtatgttctcactgatatgtgggagctaagctatgaggacgcaaaagcataagaatgatacagtg

SEQ ID NO: 624607 - DNA, 597 bp, Homo sapiens
caaaaaacatgaaaaaatgctcaacatcactaatgatcagggaaatgcaaatgaaagccacagtgcgataccatcttactcctgcaagactggccataatcaaaaaatcaaaaaacagtagatgttggcatggatgcgggtgatcagggaacacttccacactgctggtgggaatataaactagtacagccactatggaaaaccgtgtgaagattccttaaagaattaaaagtaaaactaccatttgatccagcaatcccactactgggtatctacccagaggaaaagaaatcattattcaaaaaagatacttgcacatgcatgtttatagcagcacaaatcccaattacaaaatcgtggaaccaactcaaatgcttatcagttaacgagtggataaagacaccatggtatatatacaatggaatactactcagccataaaaaggaattaattaatggcatttgcagygacctggatgagattggagactattattctaagtgaagtaactcggaatggaaaaccaaacatcgtatgttctcactgatatgtgggagctaagctatgaggacgcaaaagcataagaatgatacagtg

SEQ ID NO: 624608 - DNA, 630 bp, Homo sapiens
tctgtgtgggctgccataacaaaataccatagcctgaataacttaaacaacagaagttcattttcttacagctctggatgctagaaatccaaaatcagggtaatttcaggcttggtttctcctgagacctctttttttggctttaagatggctgccttcttgctgtgtcctcatgtgacctttcctctgtgtacatgtgtgtctgtcttcctcttataaggacaccagttttattggactggggctcttatgacctcattgaaccttaattacctctttaaaggccttgtcaccaaatacagtcccattctgaggtactggaggttaggacttcaacatatgaatttgtggggacgtagttcagttgataacaagaagagacagtaaacttcactaytgggaggagaaagcagggagcacacaacaaaggagctgtgattgacatgggagctaatgaccactgaagtatagtcatgagatctcaagtgtaggcaaaagaactgaaaccgggcaggtaggttaggacctttatcccagtttagcttgctcctgatgcagcaggagaaggggacagcaataatgagcacatgatataaggagaaaagctaatggaaatgagaaacccgtcaa

SEQ ID NO: 624609 - DNA, 528 bp, Homo sapiens
gtaatattcaatactatcttggatttcgatattcaatattgaattgaaatctatataaaaactcgtaaacatgaaactcaagaaatcctgcactaagaaatgaattctaactgtttttagatggaaagaaactctaatcaccacagagcaatcagctgatactgcatacaaagacaacaccatatagatatgcatgtgtatcagagggcatatgtgtatgtgtgcattctctayggtgcacttcatattcatccacacttactcaccatttttggttaatcaagtagatacagagagggtaagatggaatctctatgaggccagacagggccaggttggcataaatacttccacctagatcacccgcactcagagttaggccataatacaccaagctgcacacaaacctgcaattgggagtcaaaggaccaggaggtaaaagacaagaaggacaacagaaaagtacataagaatttgccagaggagattcaaatattggttcaatataattgcttgatctgctgtaag

SEQ ID NO: 624610 - DNA, 596 bp, Homo sapiens
ggtgggcactgttacatgctggaacacagcaatgcacaagatagacccggccatgcattcacagtagtgaggaagacaaatgtaagcacagaatacaattgtgggatgctattatgggaaaaataacaaatgacaaaaataaaggttttagaagccaaaacttaagggtcctctccagcataggacttcccatctgtgttgtgattcaattccatttgagtaatttgagtggaacatccattttatgctgtgctttgtgcatacatgttgccacgaggtttatagataacttgacaaagcaagacaratgacctggaaattaaaatcactgcaatctagtgcaaggtagaggtttgcacagatgctatggatacatagaaaacggatacttcatccagtttggaggttgggaggcctttctggaggcacagtgtgttggagttgtatcttgaaagcttactaggcgttagctaggaaaaagggggcatgaaagttgttctagaatgagaaaatagcaggtattgagccaggcctgaggcgcacaaagagagaatttgtgctcctcatgcctgtgcaattgttcctgtgatattttt

SEQ ID NO: 624611 - DNA, 622 bp, Homo sapiens
agaaggaggtggaaaagggagaagggggaggagaagggagagatggagagaaccgagcagaagacagggatgaggaggaagagggaggaggagaatctctcatctctagccatctacactcaaacatatgtccagcactgtgggcctgttgttgaaacaaggggaacacacactttcccttcttctaaccttgtaggaagcaacagagacacagtgctgggtattataatgttgtaggatagctatccaaagtcagatatctctaacagtacctatattttgcagaataaaacacagacctacatgactcctttaggagaagggtcttgtgaactaaaattaatcatgagacatggagagagatactctgagaagggaaatgtactgcacctcagaaaatgaaaaggttataatggcatttcagagacctgcctaagtaatgaacagttgtctacagaacaggtccacaagtcccacatcaaatctagttgctttcaaaaagtcttggctgkggaaagtcacaaatcaaaccaaggagagacttgcgtaggggtcccctgggttctttcacagaatctgagcattttaagatgaaggattttagggctgtcatttaatctgg

SEQ ID NO: 624612 - DNA, 545 bp, Homo sapiens
ttatagtttttatcaaatttgcaaagcatttgagcatttctgcaaatactttttctttatcccctccttctaagactaatattacacttatgtaggtcacttaatattgtcccacaattcactgatgttttgttagttttttattcaatttttttgtttcatgttgtatagtttttttatgtctttaactgatcttttcttctgtttagtgtttaacctgttgctaatctcatctactgtatttttttcatatattatatgtttcatctctagatgaaagtgtctttttctttcttttggcctctctgcttgtattctgcttgtattcttaagcacatggagtacatttataatagctgttttaatattcttgtctcttaattctatcrtctgtgcatttttggttttgtttctattgatttttcttctacttgtgggaggtattttcctgcttatttgcatgcctggtgattttgagtggaggctacacactcaatgttttttttttttgttaatgttattttttggggtgctggactttattg

SEQ ID NO: 624613 - DNA, 595 bp, Homo sapiens
gctggaactggtttagtgagtggtaaagaatttaaaagtagaagtggcagtgagaaataccttgcatgtgttcccagtctccagcactaaccaagagaagccattccttattctgcctcacaggggacttcatagaagtctcccaactaactaactcaggcagtggttgcaggttaaaagaaactcccaactgaatttcatgacataatcttgagtagagaagaactcccttggccaaaaccagggagtaagtgggaagtgtgctgcagccacaagtgtaggagctgagtgtctgggaggggtgtggtctgaaagctttggttgctatctctgtgggggaaagtttatggcctgaggtagttgtgagttctgagcgtagacaacctggaacttagctcactgctactagtggaaaactgygggtgtgagacttgccttgccaagtgtgtaggagcatggtagggcttactgacacctgctactcccaactccctgtgcaaactcttctgcgcagcagaagcagctaggctcttggaacattaccccagcggccagaaaacctccccccaactccaacaggaaccactgcttgtca

SEQ ID NO: 624614 - DNA, 605 bp, Homo sapiens
tgttctcacgtcctaaaaatatagcatggaaattcccaccccttcagccagccatgtctacagctatagatagaattcattctttaaataggtatataatagtctatagtatgaatgtgccataacttaactctgcttctgatcagcatgctctttgcctctgggtttctgcctggaaacaaacaatgctgccattactctatkcttttcaatcatccagaatagcgtaaataacttaagaaatgtcttttctttacaggttagatgcaactcagctgctaaagcattttggccttttttttttttaaatcaaaactctcaactattttggaacatcctcatggctaatgatatgtttaagttttatatctcttctaggatcaatgttgtcagtttatatttgactcagaaatcatccatttcccataaactttcgaatttactgcaatagacttttccacaatgttcctttatgattcttttcatctcttttgtactaaactcttgctctttcccctaagtctgcttttacctccagttttatgaagatcaagaaaccatcattatccccaaattaaagtcatctttgggtccttctcaggcct

SEQ ID NO: 624615 - DNA, 543 bp, Homo sapiens
caactccaggtggcccatgtgaggtcagcagggatgagcccrttttttctgcatagtcagaaaaggctgcagtgccgatccacctgggttgcctatgctatctgggtgtaactggactcatggggttaactctgaagtacttaacactaatcattctagtttcctgagtttgattcctcattttttcttaactatatgttttcaagatcttcctaaattgcttctgtaagtatgcaagctaatggatttggtgaatagtgacctctgaaagagtaggttcagtagggcaggtaaaatatagattttaagacataatcatcatcactaaaatttactgagctgcttttacttgtctcttttcacttaaacctcacaagaactgtataagattatatacatgcatattttacaggttaagttggaggtcagagtggttaagtaactcatcaaatgtccctgactattgtgtcagatagagtctgtctcaatccatttcatattgctataaaagaatacctgaggctaggtaattttgaaagaaaa

SEQ ID NO: 624616 - DNA, 543 bp, Homo sapiens
caactccaggtggcccatgtgaggtcagcagggatgagcccattttttctgcatagtcagaaaaggctgcagtgccgatccacctgggttgcctatgctatctgggtgtaactggactcatggggttaactctgaagtacttaacactaatcattctartttcctgagtttgattcctcattttttcttaactatatgttttcaagatcttcctaaattgcttctgtaagtatgcaagctaatggatttggtgaatagtgacctctgaaagagtaggttcagtagggcaggtaaaatatagattttaagacataatcatcatcactaaaatttactgagctgcttttacttgtctcttttcacttaaacctcacaagaactgtataagattatatacatgcatattttacaggttaagttggaggtcagagtggttaagtaactcatcaaatgtccctgactattgtgtcagatagagtctgtctcaatccatttcatattgctataaaagaatacctgaggctaggtaattttgaaagaaaa

SEQ ID NO: 624617 - DNA, 543 bp, Homo sapiens
caactccaggtggcccatgtgaggtcagcagggatgagcccattttttctgcatagtcagaaaaggctgcagtgccgatccacctgggttgcctatgctatctgggtgtaactggactcatggggttaactctgaagtacttaacactaatcattctagtttcctgagtttgattcctcattttttcttaactatatgttttcaagatcttcctaaattgcttctgtaagtatgcaagctaatggatttggtgaatagtgacctctgaaagagtaggttcagtagggcaggtaaaatatagattttaagacataatcatcatcactaaaatttactgagctgsttttacttgtctcttttcacttaaacctcacaagaactgtataagattatatacatgcatattttacaggttaagttggaggtcagagtggttaagtaactcatcaaatgtccctgactattgtgtcagatagagtctgtctcaatccatttcatattgctataaaagaatacctgaggctaggtaattttgaaagaaaa

SEQ ID NO: 624618 - DNA, 495 bp, Homo sapiens
gatccttggtaatgttcactagactctactgggccctacactattcttacataattatgattaacaactggttgaaaactgtgacttttacttgtccccacattgattgaactaagagagacatgaagaagattgagggccctgctccaattctcagaaagagaaaacatctaaaacaattaatctgtggtttgtgcttggctttatgactttcgtgaggtttgttcaactgatgccagcaacatctggaactgaaagcatgactggtcgtattgcaataaaaagaggcttacttggttaggttyccctgcaggaagaactccaggagggagagcagcagagagggtgcaaggccaccagaggcagctagcgggcagaaggcatgtggtttctgcctaaggagagagcagccatttgatctggttaaggcaggacccaggaggtagagaaccaccacccaaaagcaggtgctttacaaggttctgggctttaacc

SEQ ID NO: 624619 - DNA, 422 bp, Homo sapiens
taaagccaagggcccaaccattgtatctctgcatcaggcagtcattggctattgagccatgcctgggaggggccttagtctggagccagatagttctctgccaaggtcattgcctaggaagggacacagctgtgagccatcagcagctggaggcttgtgcctcagccctgaagtggggatctggacacaatatggaggtggtggccacagaaggcattccagatttgggatggttggggcagggtcagaaaaaatcacctgctgaaagtagagacagaaaaccccaagacacgatatcaaaagaatctsatcctaagagaaaatgtgttgctcataagactaaaatatttatcatctctgctaaatgctccaaaatctagtaaagaagatgatggtatgtgccagagctttccaacagatct

SEQ ID NO: 624620 - DNA, 529 bp, Homo sapiens
tgttgctcataagactaaaatatttatcatctctgctaaatgctccaaaatctagtaaagaagatgatggtatgtgccagagctttccaacagatctgtcagggccaactgatgagcaacaatgagtcacagatgtgtggggatttttacttcctgtagatctcagggtggcagaacaggacctgggatggctagaatccttctgtcaattcatacacatattgttgcwtgagtgcattatttacaaaaaattagaaagccctagcttataaaagaagttgtcatctacccaattgtgccctattatatctggcatcacagatggtctgcataaatactctctaaactggtgggtgacctcaagcactgtgccagggtgagagccctcaaattctgagaaccagtactttttattcagaaacgtctccagagcgcagaaaggcagtgaatccagctactctagaatgatgaaatagccttataaacaagaacactcttgaaactttgctctgcttttgtctacatcaag

SEQ ID NO: 624621 - DNA, 486 bp, Homo sapiens
ttaaagactggggtgggggtggtgctgaaaatcatttaaacagagcttccctagcagaatgcttgaaatcctttcaatctttgggataccaggtgggcctgggatggttagaggtcccaggcggctcagttatggccatgagctgtctcacttgttaaccccattgcactgtgtcccctcaactgcaaaaggctgaaagacacactaaaagaaaagaaaacatgttgcctttatgtgtggtaaagaatattgatacttagctgtactttgaaatacttaaatgattctctaagccattctgattttaacctgtactttgttactaaagaggtagtaaaataggaggaaaataatttcccaggcattacaagaatttttagagagttacctatcatttagtgttgcttaattttaatttgattattgttatracacattttgtttctactgttttcctttgctaattatttcacttgactaaattat

SEQ ID NO: 624622 - DNA, 481 bp, Homo sapiens
agaaaaagaaattttcagacatataataactcagaatacctcctttttcttaagactattccttgagaatgtgtttaagcaagagaaggaaataaatctaggaaaacaacaaccataggttaatgcagaaaagcattaaataggaagtcctaggtggataactgaaataagccttctataggcagaacacagagttccaaaagatatccacataaaaaaactgatatgttacagcagacagtatgaaaaaaattytaaaaggcatgaggatatgataaaagaacagaatgctaggtaactaccaacaccaatgtcctctcaaaaaaaaaaaaaaaggttataaaagaaagccatagtcaaacagatgagaaagtcagcgtggttctggaagaaagtaatgtaccttaactctaaccctataagcagtaaggagaatggaagcaataaataaaaagatgggaagcaataaagagaacagaag

SEQ ID NO: 624623 - DNA, 625 bp, Homo sapiens
gtaatcctagttactgaggtggttgaggcatgagaatcgcttgaactcaggaggccgaggtcgcagtgagctgagatggtgcttctgcactccagcctggacgacagagtaagactcatctcaaaaagaaaaaaaaaaagaagagtagaaagaaggcaggctgggcatggtggctcacacctgtaatcccagcactttgggaggccaaggcaggcggatcacctgaggtcaggagttcgagaccatcctggtcaacatggtgaaaccccatctctactaaaaatacaaaaattagctgggcatggtggcagccrcctgttatcccagctactcgggaggctgaggcaggagaattgcttgaacctgggaggcgaaggttgcagtgagccgagattgtgccactccactcaagcctgggggacaagagcaagacttcatctccaaaaaaaaaaaaaaggtagccaccatttaggcatattaacctttcaaattatatatagccataaataatctttttacaaaatccattctttgtgtgatgtttactttaaaacttgggaatttttactgtatggttgtatcaagatttatttaaccaattcttggtttttgtttttgttttttc

SEQ ID NO: 624624 - DNA, 594 bp, Homo sapiens
tactggagctgcaaaatgcaattggcatactgcagaatgcatcagagtcctttaatagcaaaactgaccaagaagaagaaagaattaataagctcaaaggcaggtaatttgaaaatgtgcamagtcagaggagacaaaaaagaataaaaaacaatgaagcacaccttccatatttagaaaatagcctcaaaagggcaaatcaaagagttattggccttgaagatgaggtagagaaagaaacaaaggtaggagataggagtagaaagtttgttcaaaggtacaataacagaaatttcccaaacctagagaaagatatcaatattcaagtacaggaaggctatagaacaccaggaagatttaacccaaggaagatgacctcaaggcatttaataatcaagttcccaaaagtaaaggataaagaaaggatcataaaagtagaaagagaaaagaaacaaataacacacaatggagctccaatatgtctggcagcagacttttcagtggaaacattacaggccaggagatagtcacatggcatatttaaagtgctgaaggaaaaacaaacaaacaacaacaacaaaaaagtttacccaa

SEQ ID NO: 624625 - DNA, 637 bp, Homo sapiens
gaaatgtaaatattgttcagctttttttgaagggcttgggcatgcattcaaagtcacacacacagttcccatgcattatttgcttgcaatgggaatagacaatgtgagtagagggtgctaagttttgtctagaaggtgctctcacagttcagctttcattttyaggaaacataagaacaaaggaaagatgttactgccagagcttgaggaaggagctgtttcatggtatgttgacagtaatttaatcatgaaaggttatcttctagactagcactcaaatttccttagtctttcctgatgatcaagggcattctttgttaagtctaatgtgctggccctcaaagttgcctagtatgcaaggaagctgtcaatcatatactttaaaaaatgaacagcagaagggttctaaagggaaatcaaattatggtccatttggaaatgtcacaatcaagtggtactagcaaaactgaagaggttcattgaccattcaaattgatatataaagaattacgtgtttttgctgctaatcaaagataaagctgcctatgtggagcctgagcccactcaggctttagctaatgttagtgtttacatgacatgttggaaaaaaactgggcaattacaaaggcccagtcta

SEQ ID NO: 624626 - DNA, 604 bp, Homo sapiens
aattctaaaacatatatatgtgtgtgtccacacgtgtgtgcacacacacagacatacacacacagtccagttcacattccaattatcatgagttctatgttgaaaattccaaggtcatagtgtcataccatttcytttattcttcttctttcttattttgtttcttttttttgctttacagtctaatgcaagggaacccaaagtggaatatatgtcactttgtggaggcaaaatagtgcattgtagtgaaaaaagaaaacatttgaacttccggtaatatttatttttatatcattgttttctaatttatattaaaagttttataagggtcataatgctatagaatagtacacctataatgatttcaataaatgatatacagaaatcataagcacatgattgaaggttttatactgatagggctttgtggagaagctaaagggagaagtgcctgtcatccaagatttctttcctctgagatgtatctatcaatttctctatctagatacatatccagttcatatatttatgttttattataaaagttaaatgttttcaataaagaaaatttggagagtataaaaatatgtaaggggagaggtaa

SEQ ID NO: 624627 - DNA, 436 bp, Homo sapiens
ttcacattccaattatcatgagttctatgttgaaaattccaaggtcatagtgtcataccatttcctttattcttcttctttcttattttgtttcttttttttgctttacagtctaatgcaagggaacccaaagtggaatatatgtcactttgtggaggcaaaatagtgcattgtagtgaaaaaagaaaacatttgaacttccggtaatatttatttttatatcattgttttctaatttatattaaaagttttataagggtcataatgctatagaatagtacacctataatgatttcaataaatgatatacagaaatcataarcacatgattgaaggttttatactgatagggctttgtggagaagctaaagggagaagtgcctgtcatccaagatttctttcctctgagatgtatctatcaatttctctatctaga

SEQ ID NO: 624628 - DNA, 512 bp, Homo sapiens
atctctagagataatcaaggtttaaattgcattttaaccacttactgtagaatgatttcagtggattctttaacctctttctgtctcatttgactgttcttcaaawgggtggcaggatacttaccagctggcagtgttgtgagagttatgtgaaacacctagcacactacacagaaggtatgtgctactcctcatttccccttcctcctgcttccttgctctcccaaccataagacattttctctttctttctttctttctttctttctttctttctttctttctttctttcttgctttcttgctttcttgctttcttgctttcttgctttcttcttcttcttttttttttttttttgatggagtcctctgtggcccaggttggagtgcagtggtacaatctctgctcactgcaacctccactccacctcctgggttcaagctattctcctgtctcagcctcccgagtatctgggattacaggcacacaccaccatacctggctaattgttt

SEQ ID NO: 624629 - DNA, 582 bp, Homo sapiens
gggaccatacagattttaatcatcttctttgtgctctgttctgtgtcttctttgtgaggcttttctacccttcagcactattgtttctcaaggatgatttttatcaagaaaaacacgcagagagtagaagaagatttaaatcttagtagaggtttattttagtttattattattttttartttaagctggcttggtgaaattaaaaacaacaacaacaacaactcttcccaaagcaaatgtagtatttgagaataacataggaatgggtccctaacacatgagcaattattatggtgaggagtgagattctgttcactcactgcaagaaggggatgctttcataatgtctctatgtggtggaggagagggctggagtgaaagctgggatcaggtgtcacggggacatcagtcactccttcagcaaataggattctgagttgttgctgctcaatctagggctcaatacagcagtgaataagtgaaccacttaggggaagccaaacactgaatgactgattatgtgaagaatgaatgttgtggtgatatgtagcatactttattttatttttaactttttcagt

SEQ ID NO: 624630 - DNA, 602 bp, Homo sapiens
gggaattcacaatgcacctcagagaaaggcaggaagattgccccagatttacattatagttagatttgcaaggtactttcaatctgtttgtaaatttagtaaactctatgtggttctgtccagacttttattaactttcttagttgcctctttaagtttccaagttaataatttagttattaaagagaagcatctgcaattagktgcactaattcccaaactgatgttcaaattaaaaaatttgtagattagaccaggtaagtcataccttatacagatgggagctagaacgagtcctgaatttatgatcatgtggcatgaagtgaagaatcagcacttattttatttactgaaatattgcagagagtcaaattctaaatatatcttccgtcactgtcggcaacagccttctaacacttttgtctgtctcaaatcttgccacattatgaccacagtgatcttgccaatctctctgcatggctcctgctgtcatttccagccacatctcccttgggtctctaaccctggcactctactgtccatcaatcctgaagtgcttggagtcttcccaacatgctctcttgtgctttgtttctttgcgg

SEQ ID NO: 624631 - DNA, 540 bp, Homo sapiens
tatttctttagggattatcttccttaatatagcatgctccctgggtgggaatgggagcaaggtgtggcccccagaattcaggatgtttgctacaaactaattttaacatcatctaagtaaagcatacatctaaataaagcatctaaataaatgggtgaataaacgttgtctctgttcaggggtctcagaatatatgcattatactaccccgttaggtcctatactactctgaaagtccatgaccttctctggtcctgtgggatgctgtgagctcatcatcctctgctcagagtgagtaagacagggaacaggaaggcatccttcttgctgggcarggccaagccaggctgctcctgaggggccatccttagcagaccttgaaagaacaacccagtgcagcctctagcctctgggcctgggcgagggatagtgctctcttcagggaagggtagacagtctatggataactattccattcccacttggctcttggcaactcatacaagctcccagtgtagggctgttgttaaggtgtctgtt

SEQ ID NO: 624632 - DNA, 570 bp, Homo sapiens
atatttctttagggattatcttccttaatatagcatgctccctgggtgggaatgggagcaaggtgtggcccccagaattcaggatgtttgctacaaactaattttaacatcatctaagtaaagcatacatctaaataaagcatctaaataaatgggtgaataaacgttgtctctgttcaggggtctcagaatatatgcattatactaccccgttaggtcctatactactctgaaagtccatgaccttctctggtcctgtgggatgctgtgagctcatcatcctctgctcagagtgagtaagacagggaacaggaaggcatccttcttgctgggcaaggccaagccaggctgctcctgaggggccatccttagcagaccttgaaagaacaacccagtgcagcctctagcctctgggcctgggcgagggatagtgctctcttcagggaagggtrgacagtctatggataactattccattcccacttggctcttggcaactcatacaagctcccagtgtagggctgttgttaaggtgtctgttgatcttgcctgcatggctcttcagatctc

SEQ ID NO: 624633 - DNA, 614 bp, Homo sapiens
caactgaatatcactttttaacatcagcctacaaacaaaacattgaatattaaactatagttacagaacagaatgtgaatgctataaaccctgtgaagtgaaagtaatggtcaagttgacagaagtcaggaggtaggaatagatggtaggcaggagatgtgatgtagggtggggctgtaatctcttcatctaatgtaatggatggtcaagagagaaaattaaaagctaatgaaataacatatgaaggcttagagatcttatttaaagttataaagttaagcagtagaaaaactaaaaataatagtgctaataacacctgttggggagggaaagggagaaaatataattaaggtaattttctcagcttttgtatcactgagtcaaaaagttaatatctataattgagaaatcatgaaagagacattggacatatttatgaccaccaatgactaaactgtgactccaaagagtagcagaactcagaatggggagtacgacagaaaactttccttttttaaatattctgtataatttgatttttaaataatggatattagtgyttttaaattttaatcagtgggactttgctatttcatttctgccatagactggtt

SEQ ID NO: 624634 - DNA, 631 bp, Homo sapiens
gaattctgccaagactgggtccttctcttcaaggtagcaagttctcttctggcccagggtgtgtttagaagggcctgggatgcggacctcatgactctcactggtgytctatcctgctgtagctgagctggtatccaagatgcaagacaaaatcttctttactctttgtttccctcctagtaagcagaaggaaggagtcaccttcactgctgcaagctgcactgcctggggttggaggagggatggcacaagcactccttcagccctcaagctggtgtctccctaggtcatgtgccaccgtagtcctgtggctctgagcctgacccagcactaggagttgcctaggaattgcaatctctgtgtcctagactgcctttccgtttacctaggaccccagagcactttggcctgcggttgccaggcttgctgagaaactcgagttcccactgatgggatgggtgattcacctctagctaggactggtccagatgttccttccatgcatgggaaccagctgagtccagcacagatttactctccactatggtagggcagcactgagtccaataaaaagtccctcagttgctgtgctctttttcccccaggtgcatagactggcggctgccagggg

SEQ ID NO: 624635 - DNA, 623 bp, Homo sapiens
ggcacctcctttcttagatgtcagtaggggtactgttaatctcttaagtcacactgtacaaatagccaactcttctccacttgtatatggctctctaaagataagatttctgcacttggaaggtaaaaaaaaatcaccagatacttggacttattgttggaaaacaatgtttatgacgatgaagctgtataaaagtaagtatattttgtatgtacaaaatataaattaaatggacacttctttatcattagctttcaatctgctatgtatatccttataatgataatattgggaatgatgcagacacctgagaagaaaacagaggtatgtaaaataaatgactaaatgataaatgagccttatctatcatttgtaaaagatggacagcaattcagcaattgtagtgaytgtagcagcacttagcttctgtcgtataatgtttactcagagaaaagtcatgaaatcttatctcctgtgcatataaacagacttaaaataataagctttaggttctgggatagcctcagccacttccttcttatgggaggtggacaaagcacttcatccttgtgggtgtgtacttcttcattttctgaattttttcagcttctgggttcagatag

SEQ ID NO: 624636 - DNA, 388 bp, Homo sapiens
aaattaattcccaaataaacatagagaaagtagaatgaaaaaattgataaaaatagggaaacaactgaaatgggaaacaaagatacaataaagtgaaacaataatgtcaaaatttgttcttggaaagattaataaaktatacaaatttctggaaagattgatcaacatttaaaaaaagagaagacacaattttttatagaatgaaacaggaaaccagctaccacagagataagaagaaaatattataatactgcaaacatgattttattattttcaataaattttaaaacagactatagaggaaaattctgggaaaatatgaattatgtattaaaaactgacaagacagaaaagtaagctttatatagtcctactatcattgaaattc

SEQ ID NO: 624637 - DNA, 533 bp, Homo sapiens
gaattctttatatgttatggatgtaagtcatttatcagatatgtgatttgcaaatattttctcttaatctctaatttgcatttttgttcccttagcagtgtctttggtagggcaaaagttyaatatattaaattttccttttatggattatgcttttggtactacatacaagacctccttgcctagctccaagtcaagaagattttctcctatgttttcttctaaacattttacagtctaacattctgcatttaggtctataatccatttggaactaatttttgtgtaaaatgtaaggtttgggtcaaagttgtgattttttgcatatgaacgtccaaacattccaacagcattatttgttaaaaagatgacagtactcttgatcacatcacaatatattttaattatctttttccatgcatactccatacattggagtatgtatttctcctgccctgagtctacaaatcatctttgtgtgtgggaatctatcttagaaacttgaacagttagtactcagtaaatattggttg

SEQ ID NO: 624638 - DNA, 533 bp, Homo sapiens
gaattctttatatgttatggatgtaagtcatttatcagatatgtgatttgcaaatattttctcttaatctctaatttgcatttttgttcccttagcagtgtctttggtagggcaaaagtttaatatattaaattttccttttatggattatgcttttggtactacatacaagacctccttgcctagctccaagtcaagaagattttctcctatgttttcttctaaacattttacagtctaacattctgcatttaggtctataatccatttggaactaatttttgtgtaaaatgtaaggtttgggtcaaagttgtgrttttttgcatatgaacgtccaaacattccaacagcattatttgttaaaaagatgacagtactcttgatcacatcacaatatattttaattatctttttccatgcatactccatacattggagtatgtatttctcctgccctgagtctacaaatcatctttgtgtgtgggaatctatcttagaaacttgaacagttagtactcagtaaatattggttg

SEQ ID NO: 624639 - DNA, 533 bp, Homo sapiens
gaattctttatatgttatggatgtaagtcatttatcagatatgtgatttgcaaatattttctcttaatctctaatttgcatttttgttcccttagcagtgtctttggtagggcaaaagtttaatatattaaattttccttttatggattatgcttttggtactacatacaagacctccttgcctagctccaagtcaagaagattttctcctatgttttcttctaaacattttacagtctaacattctgcatttaggtctataatccatttggaactaatttttgtgtaaaatgtaaggtttgggtcaaagttgtgattttttgcatatgaacgtccaaacattccaacagcattatttgttaaaaagatgacagtactcttgatcacatcacwatatattttaattatctttttccatgcatactccatacattggagtatgtatttctcctgccctgagtctacaaatcatctttgtgtgtgggaatctatcttagaaacttgaacagttagtactcagtaaatattggttg

SEQ ID NO: 624640 - DNA, 503 bp, Homo sapiens
ttttgaaaagttaacacagaaaagagcaaaagaaaatgatatcccttatcattttccaggctgctccttacaggtcacttcccctgagaagcctttaatctaagtaagactcccttgttacaatcttacaccaaactttttattataccttaatagcaccactgaaagtaataaatgatatacttgtgtgattatgtgcttaaagctagttggattcacaagctctgtatccaggaggattgagaccatgtctcttatttacctctgatcttcagcacagtacagatcataacaggtactcaaaactctttgctgacatcacctgtgtggtattcttgccaagcattttaaactgaatcatgagaaaatgagamaaatcaagactgtgggacattttatatgacaatttgtctgaatttttcaaaactatcaatggcatgaaacacaaaaaaaggcaaaggagtaatttagattaaaagaataaagagaaatgacaattcaat

SEQ ID NO: 624641 - DNA, 585 bp, Homo sapiens
ctttgtgacctgtgctttgtgccaacctcctatctcatcctgtgacttagaaagcctttatttctaggaatgcagctcagtaggtgtcagcctcattttacccagcctctattcaagatggagtcrctctagttcaagcatctctgacaattttgattgtctactgttggccgggcatagtggctcaagcctggaatcccagcactttgggaggacagggcaggtggatcacttgagcttaggaatttgaaaccagcctggccaacatcgtgaaccccccgtctctactacaaatacaaaaattagccaggcttggtggcaggcacctctagtcccagctacttgggaggctgaggcaggagaatcagttgaacccgggaggtggaggttgcagtgagctgagatcgtgccactgcactccagcctgggcaacagagcaagactccatctccaaaaaaaaaaaagtcttctgtagggatacaaatgattgagtttcgtatgttcatctctacacaagaagctataggatgaaatatcagagaataaattttaataaccaaggttgaatggacagagaaggccaaa

SEQ ID NO: 624642 - DNA, 592 bp, Homo sapiens
  misc_feature 438: n = A,T,C or G
tgggaattcctcatcctgttagtgggtaacactaattcaatcaagaagaaagggtttgttgaacagacgctctscctgcgatttcagcctgccggatcatcttggtggaagttcataaatgcgtctgaaatgctcccagcctttcagtctgaacacgcggttttggcagttgtgaacttcaagtggacctatttaagctgatcagaggaaacaggctgacagtgagctgattaaaaacctcttagggacccttctttaaagagggaaaggagttatttttttccatcatctttagagacccaggggtgggtaataaaaaagaaaggttgcaagtggggtgggagtgggggttgtgggggaaaggaaaacatccattttagaacacgaagaaaaacaactgctttgccagccctctcccaacctcctggctgttgtcantagcgaattgagggaatgtttgaagataacaggaaaggaaatcatgaaatgatatggcaaggatgagtgaggcttaaaaagacgaacacaagctgtttccttgacccaggcttatctcaagcctgccaaaaaaataaccatctatcacagaccc

SEQ ID NO: 624643 - DNA, 592 bp, Homo sapiens
  misc_feature 438: n = A,T,C or G
tgggaattcctcatcctgttagtgggtaacactaattcaatcaagaagaaagggtttgttgaacagacgctctgcctgcgatttcagcctgccggatcatcttggtggaagttcataaatgcgtctgaaatgctcccagcctttcagtctgaacacgcggttttggcagttgtgaacttcaagtrgacctatttaagctgatcagaggaaacaggctgacagtgagctgattaaaaacctcttagggacccttctttaaagagggaaaggagttatttttttccatcatctttagagacccaggggtgggtaataaaaaagaaaggttgcaagtggggtgggagtgggggttgtgggggaaaggaaaacatccattttagaacacgaagaaaaacaactgctttgccagccctctcccaacctcctggctgttgtcantagcgaattgagggaatgtttgaagataacaggaaaggaaatcatgaaatgatatggcaaggatgagtgaggcttaaaaagacgaacacaagctgtttccttgacccaggcttatctcaagcctgccaaaaaaataaccatctatcacagaccc

SEQ ID NO: 624644 - DNA, 592 bp, Homo sapiens
aaatctggctgtgaactaagaatggtttttacatgtataaagggttgtaaaaaattaaatttaattacaaaaaattagccaggcatggtggcgggcgcctgtagtcccagctactcgggaggctgaggcaggagaatggcgtgaacccaggaggcggagcttgcagtgagctgagatggtgccactgcactccagcctgggcaacagagtgagactccgtctcaaaaaaaaaaaaatttaatttaatttaaaaagaaatatgtgaccaggcacagtgactcacaactatcatctcagcactttgggaggctaaagcaggaggatcacttgagaccaggagttcaaggccagcctgagcaacatagcaagacctcatctctataaaagaataaataaaattagcctggcaagggggtacggacctgtggtcccagctatttgggaggctgaggcaggaggatcactagagcccaggagttcaaggctgmagtgagctgtgatcccactactgcactccagcctgggccacagaagagaccctgtctctaaataaataagtaaataactgtatgtgacagagaagtaggtcacc

SEQ ID NO: 624645 - DNA, 574 bp, Homo sapiens
ctccccactgctagaggtaaattgtcaggcagcctagcaacgtggccagctgaatcacagcattcttttcaatcaagctacaaagctccaaacgactgaaaaagagagttcactttggaaacttgaactcttgagattgttacaaaagaaagagaccaaaaagaaggcatcccttaacataattagctgcttgctgtttcaccaaagagagggatatttgcatacaacaatagccaatagaattggctttcatagaattcagtgtggcagttgtattatcccaactccagatggttgtagcccctcaagagcaattattacctttcttttaataacagaaccccagttattcaagcatttcacaaacatctttgttctgtgatcgagtgctggcaaatgaaatacaagcagatacgttgaaargtaccttcaggaagtctccaaaaaggtgagccagggcaccttcttcttcctttcctctttcagtcggatgcaattttagtgtgatggctggaacctcagcagccatcttggaccttaagtccaaggaacaaaaagctaaggaagacagagc

SEQ ID NO: 624646 - DNA, 540 bp, Homo sapiens
actagaccgttttccagtcattctcattttatcaatatctccttcaatcttgagattccttcttaaccatttccttctaaaggtctattctaactgcctccaaatgatttcttcttcttcgtcattatcttaatgcttccttagccatgagcttgtttgtacaaatgtaaagataaatggtgactggcagaatgcctgtgcttgaaagatacaaacgggcatatttgccaatttcttctctcttatagaactgtggtcaaactactccgccttcattacaatcacaaatgtgtgagaatgaaggagaggccgaacatgcctgtaatcttggcattttgggaggctgaggtgggaggatccccttgagcccagagtttgagaccagcctgggcaacatggcgaaaccctgtctctacaaaaaatactgaaaattagcctggcatggtggtgcaggcctgtggtcccagcyactcaggaggctgaagtgggaggatcacctgagcccaggaggtggaggcttcagtgagccctgattgcatc

SEQ ID NO: 624647 - DNA, 616 bp, Homo sapiens
attggagacatagatgatttgaacagcacaattaccartattaatctactgagaaatgtacatacatatatatgtatgtatgtgtgtgtgtgtctgtgtaaaatgtgcccagttcctggtcaatacacattctttttaagtactcataggccaatttataaattgatgacagttggccctctgtatctgtggttccacaacttcagattcaatcaatcttgagtagaaagtgtttgaaaaaaaaaaaaaggtaacaataaaacaatgaaaacaaaacaatatgaaataataacaaagcaaaaacaatgaaaaactactgattaaaaactacaatataacaactatttacatagtatttacattatattaggtactataagtaatctagcgatgatttaaagtgtataggaggatgtgtataggttataatcaaacactactcccattttatatgaggaacttgagcatctttgggttttggaatccacgggggtcctggaaccaatgcccctgagggacacctatacttaacagctcataaagcaagcttacaaatctcaaagtccctagcacgatacaaataaaccagaaatcagtgtttaaaagataaacttaa

SEQ ID NO: 624648 - DNA, 618 bp, Homo sapiens
attggagacatagatgatttgaacagcacaattaccagtattaatctactgagaaatgtacatacatatatatgtatgtatgtgtgtgtgtgtctgtgtaaaatgtgcccagttcctggtcaatacacattctttttaagtactcataggccaatttataaattgatgacagttggccctctgtatctgtggttccacaacttcagattcaatcaatcttgagtagaaagtgtttgaaaaaaaaaaaaaggtaacaataaaacaatgaaaacaaaacaatatgaaataataacaaagcaaaaacaatgaaaaactactgattaaaaactacaatataacaactatttacatagtatttacattatattaggtactataagtaatctagcgatgatttaaagtgtataggaggatgtgtataggttataatcaaacactactcccattttatatgaggaacttgagcatctttgggttttggaatccacgggggtcctggaaccaatgcccctgagggacacctatacttaacagstcataaagcaagcttacaaatctcaaagtccctagcacgatacaaataaaccagaaatcagtgtttaaaagataaacttaaaa

SEQ ID NO: 624649 - DNA, 537 bp, Homo sapiens
gctttatagtcccaactctccattttcttgagagaccctgagtaagatacttaacttctcagggcttcagtatacttaactggaagacaaaaaagactgggttgtaagttcctgccaactctaaaataataccattctataatgtagttaattcatggactgttgaacctctaagcaaaagtttctctgaggaacctaatcatattttgcaaggtaatatacatcctaataaagactgaagatgtaagagtctgtactgatgagacacttgcattcagttttagcttcaaaggaaatgtatgttttgttagcaagattaagactaaagattaagatttaaaatccctacattaattagaggggaaaaaagtgcatggatggagaaagaattttaagaaacmaataattaacaatactgtattgtatacttgaaatttgctaagagggtacattttaagtgttcttatcacaagaaaaaagaaaaaaatgctatgtaaggtgatggatatgttaattagcttgattatgatattattt

SEQ ID NO: 624650 - DNA, 533 bp, Homo sapiens
aaagagttactacctattatttccttttagcttcacaagaccatgaaatagaacacttactccggttcccattttgcagatttagggaaaaaacactaaaaggcagaatgatttgcagttacattgattcagcaaacatactctaaattgtgaggatagatacagagaagaaaggtcgagtttctgtcctccaggaactctcagtttagtgagtgagtcatagttagtcttgcttgctctaagcaagacaggggtgtcagaggagctccatttctattcttctttcctgtgaaaggaaggagatggcgattagctagtcttctgtcactccacattcactcaacatatactgaccctcaattaagtttaaaaaaaaatcatggaaaaaakttattctaaccacaagtggctggccaggataatagtgatctattcagtggcatgaatatggatcataaccacattgtgaagtgaccattcccaagtcttccacagagtcaggaaggatgttacctcacaaaatataattgcca

SEQ ID NO: 624651 - DNA, 533 bp, Homo sapiens
aaagagttactacctattatttccttttagcttcacaagaccatgaaatagaacacttactccggttcccattttgcagatttagggaaaaaacactaaaaggcagaatgatttgcagttacattgattcagcaaacatactctaaattgtgaggatagatacagagaagaaaggtcgagtttctgtcctccaggaactctcagtttagtgagtgagtcatagttagtcttgcttgctctaagcaagacaggggtgtcagaggagctccatttctattcttctttcctgtgaaaggaaggagatggcgattagctagtcttctgtcactccacattcactcaacatatactgaccctcaattaagtttaaaaaaaaatcatggaaaaaagttattctaaccacaagtggctggccaggataatagtgatctattcagtggcatgaatatggatcataaccacattgtgaagtgaccattccyaagtcttccacagagtcaggaaggatgttacctcacaaaatataattgcca

SEQ ID NO: 624652 - DNA, 444 bp, Homo sapiens
gactactcttatttcctttgtcacatgatccacacactaaggaaattcaatcaaaagcaataaatattcacagcacccatgaagaagcttgataattgaggtcaagtgtatttttgcctagttttaacttaatctactttgtcattgttagttttattagactttctcatctctaytctctctcaaaggaataccgagtaaagagcatattaagtcaagccagatccagttccaactgatcttttggtccccagaatttccactttcctaacttgaccattacccatgggacactaccaatttcatgtattttcactgaatttgttgtgttgtcatgtacaacaccctccacttcccaacccacccccgcgaacgccgtctgactccagaaacccaaacttgtgctcatttttcattattccaccttctcctgatagtgtggtt

SEQ ID NO: 624653 - DNA, 540 bp, Homo sapiens
ccaatggccaactgtggtaaagactattacttgtcctacaataagcatttaatactcccccttagtaagaagatccacattttttagttaggcacattgctatgcagaatagagttctttccattcccttgcaagtaagtgtggccacaaggccaagttctacaaatgggatgtaaagagaatattataaagtacagaatattataaagtatttttgggtgagctaagttacaggattttaaataaagtactttttgatgggctaaagtagctaagaattaacttgttttccatcacattcctcaggaacatatatattggtcaggggaaaggagaatttgatagcttaaaaaataaracatcaaaccaatccttacagatgctctccttgccacttagaaaagtgagaaaagagcatctggatcgttctctccctttggtccacacacaggtcagctgcaaacagtagcttccttcttacagagtccatcatctgaaagactggatgcccactctcacttggctttcctcatcacctca

SEQ ID NO: 624654 - DNA, 540 bp, Homo sapiens
ccaatggccaactgtggtaaagactattacttgtcctacaataagcatttaatactcccccttagtaagaagatccacattttttagttaggcacattgctatgcagaatagagttctttccattcccttgcaagtaagtgtggccacaaggccaagttctacaaatgggatgtaaagagaatattataaagtacagaatattataaagtatttttgggtgagctaagttacaggattttaaataaagtactttttgatgggctaaagtagctaagaattaacttgttttccatcacattcctcaggaacatatatattggtcaggggaaaggagaatttgatagcttaaaaaataaaacatcaaaccaatccttacagatgctctccttgccacttagaaaagtgagaaaagarcatctggatcgttctctccctttggtccacacacaggtcagctgcaaacagtagcttccttcttacagagtccatcatctgaaagactggatgcccactctcacttggctttcctcatcacctca

SEQ ID NO: 624655 - DNA, 582 bp, Homo sapiens
gaaaggaaatgaccattttatcctttttgctgcatttcacaraatgaatattaggttatttataacaaaaacatgtattaggttgttaagagattaattagtatataaaaaccacacaagaagatttagcagttatttcacagatagagggtttactttttcaggaaagaaaatgcatacccgtaactagaacacattctgtctggaaggatacctttaccagtgactgtgctgggtagtggaaaatggcaccagctttgaagttgtcttaacctggattcaaattccatatgctctcatcattaactctgaacctcagcttccttgttggatgagatttttattatgattcaaaagaagaatgcaggagcaataacataaactttgatttgagccaaacttcagttcgctctgactcataaaatcatggaaccagtgagataatagactaggtgttatgtttctcatcttgcttggacaggtttaagctattaaagaaatttgaagctggtcatagtagctcacttctgtaatcccaactacttgggaggctaaggtgggaggattgctttggtccaggat

SEQ ID NO: 624656 - DNA, 514 bp, Homo sapiens
aatctcatctgcgaaatcccttttgtcatgtaagctaatgctcacaggtccggggatcagratgtggacattttaggggtgtcattatcctgcctgccacgctgtggttattcacctttctatgtgttcatgctttggcacccccagcagatgggaagctcctctggggagtggggtactgcttctttgtcattctgttccccatagcaattgcccaattcagatactcagaaggtatttttcaattagttttccttcctgactcctggtttgaataacacagaagtgtatttctaggtagtagctgtgttgagccagccatggtatcttaccttcttgctagtcagtgggatacaaagatgattcaatattgccccaattttcaataaatttgccaggtcgggcacggtggccctcgcctgtaatcccagcattttaagaggccagagcaagaggattacttgagcccagaagcccaagaccaccctgggcagcatagtgagacctcgtctct

SEQ ID NO: 624657 - DNA, 623 bp, Homo sapiens
ctccaaattccttttcagaaaactttgttcaaacttcaaactatgtagctgcccacaagtgccacagctgagctctggggacatagctatggcctttatagctgattttttttttccagggcactgcccgcacaatttcaaacaacagaatttaatccatgggaacagtttttatatctaattaaatgtgttagagttaattgatgcgagaaacaacaaatatgttcaactgcaaagagctcggaaccasgagttcaaaagccagctaaaagccctacccaatcttatgaccttgagcaagtcatccaacttcctgaatgttagtttctttatctgcaaacacagggtcagaaccagagagtctctgagcacccctcagctatacatgccttgatttctaataacatctaagaatgcagctggctgtttttccttttctaatattctctggtcattacttggatcactgacttttgagtcctttactgaatatgagactgtaattcctggtcctcagttccccaggtcccctagtcccttccatagacacaaccctccaacttcccttttcagttcatacctataaggagggtacgctaatgagagctgggcagactcagctg

SEQ ID NO: 624658 - DNA, 564 bp, Homo sapiens
tctctaggaagttccaaactttcccgcatcttcctgtcttcttctgagccctctaagctatttcaacctctgcctcttaccgagttctaaagttgcttccacatttttccrtaccagtatagcagcaccccactcttggtaccaatttactgtataagtctgttctcacactgctgtgaagaaatacctgatactgggtaattgataatgaaaagaggtttaattgactcacagttccatatggctggggaggccacaggaaacttacaatcatggcagaaggcacctcttcacagggcagcaggagagagaatgagtatacagcgaagagggaagccctttgtaaaagcatcagatctcatgagaactcacggtcatgagatcggcatgggggaaactgcccccatgattcaattatcttcaccttgtctcacccttgacacgtggggattattacgattcaaggtgagatttggatggggacacagagacacacaaactatatcaacaccctttagtcttgacactcacaggtacttgcccaaatccacagggaaaagcttg

SEQ ID NO: 624659 - DNA, 658 bp, Homo sapiens
ttccttttaacaggttttgggaaactctccaatgttctgaaatagtctttgttctggctttgtgattggttctgtggagaggcgctgaatctctttggggacagctgggaccctttctgtgtttcactatgtgagactgaagtggtrgaaactccctgctgacatttcctctccttcctcagcatctagtgcagggatccgcatacctagcaattaccagaactgccttgagagctttgaaagagtacaacctcctgggctttaatctccacagaatccaggtctcaactggtctgtcataggacagggactcttccaaatctaaaagctgggagacaatgagtgggtgattaagtaatagcatatggagtcgcatgacctgggttttgaacttagacacttattatcctgcaagttccttgactaaatagttaaaatctgcttcttggtttcctcagctataaaatggaaatcgtaacatatacctcactcagtaggctgtgggaggaagacaaaactgaggtccctgtggatgtgggtagtcagatgcacagtgccaatgggaccttagtacctgccggtaccgccacaagagctgcttgggccaggttcctcatctgtagctttactaagagtacggctttgttactaaaccatg

SEQ ID NO: 624660 - DNA, 566 bp, Homo sapiens
tgttgaatttaagggttctgtgaggaggttcaaattcagatggccacaattattctggaggctcccttggattagtgtttcttaacctttttgaatccattttctcttcatcagcataaaaatcacatacattactgttatttttataaaattcaaaatagatgaaatattataactaaaaacaaatcaaaccaatgagacaaaataccattttctttccagacacacattctcccctccacagattctgatgtgtaaacatttctttaccctcttctccaaatcactgaactgaataattttcataggcataatactgaatcagtaaaattttgccatagttgttttgatgcataagtatttcaatacctctgaatttgtatcttttatgatacctytgtccttttttcttacttcactttttactgtctgttctgttcattttaagtggtataatttaactcacacccaatacctataaaattgtaaacaatactattttactttccctcttcttctatattagttagttgcattctttctactctgtgagaacatatcatatt

SEQ ID NO: 624661 - DNA, 565 bp, Homo sapiens
atggaccacattagccagcctactcaaaatctctgtgaagggctttcccaaacaagccagtctgcaaagactagaataaatctctacttcttcagatgcatggacaccaacagctagtcacaaagattaaaaacaatcagagtaacatgaaatcattgaagaaataaaataaaacatcagtaaccagtaaccaatcataaagacatggggatgtataaacttcctgaccaacaatgtaaaatcattgttttaaggaaactcagcaagcttctagaggtagtgaggttctctatccttacacctgaaatctggacaggtatgttaatggtggttaggttcactatgtgtccaataaggtatgctgagataatcctacgtgacttcagaagctgaggcaaaaaggtcaaacagtttctgcctggttctcttggaatgcatgctcttgaaaatcttcctagaattcagcttccatgctctaagaaaccataatggraatgttgcatctacacacttacatcaacaatcccagttgttccagacttgagtcattcccaacccaggtgtc

SEQ ID NO: 624662 - DNA, 569 bp, Homo sapiens
ggacctccttcttctctctctcttactccctctcttgctcctactcttgccatgtgatgcrcccattctcgctttgcctttcgccatgagtaaatgcttcctgaggcctccccagaagcagagcagatgccagcaccgtgcctgcacagcctgcagaactatgagcatattcaacctcttttctttataaattacccaggagctggtatttcttcatagcagcacaagaacagaccaacacagcaagtaaagaaaactaaaaaggagtggccaatgaagagggaataaggccaaaagagcatgatgccccagatgccaagcagagagagggattgaaggaaagatggtcaagtggataataataggtaatgctctgagatgaggacagtgaattaccaagtggatttggcacaatagaggtctctgataacttcaacttgaggagttttagtggtgtgaggtgggtacagggaacaaaagcacgtatggcataagagtggcataaattgacataagagtaatgatgggctagggagtagaaacaaggagtataggcatgttttttcagg

SEQ ID NO: 624663 - DNA, 569 bp, Homo sapiens
ggacctccttcttctctctctcttactccctctcttgctcctactcttgccatgtgatgcgcccattctcgctttgcctttcgccatgagtaaatgcttcctgaggcctccccagaagcagagcagatgccagcaccgtgcctgcacagcctgcagaactatgagcatattmaacctcttttctttataaattacccaggagctggtatttcttcatagcagcacaagaacagaccaacacagcaagtaaagaaaactaaaaaggagtggccaatgaagagggaataaggccaaaagagcatgatgccccagatgccaagcagagagagggattgaaggaaagatggtcaagtggataataataggtaatgctctgagatgaggacagtgaattaccaagtggatttggcacaatagaggtctctgataacttcaacttgaggagttttagtggtgtgaggtgggtacagggaacaaaagcacgtatggcataagagtggcataaattgacataagagtaatgatgggctagggagtagaaacaaggagtataggcatgttttttcagg

SEQ ID NO: 624664 - DNA, 569 bp, Homo sapiens
ggacctccttcttctctctctcttactccctctcttgctcctactcttgccatgtgatgcgcccattctcgctttgcctttcgccatgagtaaatgcttcctgaggcctccccagaagcagagcagatgccagcaccgtgcctgcacagcctgcagaactatgagcatattcaacctcttttctttataaattacccaggagctggtatttcttcatagcagcacaagaacagaccaacacagcaagtaaagaaaactaaaaaggagtggccaatgaagagggaataaggccaaaagagcatgatgccccagatgccaagcagagagagggattgaaggaaagatggtcaagtggataataataggtaatgctctgagatgaggacagtgaattaccaagtggatttggcacaatagaggtctctgataacttcaacttgaggagttttagtggtgtgrggtgggtacagggaacaaaagcacgtatggcataagagtggcataaattgacataagagtaatgatgggctagggagtagaaacaaggagtataggcatgttttttcagg

SEQ ID NO: 624665 - DNA, 569 bp, Homo sapiens
ggacctccttcttctctctctcttactccctctcttgctcctactcttgccatgtgatgcgcccattctcgctttgcctttcgccatgagtaaatgcttcctgaggcctccccagaagcagagcagatgccagcaccgtgcctgcacagcctgcagaactatgagcatattcaacctcttttctttataaattacccaggagctggtatttcttcatagcagcacaagaacagaccaacacagcaagtaaagaaaactaaaaaggagtggccaatgaagagggaataaggccaaaagagcatgatgccccagatgccaagcagagagagggattgaaggaaagatggtcaagtggataataataggtaatgctctgagatgaggacagtgaattaccaagtggatttggcacaatagaggtctctgataacttcaacttgaggagttttagtggtgtgaggtgggtacagggaacaaaagcacrtatggcataagagtggcataaattgacataagagtaatgatgggctagggagtagaaacaaggagtataggcatgttttttcagg

SEQ ID NO: 624666 - DNA, 665 bp, Homo sapiens
tttgtttgccaatgtccttgtaaaacaagccagtctcatcagcattgaaagcctactcttgtacataaccctttcctgtataacagttggcagatatttaaaaaaattcatctgcagtcttctgatctgcagaacctgcctcacatgcaagtttaatgtttctcaagctctgttgccttttgaaatgtgaaagccagccagcactagctcagaagagtttcacattttcatacccctgggtgtgatggttaattttatgtgtcaacttgactgggccttggggtgcccagatatttggttaagcattatttctgggagtgtatgygagggtctctctggatgagattaacgtttgaaacagtagactgagtaaagcagattgtcctatctaatcagtcaaaagcccgaatagaataaaaagctgagtaagaaggaactgtctatctctgcctcactgtcttcaagcttgatcattggtagtctcttgcccttgggcttggactagaatttaagccattaaattttttaaaaagagcttaggtcattgctaattccttataataaattactctctctccatatatatatttatatatgtatatatacactatatatgctatatatgagatacatatattatgtatatgctacattatatatatata

SEQ ID NO: 624667 - DNA, 449 bp, Homo sapiens
agcagctgctttcctggcgtgctcattctttggaaattattcaagtaatctatgtagaagaaaaacaagtggtacttactgcctccatcgatggctcagtaaggtaggccaagatggcatcatactgtgaattcagtactgtgagcatgagaggtaaaggattttaagctaaagttgaagtatatmgttcaaatgcaatcttggtaaactgatttaaataaataagtaaatagatgacacaaaaggactttgaaaagatggccactgatttggagttctctttcatgaccaaggacatgagatgtcacattcatctatattaaaaggtatcacaaatgcttttgataaaagtgaagttttttttgtagaattacttcaaagaattaagcaagatagctatctcggagagttagacccaagtcatagaggggggctcagaatcagaagtc

SEQ ID NO: 624668 - DNA, 402 bp, Homo sapiens
aatgcatcaaagctttctcagtgctctagtaaggactctgattcagaggtaagtcaaatcctgaaggctttgttttcaaatttatatgtaagraaaaatagattgttgctcaaactgaggaaatttttcctacatgtgaatgacgagctatattattttttcattctaaactctactgtgcagaaagttcacattttattcatttgaaggacttctctgtatctttcacattttaaactgcaatacatttaaattaactctgtatatttcctgaatcactgtatgttcgattggtgagtatctcaaggggtgccacagttaaaaccgaggcagagtgataatctgtgaaatgaaaaattattatcaatttactgtttaaatccttaatatgctcttgaattc

SEQ ID NO: 624669 - DNA, 402 bp, Homo sapiens
aatgcatcaaagctttctcagtgctctagtaaggactctgattcagaggtaagtcaaatcctgaaggctttgttttcaaatttatatgtaagaaaaaatagattgttgctcaaactgaggaaatttttcctacatgtgaatgacgagctatattattttttcattctaaactctactgtgcagaaagttcacattttattcatttgaaggacttctctgtatctttcacattttaaactgcaatacatttaaattaactctgtatatttcctgaatcactgtatgttcrattggtgagtatctcaaggggtgccacagttaaaaccgaggcagagtgataatctgtgaaatgaaaaattattatcaatttactgtttaaatccttaatatgctcttgaattc

SEQ ID NO: 624670 - DNA, 569 bp, Homo sapiens
gtaattatttgaacctgggaggcggaggttgcagtgagccgagattgagccactgtactccagcctgggggacagagcaagactgtctcaaaaaaaaaaaaagaaaaaaaaagagaccttataaggaaataaccctgttaatgcaatggtattcatcttaagttttagtacttcagaaatatattttcatttactcttcttattccttctaaatttctccttatgacaaaacaaaacagtaayacaggtgtgcatactggtctagaagactgtctgtttctcttcctatgaacgtctttatctcgtctttttcatttctgcttcatactgcatcttctcttactgccacttgggtaccacggcagtggctatcttgaacatctttcataaaaacatcactgtcaatttgtgaggatattaagtctgctgagctcctttggggttatcttttttatatttccagcatgcatcttactatttcatttactttggaagcgtttagccatgttttcctgagaagccttatcagttcacactgtaggctggtagaactccacattttgtcttct

SEQ ID NO: 624671 - DNA, 622 bp, Homo sapiens
gctgggaagtccaaggtctgagtgagagcccacttcctggtttgcagacagatgccttctcgctgtgtccttacatggtagagggagagaatatctcttttgtacctcttcttaagggcactaatctcattcatgagggctctactctcatgatctaatcacctctcaaaaatcccaccatcacattaggagttaaggggttaggacttcaatatgaatgtgagggagacacaacattcagtccacagcaaattccagtacattaaagatacaaatatgaaatatgtaaatatgagattattttttaaatttttgagcaagaagttttttgcaatcatatctactaacttgaaaagacattcattattagtgaaaaggaaaaatatgttattaacaatatgtatagtgtttttgtttaaatactttaaaatattcatgtacacatttgcatgtttgtggcatcmtattaagaagtctggaaagatacatgcagaattatttacaatgatggatagaactggagatgtagaaagtacttttcctgaaggagttatgtctagatagtaaaccatcatattattattattattctcagacatttgcattgtcagggatttaacta

SEQ ID NO: 624672 - DNA, 622 bp, Homo sapiens
gctgggaagtccaaggtctgagtgagagcccacttcctggtttgcagacagatgccttctcgctgtgtccttacatggtagagggagagaatatctcttttgtacctcttcttaagggcactaatctcattcatgagggctctactctcatgatctaatcacctctcaaaaatcccaccatcacattaggagttaaggggttaggacttcaatatgaatgtgagggagacacaacattcagtccacagcaaattccagtacattaaagatacaaatatgaaatatgtaaatatgagattattttttaaatttttgagcaagaagttttttgcaatcatatctactaacttgaaaagacattcattattagtgaaaaggaaaaatatgttattaacaatatgtatagtgtttttgtttaaatactttaaaatattcatgtacacatttgcatgtttgtggcatcctattaagaagtctggaaagatacatgcagaattatttacaatgatggatagaactggagatgtagaaagtacttttcctgaaggagttatgtctagatagtaaaccatcatattattattatwattctcagacatttgcattgtcagggatttaacta

SEQ ID NO: 624673 - DNA, 592 bp, Homo sapiens
cactcactgcagttgtgtgagtggcaccaggtgagaccagaagaaatgccccggtggagccagcccacattgctgacccacagagtcatgagcaaatacatgattgctgttgcgagccactcaattttttttcattgtttgttaggcagcaatagatgactartatagaaagaacttacatctttacaatattgaatcctcaaagccatgaacataaatatacctttgcatttatacagagttcctcaaagttttctctaaaatgttatattgatttcttcattaaacttttttccctcctctcttttagtatggaaaaaaatgaaaacactcagagaatttgaaagagttctttaatgaatacctgtattcctaccacctagattccataattaatgtggttttagatatgctctaacacatatccatctatcagtccatccctctatccattagttcatcttatttttttgattcatttcaaagtaagtggaagacactagtaatcctattagcatgcatatcaatgagaatattagtttacaattcttaattttttgaaaaaattcacatacaacgaaatgcagaaata

SEQ ID NO: 624674 - DNA, 563 bp, Homo sapiens
ttagggtaggccctcatctgatttgactagcgtccttgaaaaagaggaaattcagacacaaacatgtacagaaggaaggcaacgtgaagccccggagaaggtggcaatctataagtcaaggaaggagaggccttagaagaagtcagctgcaccaacattttcatgtcagacttctagccctcaaaactgtaagaaaataaatgtccattgtttgagccacccagttgatggtgttttgttatggcagccaagcaaaataatgcagaagtccaggaagcctccagtggcacagagccaggtggagaagaagagacagaggccatggaggggcaaatggaagagatccagaacaactctacccaggcccctcagaaatgggtgtttcaagatgtcctagagcagtatcagtaagactggaaatatttcagctgaatgattcttgtccacagctgtgatctccttttccatccatgasccatgttcccactatagttcccatgctggctcttttccctggtcacgaaccccagtctcacccaggttgggaaccccagttctcagac

SEQ ID NO: 624675 - DNA, 492 bp, Homo sapiens
aagctgtagggagggccctggtaatgtcacaggtgtgagatgagggtgaagttgaactaatgtagtagaggtggggatagacagaattgagagataccacccttagggctggttgttactttcagtgagtgcttggatccatactgaatgagcctactggaaaccatatcatgaacaaaactaacaatagtggatttacttaccaagtgcttctgatgaagccaggtactcgactaagaacttaaatatactaccatatttagaaatgaaaacaacttgatgatggtggcaaagttattttctttatttcacaaatgcasattcctaagacccattggaaccttactaaacccacatcttcagagatggtgcccgggaatatgcatttgagaaccagtgctctcaatgtgcactaagtttttattgccactgctatgagctccaaagcaaatgacatttttattctggggaatggcttcaattaattaaaaa

SEQ ID NO: 624676 - DNA, 609 bp, Homo sapiens
aaccagcaccaacagacttaaacaagtagcaggatttgctagatcactcagggtagctctagaatggatcagagaattgaataatcggacttcaggcaagaaagagccaggaggctctagggatcttggtgaggagaactaatggatcaactccgtaagcctgtcagcagaatgactttgctctagcccaggtgtcattcctctcaaaaaccaaacactctttgtatttttagtagcctaaaaaaagctagagtctgatttgtccagcttgcatcatactcaygtgggccaagggcgtaaggctatggatgggctgatggcaaggaaggatgagttacactcccagccaaagcacacggcaagaagtggggtacttctccaatggcaaagggggtatagtaaacaaagtgaggtggaatggaagctgaataagcaaaaagagcagctgcctactagatctcctgcagagaaggggaggttttggagataaatattttttgatctgcccaccactgcccccactccatgtctgaagccttctccctagtaatccttctctcctacactgtgatatgtgatatgaatagatgctcatatgttcttacaggt

SEQ ID NO: 624677 - DNA, 389 bp, Homo sapiens
accatgttgggcatagaagatgagtaagacacayatgttttctgtccttacagaccctgcagcccagtgggagaaacagacaaacatgcaattatagagcagaagggtgagggctgcaaaaggatcgtggcacagaggagggtgccagaaacaggcacaagaagtcaggaaatgcttcctggaagacatgatgcccagactgagtggagaatgaggaggattttgcaaggagatgagatgatgggcaggattctggccagacaggaccgagctgttgattggttggagggtgcgtgggagagggacatgttaaagatggtaccaaggattctggtttgggcaacctggtggctcgtgatgcccaggtgaatggtgtccttcccgaattc

SEQ ID NO: 624678 - DNA, 466 bp, Homo sapiens
acaaccttgtaaatgtgcttaccatcactgaattgtacatgtagaaagtggttaagagggtaaattttatatatattttaccacaatttttaaaaatccttatacaaccatagctctcctgctacccacttactggatcatttaaatccaatatatagggtttttttattctacagattacattttttctgaaaaacctatttttstaaatagtattatcatactaaagctaaccttataaaaattgtatttcatctaacagaaatttgaaaaagtttcatcttaaatttatttgaataatttaatttctgatatttgtatttgattagttatgaaagtcagtaatagaaacataagcttatctcactagaggtttattttaccctgttggcttggattttgtgataagtgttcacataaaatttagcctctgaataaatctacctgcagcatgtaccacccacat

SEQ ID NO: 624679 - DNA, 602 bp, Homo sapiens
  misc_feature 523: n = A,T,C or G
atgatagcatcactgcactccaacctagacaacagagagagaccttgtcttaaataaataaataaatatatacatacatacataaatacataaataaatgtctaacttgctattacttatgttttgcatttgaatagtgtttctcattactttgtattttgtaatcatttatcaacatgaagcayaaaattttaactaatattttgattaagaaaagaatttgagagaaagtacatttacaagggcaaaacatggcctttcccattaactacacaggtgaagggagagacagcaataaaacaaattaattttacaatgatacgtaccttttaaaaatcatgctgtattgtagaaaatataacagcactttaaattaaataagaatcatgattctctatggctaaaagatccaatattcaaatacacaagcaagatatgtaaaaagaaatcagtcatattgtttcaaatagcaacacaactatcaactgagagtgtattaaatcagaaaacaaatcttgtaaantttttaccaatttaaaagaagccatgagtatttttaaatcaagttctttttatcttccttgatatttattttgcctcaa

SEQ ID NO: 624680 - DNA, 597 bp, Homo sapiens
gcgcctgtagtcccgagtgaggcaggacaattgcttgaacctgggaggcagaggtttcagtgagccaagatcatgccactgcactcccacttcagcctggcaacagagcaagaccccatctcaaaaagaaaaaaatatatatacaatatagatagatagatagatagatagatagatagayagacagacagacagatagatagatctatagatacatcatttttaccaaatgtgggatctaaggcaagagattgaatgcctttttttcctcattttcaaagggaataacattgttatcaattttgtaggactgttgagagcattaaatagtaccacacacataaagtgtttataaagatatctggttgcaagcattcaataagtaacagttattatttttgatgaaacagacattttacctacaacatgtatacaactgtgagatactgagtcattttcagtaagtgtatattttgtagcaaaaaataaatacacttctttgtgtagtaattacaacctttatttaattcacggtttagtgtctgacatacctttctgctaaagtgtgtgaatcaaattattttgtttacatttgat

SEQ ID NO: 624681 - DNA, 573 bp, Homo sapiens
tgttgtatagcctgactaccatagttaatagtaatgtattgcattcttgaaaatttctgagagattttaagggttttgacacaaaaatatgtgtatgaggtgaggaatatctcaatttgtttgatttaataatctaacaatgtatacatatatcaaaatatcacattgcataccataaatgtatataatttttacttttcatttataccttaagaaatctggagaaaaataaaattgcttttaaatggactaaattcacttttctaaaatctcaactatattttcaaaacattagtatctctgtcaataacagggtctaaaaatgctttttcagaatgatcgtaacacaaatttttaaataactagttttkaaggaaattacagatatcgaagcctagacatagaatgtcactaaagaaatggcttctgatttagcctgaatatatgacaggccaagatcagatctctgggttgaaggtcaaaaatatttttaaattgtcctttcttcttcctttctctccctctctctaaaatgtttgaatggaaaggtaactaattaaacgcaggcaaata

SEQ ID NO: 624682 - DNA, 468 bp, Homo sapiens
tttattaattaatttagtaaatgctaatacatttctactgtctttctggtattatgctcagtagctgagggatgagaagttaatcaaatagttaatatcctttccttaatgaactatgtatctatttatttgtgtgaaatatgtgtatgtacatatatatatatatacatacactttgtacaagattcatatctgccctttaaatattctaatgcttctgtaaatatctttaaatccagaatatcctataaaaatttaaccctttgcaaggattgtactagagctcattcttctgcaaattcatgcactatgctaaaagctagctaagcattcatataaaagaaaactgtgagataattgccactgaaaatttaagcaaaagttatcacaacaagataaaaatagcaattcagagatacccttctgatatgacattaaagtrtaataatatcagggtattacaggagg

SEQ ID NO: 624683 - DNA, 546 bp, Homo sapiens
cccaggcaaatggggtcaggagtggacccccagcaaactgcagcagacctgcagaagaggggcctattagaagaaaaactaacaaacagaaagcaataatataaacatcaacatcaacaaaagaaactcccacatggaaaacccatccaaaggtcttcagcctcaagattaaaggtagataaatccacgaagatttggaaaaaccagcacaaaaatactgaaaattccaaaaaccagaatgccccttctccaaatgattgcaacgcctctccaacaaggacacaaaatttgacagaaaatgagtttgatgaattgagagaaggaggcttcagagggtgtgtactaacaaagtcctctgagataaaggagcatgttctaacccaatacaaggaagctaagaaccttgacaaaaggttacaggacttgctaactaaaataagcagtttagagaacataaatgacctgatggagytgagaaacacggtacaagaactttgtgaagcatacacaagtatcaacagccaaatcaatcaagcagaaaaaaag

SEQ ID NO: 624684 - DNA, 600 bp, Homo sapiens
ccttgctttgaattaagcttggtttaaaggaatattatggctgttttgaacttctatccagaccactaaaactttctctataccagcaataaggctgttctcctttcttatttgtgtgttcattagagtagcacttttaatttcctttaagaatttttcctatgagttcataccttggctaattggcacargaggtctagcttttggcctatcttgacttctggcatgcctttcttgctgaacttaattatttgtagcttttgatttaaagtgagagacgtgcaacttttctttcactttaagacatagggggcactgaagtgttattaattggcctaatttcaacattattatgtcttagggaatagtgaggcctgaagagaggaaacaagataggggaatggctagtcaatgaagcagtcagaacacacacatcatctattgaataactttgccatgttatgtgggcatggctcatggcactccaaaacaattacaatagtagcatgaaaggtcaccaatcacatattagcataacaaatataataataatgaaaaagtgtgaaatattgtgaattaccaaaacatgacacgtacaca

SEQ ID NO: 624685 - DNA, 507 bp, Homo sapiens
atcacttttgtagaatgatagttctgtgcctagtaataagtatatttttcataatttgctttatttttccactcaaaacratgtggatttttgatggccatcagtctttttcctcactatttaattcccttactttgtatttctatttcattacagtgtatttaactgtattcccatcataagtgctcttatgtgtttctttgtaatactcctttgcttattcatcatgcttatcctaccttatcttttcatctctatccttcatcttttcaactgagttgattctacacaaaaggctttctgcttatatttaatagagctttttaaaaattttattctattaaaacttaatattcactcatattttaagtttatacttgttcctgccattgataatttttaatgctttgctcaaattctgattttccaagatagtattctgtactagctttctatagactatttatgttgaatattaagttgcctttggataagttatatgtaatc

SEQ ID NO: 624686 - DNA, 601 bp, Homo sapiens
acatttgatcatatatgtgagtgttcatttctagacgctattctgttccactggtctgtatgtctgttctatgccagaactgcattgttttaattactgtagctttataatatatgttctaatcagaaaatatgaagcccccagtttttctttctcaagactgttttggcctttcatggtgttttgagattccatatgcattttaggatggttatgcattgttactttactaattttctaatatatattggagttgacagggcagggagatcaaattctaactattttatgacaatgccttggctattcaatgttataaaaagattgcaaattcttcaaagctgcaatgctagctgggcaccttgtcatcttcttgtagtcctaactactcaagatactgatgtgggaggatcatttgaggccaggagttcaagactgtagcayactttgtgcttgcctgtgaatagccactgcactccagcctgggcaacatagtgagaccctgcctctaaaaccaaaaacaacaaaagtaacaaaaaacataaaacaaagctacaatattctttctgcaagacccagtttcttgcatagttgtaggtat

SEQ ID NO: 624687 - DNA, 493 bp, Homo sapiens
ttaaagagaaaaattataccagacacttattaaaaataataagacaaattgtattcagtctaatctgtagaagagcaatatttctgtatagaattgagttcaactctgatcataacaggggcagcttggaatttatggtcaacaggccaagtgagaagcttagtgaatggaaaattgataagaggactctggttaagtataaaaagtggtgaaagagaaacttgattagatatcaagggtggggaaagagaaacctaactggagatcaaggatagagggataagtaacttgattagatattaaggtgaagktaaattcacttgtctgatgatcttttaaaattttaagtcccatttctgggctaaagaaacacccacagtatatgtccagtatgatgtcagtcctgaactccaggctcatgtatataattgcatattcaacagtttcactaaagtaaaatagacattttataaaaaaaaacttttctgaaccc

SEQ ID NO: 624688 - DNA, 493 bp, Homo sapiens
ttaaagagaaaaattataccagacacttattaaaaataataagacaaattgtattcagtctaatctgtagaagagcaatatttctgtatagaattgagttcaactctgatcataacaggggcagcttggaatttatggtcaacaggccaagtgagaagcttagtgaatggaaaattgataagaggactctggttaagtataaaaagtggtgaaagagaaacttgattagatatcaagggtggggaaagagaaacctaactggagatcaaggatagagggataagtaacttgattagatattaaggtgaaggtaaattcacttgtctgatgatcttttaaaattttaagtcccatttctgggctaaagaaacacccasagtatatgtccagtatgatgtcagtcctgaactccaggctcatgtatataattgcatattcaacagtttcactaaagtaaaatagacattttataaaaaaaaacttttctgaaccc

SEQ ID NO: 624689 - DNA, 615 bp, Homo sapiens
tttcaggattgaacagttgtatagtcgtcacaatgattcagagattaggtacacaaacaattatggttaagaacacgagctgctcatgatgacaataataaaaatagcacaatagaaaaagttatatgatctcatagtattgaagaatgatattgacgtttttattttttaacaatctgttccaagtagtacttgcaaacactactaaatttcttagttttacttttatctattataaytacgtttttaaattttacttcattatgttttaaatttattatttattatcacattggtgaagtttttcttttcaatctaccttctttgcttctcacagttgtctttacttagggttgtccctcttttccttgagactgctaatcaaaacatggcagaatggtatgtaattaaagatatccatataggtcaactctgaacactccatggcctcgattcaatagaaatactctatgtcttggactatttcctaacactgttccttcccctcttcagccttcttaaatatgtttgacagctaaagtgaaaattataacattatctgatgtagtactgaatgtatgtggaataaatatataagaattggatataataaat

SEQ ID NO: 624690 - DNA, 615 bp, Homo sapiens
tttcaggattgaacagttgtatagtcgtcacaatgattcagagattaggtacacaaacaattatggttaagaacacgagctgctcatgatgacaataataaaaatagcacaatagaaaaagttatatgatctcatagtattgaagaatgatattgacgtttttattttttaacaatctgttccaagtagtacttgcaaacactactaaatttcttagttttacttttatctattataattacgtttttaaattttacttcattatgttttaaatttattatttattatcacattggtgaagtttttcttttcaatctaccttctttgcttctcacagttgtctttacttagggttgtccctcttttccttgagactgctaatcaaaacatgrcagaatggtatgtaattaaagatatccatataggtcaactctgaacactccatggcctcgattcaatagaaatactctatgtcttggactatttcctaacactgttccttcccctcttcagccttcttaaatatgtttgacagctaaagtgaaaattataacattatctgatgtagtactgaatgtatgtggaataaatatataagaattggatataataaat

SEQ ID NO: 624691 - DNA, 563 bp, Homo sapiens
gaataaaatacaaccatgaatctaatggtgcttcagaatcaagtagatctatctaaaaaataaaataaaagaataaatatatacatctgccaaaaggaaaacaaaagaactaaagtaataaacaatttttgatttagcatcacctggttgccgtgagttataatggaaaagtaatatccttattccrtattatcatggcaggataatttgataaccaaatatgggtctaccaaaggcctcgataaattaggcagcaccgtagaatcacttgtagagagatgctctaaggaagcataggtaaagagagggattgaagattttatataaacatttaaaccatagcctgtctatggaatgaaccattatcagtgcaaagtacataaacataagaaaatttctattatctcacatcatctagttataactattccatggaaggactccaggttgggatactagaaatcattatgttaaaaaagtttgtattgaattgttgacgtaattgttctccctttcctttctattttcaagtagggatgcaaggggatgattatctctttgat

SEQ ID NO: 624692 - DNA, 563 bp, Homo sapiens
gaataaaatacaaccatgaatctaatggtgcttcagaatcaagtagatctatctaaaaaataaaataaaagaataaatatatacatctgccaaaaggaaaacaaaagaactaaagtaataaacaatttttgatttagcatcacctggttgccgtgagttataatggaaaagtaatatccttattccatattatcatggcaggataatttgataaccaaatatgggwctaccaaaggcctcgataaattaggcagcaccgtagaatcacttgtagagagatgctctaaggaagcataggtaaagagagggattgaagattttatataaacatttaaaccatagcctgtctatggaatgaaccattatcagtgcaaagtacataaacataagaaaatttctattatctcacatcatctagttataactattccatggaaggactccaggttgggatactagaaatcattatgttaaaaaagtttgtattgaattgttgacgtaattgttctccctttcctttctattttcaagtagggatgcaaggggatgattatctctttgat

SEQ ID NO: 624693 - DNA, 575 bp, Homo sapiens
cagtaacctataaaaagggtaatacatcatgaatgtttcagagatctccaagaatactataattttttagagataattttataactcaaaaaactgttatgttgacttttatggtttatttcagcaaaaagacacagatttaaatcaacaaaggaaagaggtgcatagggcagaatccaggagagactagtcataagcttccagttttcctttcatggtgaagtcatacagaatgtgcttaatcttccagtgacaaagtgtgacaacatatatggattattgccaatcagggaagttccctgagccatagtgttcaggattccatcaagtgtcagtcacttaggcatgtagtgcccacattactgactttaattactcagtgtccagtctcacaacagcagatcaaactggtattgtktggcccatggcccccaccataaatcacactgttagcacaactatctggtatgactcaaggcctcagataagcaaagacaattttagcaggcagaatatttcagaagctagtctagggccagaactttcgttgaaatgaaagcatttgaacacctcat

SEQ ID NO: 624694 - DNA, 187 bp, Homo sapiens
tcagatgtatagattgtgaarattttctcccactctgtgggttgtctatttactctgctgactgttccttttgccatgcaaaagctctttaaataaggcccagctttttatctttgtttttattgcatttgcttttgggttcttggtcatgaaatccttgcctaagccaatgtctagaagggttttt

SEQ ID NO: 624695 - DNA, 187 bp, Homo sapiens
tcagatgtatagattgtgaagattttctcccactctgtgggttgtctatttactctgctgactgttccttttgccrtgcaaaagctctttaaataaggcccagctttttatctttgtttttattgcatttgcttttgggttcttggtcatgaaatccttgcctaagccaatgtctagaagggttttt

SEQ ID NO: 624696 - DNA, 395 bp, Homo sapiens
tctttttttttcttctctccatcagtcctcttttgatctaaattgcagaatctctcctttttatcttacaaccccaatgccacaaggaacaaattttctggataacattaygtaaaatataatagaatttatatttgtcttcaaaatacacaatcaaggagattagaggcagacgttcataatgattgctttaaaaattgagaaatgaagaaaaaataaatgactgtttactgctgtaccatttcagaatagactagacgtgacaaattgaggtactgcaccagacctgtgttaggaattatcaggtgaggtgagtttttctatggcagcctggcaattgttggtgttggttatgaaacaagaagcttatatgaagcttacatagaagcttaatt

SEQ ID NO: 624697 - DNA, 553 bp, Homo sapiens
aattagaagatacagttcagtagtatcggtgagcaaagatatattctccaatataataccttgtcagaaagtgttaccaaggtggagataatacaagtggcatgtattttattccagaatgatggaaaaagtatggtggtcatgtcatgaaactattaatattgttactgtaatatatgctataagatgcaaaatrtgatttgggaaatagatgagaagttaataatgagatttggtggggaataatgaggattccccagcttaattggtggggaagtaatagggaaaaatctgctggctaagccgacccaggtcaataaaagactgaactcatattgaggagatgtttgtgaactggaatatgaattcttttctctcagtccactcctaggaatggtcaacagaccctgttttatccttctaaggggaacagttgctatctgaagggtgggagtgaggaaaagagagcattcctctgacaaatccctactcattacctaatgtaaccaaatcactctttgatccctcaactggctttatgaatagtgtgatt

SEQ ID NO: 624698 - DNA, 645 bp, Homo sapiens
aagtaaccctggaagcccacaaaccaaagggtctcttttttcttaaatgagtggattagagctctcccaagacaattgactttgttttgccccttggctagctagctgtcactgtagcacccttaactatcactccactagccacaggaagtaacaaaagaaaaagtgatgaactacaaactttctcagttttactgagaagtacctcaggaacaggagggtaatcctcccgtagtgtaamccaaagctgacataaattaggttgcttccatggggactgaccgctaagaggacctgcttgaaaatgacttttctgaatcacttttctgcttctaagatctttgagctgttgatttctcagggccaaagagaaaaagttggaaggaaagaaaagaggggatggggaacagagactcattcttttattcatttattgaacaaatatttattgtgcacctatgtgtggtgcattttgtcaaagctgattttgtattcccttgcactggtgcagaacaattagagaagaattcaaaatgcaactttacattcaataacacacgaagtaaaagggaatactgaaatactaggggagaagagaggtagaaaatgttttattctacagtatgtagttttgagtcactgaaa

SEQ ID NO: 624699 - DNA, 599 bp, Homo sapiens
agttcaaatctactgttacctagacaaatctcctccctttaatttgagaatttctccttatctcatcctttcattgatctagctaaccactcataaattccataaataggagatttcagtttagaaagagaaacaaaatatgtgtatccataatcaaaataaagaaggaaggtgttaattgccttaggagagggcagatgaagtgctatgaaatcgcttctaggcagaagaggtcaacaagtgctccatcaacaagaaagaaatgagctggcccttcaaggtagatgggaatgagacatatagacatgatggggaaacagcattatcaaagccatagagaagatttttwaaattatatatatatatatatacacatacatatacaaaagcatacacacagaagagttaggatagcttaatctgatgggaggacaggatgctggagttaaagatataaatgtaaacttgaaacatagtatagagggaattggatctaattgtggggataggagagagccagtgaaagtttctgagaaggggaagtgccttgctatcacccagacatcagctacttttgttgagtaagaggactgcctact

SEQ ID NO: 624700 - DNA, 286 bp, Homo sapiens
tgccttagtttttacttctaaggaaaaaagtcattagcatcttgaaataaataaataaaggcttaccttatggctcatgtttactagttattggctgattggtaatttgtccctgtgttgacaatgtcaatgttgtatgatactcagcacataattctcagcatttcttctgcctccgcatayttgaggtgtatgttacactcgtgcgtaacagaggctccctagaactctaatagagtggggcagtcacaggcatgatcattagtatgtaagtgggggatacatc

SEQ ID NO: 624701 - DNA, 289 bp, Homo sapiens
gaattctaatgtttgtaatgagaccatatgcaaaaactcaactttaattttatctattacagaaataattgaaaatgcagtaaaagaaaaatcaatactcacatgacttcctagtttatgaaacacctttttatacgttatcttacaacctacatctctgtaaggtaattgggacaaatatttggtttcttcatttgacagagaagagagccaggattcagaaatgttaatattcaagttcatggttccrccacttactgggtgatcttgaacaagtcgcttaatcact

SEQ ID NO: 624702 - DNA, 556 bp, Homo sapiens
gaaggtagaggctgcagtgagctgagaccacatcagtgcacaccagcctgggtgacagagtgaggccctgtctcaaaaaaaaaacattaacttactccagcattacccagatgttaaaggaaccctttaccatacaaaactcagtggaaaacacttgaggaaatattcacccatatttcagtgacaccgaacaaataagatacttccttgccaaaggaatcacagtctggtgggggagacaggcaagtacataaataattataaaacagagatgtgctaagagaagactttaccaagtgacacaagaacacaacttactgccctcctggagattggcggggagagatttttagagtattttcacaggwgggcaattttgagcagaatcttgtcagagtgggagtttctgaagtaaaggaacaagaagccacagagcaagtactgtcaaaacagctcttgatctttccctccaaaattgctccttctctaatattccctaaaatctcaataaaaatgctgattatccacactggattcaatccagaaacctagaaat

SEQ ID NO: 624703 - DNA, 524 bp, Homo sapiens
atgctaaggtggcaattacagataaatggagtattaaggactaaaggaagtaaaacgcgaacttattttgtcattgtaagagagaagcaattgagactctgtagagaagaacactcatactcagtgatccctgactatcttgtttacaactagagctagtttataaagagcagaaagacaagggcatatgaagttagagtattttgagaaaagaggaaacctaaaaaggaatagttgggagtaattaaactggttaaacacaaacagaaaacaaaccattgtataaaaggcggtaattaatcccaacttaaaaaaatgaaagaaaataagagaatcatttaggtaatactgcctatagttttgtgaatgggatgtaataaacaaataaagaagaacctagagattgagcttggccatattgtggaaatgttataaagatcaatattgatccccaaatggagatctggggstaagccagaacataaatatacagttagccaaggcctgcctagtaagatatgaag

SEQ ID NO: 624704 - DNA, 542 bp, Homo sapiens
cacttcacctataaagatacatacaggctgaaaataaagatatagaaaaaatattccatgccartggaaacctaaaaagagcaggggtcactatatttgtatcagacaaaatagatttcaagacaaaaactataagaagagacaaagaaggtcactatataatgataaaggggtcaattcagcaaaaggatataacaattttaaatatgtatgcacccaatatgggagcattaagatatatgacacaaatattattagagctaaagagagagctaggtcccaatacagtaatagctggacacttcaacaccccactttcagctttggacagattttccagacagcaaatcagcaaagaaacatgcgacttaatctgcactgtagaccaaatggatccaatagatatttacagaacattttatccaagagatgcacattcttttcctcagcacatggatacttctcaaagacagatcatatgttaggtcacaagacaagtattaaaagattcataaaaatgaaataacattatgtatcttctc

SEQ ID NO: 624705 - DNA, 573 bp, Homo sapiens
tgcaattttatatggtcagtttattcactgcctctatttcagaagattgttcttaatcttttctacttttttgaagttaacataccctttcttatatgaaatgatgataataatatatgacaatatgtgttacatacagtatatgttcttggtaaaatgaaaagctggcaatcttagtcttcaaatttgggggaggggtattctattttacctccaaagttttaaacccaatagatgttccaattttgtgatgtatcaatttctaagcratgtagaatcaattgtgtattttttctaatacctttgaataactctgcctatcattctctccagtcgataagtcccagaatagcatatcatataattgactgtcatacattttcatacaggcaggtatttgttatttatcaatgaatcaaatacttttcatatgctaatggaatgtatataagatatcaatagactatgaaactttcatttttgctggtatgaccatccaagtactatgacaatctttttttcttttttttttttgagacagagtctcattctgttgcccaggctggagtgcag

SEQ ID NO: 624706 - DNA, 565 bp, Homo sapiens
caaccttggtgaatctgacaattatgtgttttggggttgcacttctcaaggagtatctttgcggtgttctctgtatttcctgaatttgaatgttggcctgtcttgctaggctggggaagttctcctgaatagtatcttgaaaagtggtttccaacttggttccattctctccrtcgctttcaggtgcaccaatcaaatgtaggtttggtcttttcacatagtcccatattcttggaggctttgttcgttccttttcattcttttttctctcgtcttcacgctttacttcatgaatttgatcttcaatctctgatatcctttcttccacttgattgatttggctattcatacttgtgcatgcttcacaaagttatcatgctctgttttttagctccatatggtcatttatgttcttctctaaactggttattctagttagcaattccgctaacgttttttcaaggttcttagcttccttgcattgggttaggacatgctcctttagctcggaggagtttgttattgcccaccttctgaagtctacttgtgtcaatatgtcaaactc

SEQ ID NO: 624707 - DNA, 334 bp, Homo sapiens
acttattaatttcacatgggagattacctgtggtaaaattcaaaatccagaaatattgactgtctgtccttgctagagtctagtaataagagtttttaaataaatagtagctctgtgttaaaatcagcttaattaaaagtggatgcccaaggtatgtatatatttaaaaggcctttatgctttttctcttcttgaaaaaaawtttttttgaaaaaaaaaatttatttgtttatttttcttctcagttgactggagtatttccccagtctgtcttcttgccattcttcatgcccaaagaagaactcctaagataatttctgatagcctggaattc

SEQ ID NO: 624708 - DNA, 644 bp, Homo sapiens
cgaatctgctttctcttgtaacataacaaaattggagatgctgattattttaccaaggctttgactagaatggcataatttcaaatataaatagactattttaaaaaattaaagttgacttataaagccaataaattccccttggaaaaactggcctcctaccttgtcttcacagtccctgtacagcagggatcctttatactttcagttcattcatatgtggtcacaaagatacaagaaggatattattacaatatatcatattctacaggggaaatcaactaaatgtggtgatttttgtctgtaatcattctctgagtcttcaaaaacaatgtattttctaaagctttctaaagccaaatagattcatctttaaattgtcataagctccatagactgttaaaagctacctggtatcttaaatgctagagcatctcagggctttcctcctgagatgctgactttcttggcttctcaccctcttctctttctttggaacattttacgctttcccacctctaagctgtgattttttttayctccctctccccacttccaaaacaatctctatttacatgtgtgactgtatttatataagaatataatggagctcatgtttaccatcctactgtaaattcacgaaa

SEQ ID NO: 624709 - DNA, 548 bp, Homo sapiens
ataaacctaaagtttatgaagttgaaagaatcctaaataggataaacacaaagaaatccacacsaagacacacaacagtataatatttgaaaatacaaagaaaataaatcttgtaaacaagggagaaccaacatttacctataggtagaaaataattttaataattttgatcaaatactatgaggatgagaaggaagtgacatttttcaagtgctaatagaaaatgctaactatgattcaatatcaagcaaaaatcttctgaaattgaatggattttagtaggtttccaatgaaggaaaactaagataattttgtcactaaagacctccctaaattaatggctagcaaagttccctaaacagaaagaaataacagaaggttaaaaaaacaaaaatgggtaaataaaatcaactttcattttcatcttgtgttttctaaattacgtttggtggccaaagaaaacattataatatggtctagaatgatcctcaatacatgtagagggaatatttaaggtaattacattataaatgaatgagagtaaagga

SEQ ID NO: 624710 - DNA, 548 bp, Homo sapiens
ataaacctaaagtttatgaagttgaaagaatcctaaataggataaacacaaagaaatccacaccaagacacacaacagtataatatttgaaaatacaaagaaaataaatcttgtaaacaagggagaaccaacatttacctataggtagaaaataattttaataattttgatcaaatactatgaggatgagaaggaagtgacatttttcaagtgctaatagaaaatgctaactatgattcaatatcaagcaaaaatcttctgaaattgaatggattttagtaggtttccaatgaaggaaaactaagataattttgtcactaaagacctccctaaattaatggctagcaaagttccctaaacagaaagaaataacagaaggttaaaaaaacaaaaatgggtaaataaaatcaactttcattttcatcttgtgttttctaaattacgtttggtggccaaagmaaacattataatatggtctagaatgatcctcaatacatgtagagggaatatttaaggtaattacattataaatgaatgagagtaaagga

SEQ ID NO: 624711 - DNA, 567 bp, Homo sapiens
tattgagattagaatttctactggggctcattaaaaaagttttaatgttggcttttatctccctgaacatattaattatccttgttttgcagtctgtgtgtgttaatctactacaaaayaagtctatttcttacgctatttcttattcatcttgtcatttattctggcatgtctaaatatctttgatagtgtattagacattaaatttaaaaataaaatctttgcagaataaatttgagagttaaaagttattttttccagaagtatttgcattatttttggatggtacttggcagcataccttcaccttaattaaattttagttcttgagatttattaggcaggaacaatgatttccaatggaactgtagtgtttgaaaaggctaatttatttctgatttgtacttactatttttaggatcttgtgcatctatttctttagccctgtatggctgtcaaatctctcttctattttaaccatttatggggtgactgaatgccccccttgacaaaagaagcccttatttctggtcttacctctctaaaatttttgtcttcttcttttaa

SEQ ID NO: 624712 - DNA, 567 bp, Homo sapiens
tattgagattagaatttctactggggctcattaaaaaagttttaatgttggcttttatctccctgaacatattaattatccttgttttgcagtctgtgtgtgttaatctactacaaaacaagtctatttcttacgctatttcttattcatcttgtcatttattctggcatgtctaaatatctttratagtgtattagacattaaatttaaaaataaaatctttgcagaataaatttgagagttaaaagttattttttccagaagtatttgcattatttttggatggtacttggcagcataccttcaccttaattaaattttagttcttgagatttattaggcaggaacaatgatttccaatggaactgtagtgtttgaaaaggctaatttatttctgatttgtacttactatttttaggatcttgtgcatctatttctttagccctgtatggctgtcaaatctctcttctattttaaccatttatggggtgactgaatgccccccttgacaaaagaagcccttatttctggtcttacctctctaaaatttttgtcttcttcttttaa

SEQ ID NO: 624713 - DNA, 617 bp, Homo sapiens
tataatacataggaaaatttgaaggaaaagtgaataaatgtgtcaatgttaaatcttttttaggtagagtaaaaaaataagattatttagcaagggatatataaaaagtttgctataaaattaaggtacctattaagattacaaaactgcagggctaggattacattttcttcaccaagggagtgccttcagatttttaatctgtaaaataaagtcaaataagacaaactatgtacaaaagtactagcaaactctttttaattataaaaatcggtcttattttatagatgtaatcttttaaattataaaaattggtcttattttatagatgtaatctttttaattataaaaattggtcttactttatagatgtaaccaaaactatacataagtcaacatcaatttagccttaaccacatttacactgatggcatagatatatttacttgtgattgcatatataaaatacatctaatgctcttatgtgatgcattcgatatcataggccgtattgattttagaggactaacccttaaatgcttataatwtttttttaaacttcatgttgaaagaaagcatgaaaaggaaataattcttttttctaaagttccaagtaa

SEQ ID NO: 624714 - DNA, 554 bp, Homo sapiens
ttttcacagtagtttttctattataatattaagatgatgcactcaaataaaaatgttttctgatcagtctatgtgycctagggctgttataaaaattgtcacaaagttggttgcttgaaaaaaaatattttttcacaattctgggggccagaggtccaaaatcaaggtgtcagcaggagcactgtcactttgttctacaggagaatactttcttgcttcttccagcttttggtggctttctgcattctgtgattatgcttacagcaatccctgcctttggggtcatgttgcgtcttccttttctctgcatgtacttctccatggactccctgttataagattacttttcatagccttcagggaacatctggataattcaggttaatcactccatgttgtcaaggaaaaaaattgctttgaacaacttagacaaggaaagctttatttaagactattgcaatagggaggagagatttacctcaagtcatttaaacaaaaggtggggtgagttagtggaaaataccggaggataatttaggggaaagttggttagt

SEQ ID NO: 624715 - DNA, 554 bp, Homo sapiens
gtaatatgctgtcttagggctttggaaagggaaaatacaaagaaaaataaaacattgttctcaccctcagagaaatataaaattctttccttttatatttcctcaggtctattattttcctattttttttctctcataggttggtctgtcaataatcctataattcaaattcatttcacaccacatctcaacaaaaccagactgtcctacctcatggttattatgagattgaatatgataatatttatgaaaagtctaccaaacaaaagcactctttaagtgtagggaataataattttattttcctgtcaactctacaaaaatttatatttattaaggcaggagccttacttttttcagacttcgtttgttctgggctttaattaataactgtgtcactttgaacagcttgctgaaacttgcttagggaaattttctcatcagcaaaatgtagattataatrggacccacctcctaggactgctgtaaggattaaacgggctaatccatgtaaagtgctgagcacagcacatatggaaacactaaataaatta

SEQ ID NO: 624716 - DNA, 551 bp, Homo sapiens
aagtaagtccttatgaaacatttatttattaaaaattaaagtataagcaccagtcaataagtcaatatcattatctatacagtaaagattttaagagtaaaaattaaagggaacatctttaatttatagttatgctgggactataaacaaagactttctattataataggcactactgctaccatattttcttacctctatttaaaatgcagactattttttgataaatatttttagagaatcacagagctttatttgaaatcagagttgtttatattgtgtgtgtgtgtgtgtatgatttgggaacagaatattaatttaagactaaaacatagtggattcagcatcatttatgagatttatttgtaccctttgcccaaaaacataatgcatttggwtctaaccaaacctttggtgacaacttctgctgtgcatgttattaattaaggaggtaagaacaagttaaatgataccacatggaatacatcatcgaatccaaaatgtgagctattttataaaactgatctgctttctacaaaaagtcaatggca

SEQ ID NO: 624717 - DNA, 551 bp, Homo sapiens
aagtaagtccttatgaaacatttatttattaaaaattaaagtataagcaccagtcaataagtcaatatcattatctatacagtaaagattttaagagtaaaaattaaagggaacatctttaatttatagttatgctgggactataaacaaagactttctattataataggcactactgctaccatattttcttacctctatttaaaatgcagactattttttgataaatatttttagagaatcacagagctttatttgaaatcagagttgtttatattgtgtgtgtgtgtgtgtatgatttgggaacagaatattaatttaagactaaaacatagtggattcagcatcatttatgagatttatttgtaccctttgcccaaaaacataatgcatttggttctaaccaaacctttggtgacaacttctgctgtgcaygttattaattaaggaggtaagaacaagttaaatgataccacatggaatacatcatcgaatccaaaatgtgagctattttataaaactgatctgctttctacaaaaagtcaatggca

SEQ ID NO: 624718 - DNA, 518 bp, Homo sapiens
aattttgtagctgaacagttattaaaaagaaatgctgtgggattccttttttccatgaaatgagttctattttgatayagtttgttagaacctggggaaaattcaccaagaatttttaatggaaatatttgaaggtctctttcaattatttttatggaaaacccaagtaggtaggatacttactattcagttgttttttatggttaacagaacaacgacagtagtatgtttattacctgtacttgggaaaccaatactagagacacaattgtaattaaagtactcagataaactaattctcaaacatcagaatatttcagcaaacatacagaaaaatcagtgtgataataaagcatagcatggagaaagcaaacctttaatttccttagcaacttgcttgctttctccttccctttctacattctaggaaccaataatcagcacactcggcacaattattttaatttcaaatcctgaaaacctagttattccagcactttaccagtgtcaataaaaca

SEQ ID NO: 624719 - DNA, 518 bp, Homo sapiens
aattttgtagctgaacagttattaaaaagaaatgctgtgggattccttttttccatgaaatgagttctattttgatacagtttgttagaacctggggaaaattcaccaagaatttttaatggaaatatttgaaggtctctttcaattatttttatggaaaacccaagtaggtaggatacttactattcagttgttttttatggttaacagaacaacgacagtagtatgtttattacctgtacttgggaaaccaatactagagacacaattgtaattaaagtactcagataaactaattctcaaacatcagaatatttcagcaaacatacagaaaaatcagtgtgataataaagcatagcatggagaaagcaaacctttaatttccttagcaacttgcttgctttctccttccctttctacattctaggaaccartaatcagcacactcggcacaattattttaatttcaaatcctgaaaacctagttattccagcactttaccagtgtcaataaaaca

SEQ ID NO: 624720 - DNA, 484 bp, Homo sapiens
tgacaaatgaaaaggacacactaaatagagcaaaccatgctatgataacagtatcacactgagtttgtgcctggatgattttagtagaataataatcatttagcaaacttacgttttccctctagccttaagtataatatttatcatttgactcacatatgctaaacttttagtacccttcggaagtatagtccaatcagttgaatttttaaaacttgagaatttatactttgtcattcctattgactataccatctatttatactgttgctattgacattctttctttcctccacctatgagatcagatttgtaattctatatctagtctttcctagtctaataatttcaagaattataattcagtcactttaataattccartatttggtaagtgcattttagcaggaaatttttacaaacatctccatttcttttacatgaaggcaacattagctactttaatgaactatgaataactgat

SEQ ID NO: 624721 - DNA, 538 bp, Homo sapiens
gtaaggtagaagtggggagggttgataattttctttataacctaatatgatracagacatctataggacagaatgagtctgaggtttggggataaaatcactgaatagaatttaaaaactctgtctcgtattttcaaaaaaataaatatcaaaataataagaattatgtataatagcctttcagtgaattacagaaactgtgtccttaatttataatgttatgaaattttccaacataagcagtgcttaaaggggtttgttaggttaaaaggttggtactataaagacctaattagtgtgcacagcaggtagaaacccagcatgtgttctgagaattaggtaatggaaataaatagtggccatgatacaggagaatattacttttaaaaatcaatttgctaaaacaattgctaaatgctttatgggggaactgttttaatgttatgcttccagatgacatattttacccatatttctcctgtatttcctgatttttggacatagtatatttattgtacttctttcaaattaacaatta

SEQ ID NO: 624722 - DNA, 538 bp, Homo sapiens
gtaaggtagaagtggggagggttgataattttctttataacctaatatgataacagacatctataggacagaatgagtctgaggtttggggataaaatcactgaatagaatttaaaaactctgtctcgtattttcaaaaaaataaatatcaaaataataagaattatgtataatagcctttcagtgaattacagaaactgtgtccttratttataatgttatgaaattttccaacataagcagtgcttaaaggggtttgttaggttaaaaggttggtactataaagacctaattagtgtgcacagcaggtagaaacccagcatgtgttctgagaattaggtaatggaaataaatagtggccatgatacaggagaatattacttttaaaaatcaatttgctaaaacaattgctaaatgctttatgggggaactgttttaatgttatgcttccagatgacatattttacccatatttctcctgtatttcctgatttttggacatagtatatttattgtacttctttcaaattaacaatta

SEQ ID NO: 624723 - DNA, 538 bp, Homo sapiens
gtaaggtagaagtggggagggttgataattttctttataacctaatatgataacagacatctataggacagaatgagtctgaggtttggggataaaatcactgaatagaatttaaaaactctgtctcgtattttcaaaaaaataaatatcaaaataataagaattatgtataatagcctttcagtgaattacagaaactgtgtccttaatttataatgttatgaaattttccaacataagcagtgcttaaaggggtttgttaggttaaaaggttggtactataaagacctaattagtgtgcacagcaggtagaaacccagcatgtgttctgagaattaggtaatggaaataaatagtggccatgatacaggagaatattacttttaaaaatcaatttgctaaaacaattgctaaatgctttatgggggaactgttttaatgttatgcttccagatgacayattttacccatatttctcctgtatttcctgatttttggacatagtatatttattgtacttctttcaaattaacaatta

SEQ ID NO: 624724 - DNA, 614 bp, Homo sapiens
caccacgcctggctacctggctgattttttgttttgtttttgtagagatggggtttcatcacgttaccaggctaatgttggagagttttattgtcaaatggaagaagggaacaatggatttgggggaacatgaacaatttctgctaaaatcatgcaattggaacctaatgatagaacaactatagtcattctctcagggttataagaaaagatctcctggagaaagtctttcccgactcctcaatgattaattggaccttgcaaggtcaagaaggaaaaggatcatttcaggaagaggakatataatgtgcaagacaaaaagagttgttagttttaatgctattgcaacaaaaagagttgaagttttgttagaagaatggtgatgtagccagatttatttttagaaagataactggcagatggtgaagaataaatggaagtaggtatgattacttataaatgctgaggcattatgtgaggccagttcaagtctgctgtgattgcagaactgcactccagcctcagtgactaagcaagatcctgcctctaaagaaaaaatgactactagcattttaaaaaaaatatgacacatacaagtaccttgccagatatct

SEQ ID NO: 624725 - DNA, 444 bp, Homo sapiens
ttaaatgcttatactgtataattgagtctatttctgcctagctagtctcttaaattgatgtataagctatataatgttttgctatttgccaaggctaataatcctcccaaattagctctgccttccaaattttctttaccattttcccatttattcttccagatgaaattttaaaataattatatccagttctaaaaagactctattgaattacaatgtaactcactgtaattacacaaagcctaaaaataaagaattgacatctttacaattttaattttccatccaggaaaatttttcttcattgttttcccatctttctccacaaaatgtggtcattttcttcacataggtcattgacatttcaaatgaagsttatgcctaggtattttctatctcttgttatattttatgttgttttctaattgagatactgctggtgtg

SEQ ID NO: 624726 - DNA, 589 bp, Homo sapiens
tgatataaaatgattgatttcctaatgtatgttcttttgcatggatttatttaataatctccctgaatgttgttctttttttaagagcttagcaaatttattctcagtcaatgaatttcattatttgtccttaggataatattaattaaatgcaaaactcagcattttataatttttgtcagaaaatatcaattttgcataatactacaaattctaattatgaatatattaaaagaaaaattgaaatatagctagtaaatgttctatgattagatatatcaaactactatttttaaagcaaatttataacaagtcagaaacatatttcatttcaattgtaaatttattagcaggcattttccccacacacttctaaagtaaacataactacactgtaagcagaggtgatttgtttttttcagatagtgttttttaattgtattgttttagttcaaaaygtaatagtaatgtctgtactggtgcagtgttaagttcatgttaacactattaagaacctttctgccaaagcaaagtatctgggctatgttgccaaagatttcaaatgaagaagaattgtttcttaaaaata

SEQ ID NO: 624727 - DNA, 561 bp, Homo sapiens
gcctgtgactctgacatgcacacaaacttgaacttgcagagaatctttgcatcctgggcatccmgcagcctgggcactggaggtgctgctgttcaggagatgagtgttgtctgttagctcattgtgtctttagagcagccgagtcagggttgagggtgggggtggctcaggtcgcggttggcacaaacttctttcccccaggtgcagtacagactgtgtgctagcttgatttattcattctgatttatcatgaaccaaaatatgaactacaacattaggaagattatatgccaatgttctcttttaaaaagaacataatcatatccttttttgggtgtttactgtattagtccgttctcacgctgctataaagaactgccggagactgggtaatttataaaggaaagaggtttaattgactcacagttccacattgtggggaggcctcagaaatcttacaatcatggtggaaggcaaaggagaagcaggcaccttcttcacagggcagcaggacagagtgagtgcaaggtggggaaatcccagatgcttataaaaccgtca

SEQ ID NO: 624728 - DNA, 626 bp, Homo sapiens
aggtcgcggttggcacaaacttctttcccccaggtgcagtacagactgtgtgctagcttgatttattcattctgatttatcatgaaccaaaatatgaactacaacattaggaagattatatgccaatgttctcttttaaaaagaacataatcatatccttttttgggtgtttactgtattagtccgttctcacgctgctataaagaactgccggagactgggtaatttataaaggaaagaggtttaattgactcacagttccacattgtggggaggcctcagaaatcttacaatcatggtggaaggcaaaggagaagcaggcaccttcttcacagggcagcaggacagagtgagtgcaaggtggggaaatcccagatgcttataaaaccgtcagatctcatgagaactcactatyactagaatagcatgggggaaactgcccccatgattcaattacctccacctggtcccacccttgacatgtggggattatagggattacagttcaagatgagattttggtggggacacaaggcctaaccatatcaccttattttcctgaaaatcttccttaaatccaactagaatgcttcctatctcattttaagcccatttcttcttgcctg

SEQ ID NO: 624729 - DNA, 543 bp, Homo sapiens
gtacagtaatagttgatttattttaatgtctatatattattccattgttagaatacaccaggatttatttttacttattttttttgctggaaaattgggtgtcttttttattttttgatataacaaacaatgttgtaatcattttgtatttacttcctagtccactcctgtaagtttctcttgagtacatactagcaatgaakatgctgagtcactgcatatacatactcacaactttattctataatgtaatattctataaagtagctgtatcagtttatactttaaccagtaatggacaagattttctgttacttcccatctttgttaattattacttttagactctaacttttatcaggctcatggatgtaaaaagcatctcagggtggttttaatttgcatttatctgctcatctatgaagatgagcttcttttcatataattatgagtcattatttttgttttgccttcttttgtttatgcattttgcttgttctatgtcttatttttcctgttgatttttgggagttcatatatatt

SEQ ID NO: 624730 - DNA, 438 bp, Homo sapiens
agaaagtgtctgcattctgcaggaacttatattgtataaaaagaatttctctttattctaagtgcaatgtgaagccaatgaagtgctttaaacaggtgatgtgatttgattgaatttattacttcacttaacaaatatkcattacatgcccactgtttgtcagatattgctgtagcccctggtgatacagtagggaataaaacaggcaaaaatccctgtcctcttgcagcttataatggactgcaatgtttaatatgtcagaggaggtccacggaggagtgacttctaagcaagaatctgaaaaaaatgaggatatctaaggagggaacaaatggttcaaaagccctataattgcaagcaggcatgatgaagcaattgtagttgtcatgactctcaacaccgtggaactcaaaggagatggaaagattctttctctcc

SEQ ID NO: 624731 - DNA, 520 bp, Homo sapiens
ggtgagcttgggcaaatcgctcattaaccccaagtcttcatcattttgtgcatataatggggataactgtggcacccaactgtttttgtgagaatcaatgaaatattatgcttgatgttattgtgatcatgatactatctgacaagggyagtgatgcatgataacatcaaaaaattagaaactgtaatgaggtctcttgggcaaaattccatacaagcaaattactctctacaaagcatttctgccacacttaattcaccattccctgaacaaaatgtgccatcttcattgttcaggactgtatagtgctggtttccctgcctgggcagctcactccatcctatcccaagcccaatccccatccctccacctcccccttccctccccactctcatacaactcttccttatcttacaggacttggcttcaatgtcaccttaactggaagcttctctccctctccagaagagcttccgattgcacttgatgcatgcactattatttgatcatttttgagtta

SEQ ID NO: 624732 - DNA, 520 bp, Homo sapiens
ggtgagcttgggcaaatcgctcattaaccccaagtcttcatcattttgtgcatataatggggataactgtggcacccaactgtttttgtgagaatcaatgaaatattatgcttgatgttattgtgatcatgatactatctgacaagggtagtgatgcatgataacatcaaaaaattagaaactgtaatgaggtctcttgggcaaaattccatacaagcaaattactctctacaaagcatttctgccacacttaattcaccattccctgaacaaaatgtgccatcttcattgttcaggwctgtatagtgctggtttccctgcctgggcagctcactccatcctatcccaagcccaatccccatccctccacctcccccttccctccccactctcatacaactcttccttatcttacaggacttggcttcaatgtcaccttaactggaagcttctctccctctccagaagagcttccgattgcacttgatgcatgcactattatttgatcatttttgagtta

SEQ ID NO: 624733 - DNA, 563 bp, Homo sapiens
ccacctcccccttccctccccactctcatacaactcttccttatcttacaggacttggcttcaatgtcaccttaactggaagcttctctccctctccagaagagcttccgattgcacttgatgcatgcactattatttgatcatttttgagttacagtccaagtctttttgtacctgaataacatgttgcccagtcagtttctcttcctggattcagaagtctttcatggtaggtccagctagaagtgacaaaaagacatttaaaaaaaaaaaaaaaaaaaagagggatgacacagacagacatcagcacttaaaagttttaaacgatatgtgaaaaacaaaatttaagggcttctaggagaaatgtaggagggaaggtgttactgggaaatatgatagaaggttaatttttattttatttttagagaaagggtcttgctctatcgcctaggctggactgcagtggtgcaatcacagttaactgcagcctcaacctccagggcttgagcaatattmccatctaatttttattttgtttaagaaatgcagtcttgctcttagca

SEQ ID NO: 624734 - DNA, 584 bp, Homo sapiens
gttcccttggcttttccagcttctagaagccacccccattccttggatcatagcccctgactccatcttcaaagccagaggtgaagcatcttcaaatctccctctcttacctctgctttcatcaccacatctcctgctccaattctgaatctcctactctctttcttttataaagacccttgtgattgctgggcatggtggctcccacccagaatcccaacactttgggaggtcaaggcaggaggaacacttgaggcccgaagtttgaaactagcatgaaaaacacagtgagacccccacctctagaaaaaaataaaaataaatattagcccgacatggtggtatgcgcctgtagtcccagctacttgagaggctgaggtgagacaatcgatttagcccaggagtttgagatcagcctggacgacataactaaatctcatctctacaaggacgargtgggaggatcacttgagcccaggaatttgtggccagcctgggcaacaaaagaagaccccatctggccgacatggccaacctggccaccatggtgaaactctgactctacaaaaatgagctgggcatgg

SEQ ID NO: 624735 - DNA, 628 bp, Homo sapiens
ctttactcatagttttgattccttaaaaaaattaaccacattaaaatatgtgtttcataatctacatctaataatacaaatatttaaagtcttttcaagtttgaatacgctacccatgttgctgctacccgcattttgtgtgtgtgatttttgtgtgtgtgttagaagctcatgacctttgaaacctgctcttatgagcttgctttgatgatttatttgtccagagaggattttttttcctacctagcattttggactgctatcaacctgagaccactttgaattaaattctcagcttgcaaatttggaagccacacagattgtgtgagttcaggctgaaacctgtttgagagctggattctggctataaactccacagggaacattttctctctccactcagagctgagaccatagggaaatttatttgctagctctctttgaaggtttattttatttattttttwaatttatagtacacgtgctcactgaaggtgtaatacttatgtgagaatctcaaaatcagttgtgttctttgtatgaccctggttttgtttcctcctgctctcttactttcagtgtgtctcagtatgtctgctcaatatgtcatcttaaatttcaactgagg

SEQ ID NO: 624736 - DNA, 628 bp, Homo sapiens
ctttactcatagttttgattccttaaaaaaattaaccacattaaaatatgtgtttcataatctacatctaataatacaaatatttaaagtcttttcaagtttgaatacgctacccatgttgctgctacccgcattttgtgtgtgtgatttttgtgtgtgtgttagaagctcatgacctttgaaacctgctcttatgagcttgctttgatgatttatttgtccagagaggattttttttcctacctagcattttggactgctatcaacctgagaccactttgaattaaattctcagcttgcaaatttggaagccacacagattgtgtgagttcaggctgaaacctgtttgagagctggattctggctataaactccacagggaacattttctctctccactcagagctgagaccatagggaaatttatttgctagctctctttgaaggtttattttatttatttttttaatttmtagtacacgtgctcactgaaggtgtaatacttatgtgagaatctcaaaatcagttgtgttctttgtatgaccctggttttgtttcctcctgctctcttactttcagtgtgtctcagtatgtctgctcaatatgtcatcttaaatttcaactgagg

SEQ ID NO: 624737 - DNA, 485 bp, Homo sapiens
acggaactagcagaggccaggcattgtggctcatgcctgtaatcccagcaatttgggaagcctaggcaggaggatcgcttgaggccaggagttggagaccaatcagtgctaaatagtgagactctgtgtctaccaaaaaaaagagacattagccaggtgtggtggtggtgcacacccrtagttccagctacttgggagtctggggtgggagaaatcccttgagcctgggaagtctacactacagtgagccaagattgtgccactgcactccagcctgggcgacagagtgagaccctgtcttagaaagaaaaaagaaaagaaagtgttaatccccctatgggaatctcctcttctcctgccctctctggaacctcacttgtcagttcttcctcctgctttcctgtatctttaacctatcccccacttttagctccttcccatcatcatttaaattactcaaacttcttctgttttaaaaacctctc

SEQ ID NO: 624738 - DNA, 398 bp, Homo sapiens
aaaaaaaaacagataatggcaaatgttggtgaaggccgggcatggtggcagcctgtaattccagaatttatggaggctgaggtgcgcagatcacttgaggccaggagtatgagaccagcctgggcaacatggtaaaatcccatcactacaraaaaatataaaaattacccaggcatggtggcgtacacctgtaattttcagctactcaggaggctgagatgagagaatcacttgtgcctgggaggtcaaggctgcagtgaactgtgatggcatcattgcactgcggcctgagagacagagcaagcccctatctagaaaaaaaaaaaatgtcagtgaagatgtggaggaattggaacccacatacattactggtgggaacataaaattgtgtaaccatt

SEQ ID NO: 624739 - DNA, 398 bp, Homo sapiens
aaaaaaaaacagataatggcaaatgttggtgaaggccgggcatggtggcagcctgtaattccagaatttatggaggctgaggtgcgcagatcacttgaggccaggagtatgagaccagcctgggcaacatggtaaaatcccatcactacagaaaaatataaaaattasccaggcatggtggcgtacacctgtaattttcagctactcaggaggctgagatgagagaatcacttgtgcctgggaggtcaaggctgcagtgaactgtgatggcatcattgcactgcggcctgagagacagagcaagcccctatctagaaaaaaaaaaaatgtcagtgaagatgtggaggaattggaacccacatacattactggtgggaacataaaattgtgtaaccatt

SEQ ID NO: 624740 - DNA, 398 bp, Homo sapiens
aaaaaaaaacagataatggcaaatgttggtgaaggccgggcatggtggcagcctgtaattccagaatttatggaggctgaggtgcgcagatcacttgaggccaggagtatgagaccagcctgggcaacatggtaaaatcccatcactacagaaaaatataaaaattacccaggcatggtggcgtacacctgtaattttcagctactcaggaggctgagatgagagaatcacttgtgcctgggaggtcaaggctgcagtgaactgtgatggcatcaytgcactgcggcctgagagacagagcaagcccctatctagaaaaaaaaaaaatgtcagtgaagatgtggaggaattggaacccacatacattactggtgggaacataaaattgtgtaaccatt

SEQ ID NO: 624741 - DNA, 575 bp, Homo sapiens
ggattacaggtgtgagccattgcacccaactggtatagccacgttagaaaacagtctggcagtttctcaaaaggctaaatgtacagtcatcctataatgcaacmatttcattcctaggcatatatcccagaaaaataaaaatatatgtccacacaaaaacttgtacaacaatcttcatagcagcattattcataatgaccaatacatggaatacatggaaacaacccaaatatccaccaactgatgaacagataaacaaaatgcagtgtgtctccaccatggaatactgccatagaaggaatgaaatattgatacacactatgacataaaggaactttgaaaacactgtgctaagagggaaaaaaagccacaaaagatcacatattgtacaattctatttgtccagattaggcaaatctatagtgacaaaaaaattaatcaatggttgcctaaggctgggggcgaaggtaggtggggagagtaggaggtagtggctaaggggtatggatttctctatagggtaatgaaaggttctaaaagtgactgtggtgatcgatgcacagctctgtgaatat

SEQ ID NO: 624742 - DNA, 575 bp, Homo sapiens
ggattacaggtgtgagccattgcacccaactggtatagccacgttagaaaacagtctggcagtttctcaaaaggctaaatgtacagtcatcctataatgcaaccatttcaytcctaggcatatatcccagaaaaataaaaatatatgtccacacaaaaacttgtacaacaatcttcatagcagcattattcataatgaccaatacatggaatacatggaaacaacccaaatatccaccaactgatgaacagataaacaaaatgcagtgtgtctccaccatggaatactgccatagaaggaatgaaatattgatacacactatgacataaaggaactttgaaaacactgtgctaagagggaaaaaaagccacaaaagatcacatattgtacaattctatttgtccagattaggcaaatctatagtgacaaaaaaattaatcaatggttgcctaaggctgggggcgaaggtaggtggggagagtaggaggtagtggctaaggggtatggatttctctatagggtaatgaaaggttctaaaagtgactgtggtgatcgatgcacagctctgtgaatat

SEQ ID NO: 624743 - DNA, 496 bp, Homo sapiens
cagtaaatggatacaaagaggtccctatacctggctataaaatttttttggcgtgtgtgaagatgagtctccctatgttgtccaggctggttccaactcctggtctcaagtgatcctgccacctcggcatcycaaaatgctgggattacacatgtgtaatatttttattgtcactattttccacatattctggaaattttatttggatttcttttttctttttttttttttttgacagagtcttgctgtgtcacctaggctggagtgcagtggtgcaatctcagctcactgcaacctccaccttctgggttcaaggaattctcctgcctcagcctcctaagtagctgggattacaggcatgcgccatcaggcccagctaatttttgtatttttagtagagacagggtgtcgccatgttgacgaggctggtcttgaactcctgacctcaagtgacctgcccaccttggcctcccaaagtactggaattacaggcatg

SEQ ID NO: 624744 - DNA, 575 bp, Homo sapiens
ggattacaggtgtgagccattgcacccaactggtatagccacgttagaaaacagtctggcagtttctcaaaaggctaaatgtacagtcatcctataatgcaaccatttcattcctaggcatatatcccagaaaaataaaaatatatgtccacacaaaaacttgtacaacaatcttcatagcagcattattcataatgaccaatacatggaatacatggaaacaacccaaatatccaccaactgatgaacagataaacaaaatgcagtgtgtctcyaccatggaatactgccatagaaggaatgaaatattgatacacactatgacataaaggaactttgaaaacactgtgctaagagggaaaaaaagccacaaaagatcacatattgtacaattctatttgtccagattaggcaaatctatagtgacaaaaaaattaatcaatggttgcctaaggctgggggcgaaggtaggtggggagagtaggaggtagtggctaaggggtatggatttctctatagggtaatgaaaggttctaaaagtgactgtggtgatcgatgcacagctctgtgaatat

SEQ ID NO: 624745 - DNA, 534 bp, Homo sapiens
aaaaacttgtacaacaatcttcatagcagcattattcataatgaccaatacatggaatacatggaaacaacccaaatatccaccaactgatgaacagataaacaaaatgcagtgtgtctccaccatggaatactgccatagaaggaatgaaatattgatacacactatgacataaaggaactttgaaaacactgtgctaagagggaaaaaaagccacaaaagatcacatattgtacaattctatttgtccagattaggcaaatctatagtgacaaaaaaattaatcaatggttgcctaaggctgggggcraaggtaggtggggagagtaggaggtagtggctaaggggtatggatttctctatagggtaatgaaaggttctaaaagtgactgtggtgatcgatgcacagctctgtgaatattctaaaacctactgaattgcagatttcaataaataaagtgaatggtatgtgaatattttaataaagctattatttaaaataataataatagggggctgggcacaggtggtcat

SEQ ID NO: 624746 - DNA, 293 bp, Homo sapiens
gaatgaacgctaaattcattacaattgcccatggtctttatttacacgccttctagtgaaaaattcctaagtgcctaaacagcaagtctgcaatgatagcagctgtttattaaagactacaaaaaagaaatggaggccgggcgtggytgctcacatctgtactccttgaattttgggaggctgaggcaggcagattgcctgaggtcaggagctccagaggagcctggccaacatggtgaaatcccatctctactaaaaatacaaaaattagctgggtatggtggcgggcacct

SEQ ID NO: 624747 - DNA, 293 bp, Homo sapiens
gaatgaacgctaaattcattacaattgcccatggtctttatttacacgccttctagtgaaaaattcctaagtgcctaaacagcaagtctgcaatgatagcagctgtttattaaagactacaaaaaagaaatggaggccgggcgtggctgytcacatctgtactccttgaattttgggaggctgaggcaggcagattgcctgaggtcaggagctccagaggagcctggccaacatggtgaaatcccatctctactaaaaatacaaaaattagctgggtatggtggcgggcacct

SEQ ID NO: 624748 - DNA, 496 bp, Homo sapiens
cagtaaatggatacaaagaggtccctatacctggctataaaatttttttggcgtgtgtgaagatgagtctccctatgttgtccaggctggttccaactcctggtctcaagtgatcctgccacctcggcatctcaaaatgctgggattacacatgtgtaatatttttattgtcactattttccacatattctggaaattttatttggatttcttttttctttttttttttttttgacagagtcttgctgtgtcacctaggctggagtgcagtggtgcaatctcagctcactgcaacctccaccttctgggttcaaggaattctcctgcctcagcctcctaagtagctgggattacaggcatgcgccatcaggcccagctaatttttgtatttttagtagagacagggtgtcgccatgttgacgaggctggtcttgaactsctgacctcaagtgacctgcccaccttggcctcccaaagtactggaattacaggcatg

SEQ ID NO: 624749 - DNA, 559 bp, Homo sapiens
atgaatttttaaaagctggaatgaatgagcagcaatagcagaaggagaaaagtgagtgagggctctccaagaagccatctggcaggctaagggttctgagggaagctctggtttcagaagcaactcaggaattacttctgtcatattaggatgggatggtaggagattgggaactctagggactagaagtcatttaatttcctgtctacaatccttggaagaaggtttgagacttgcaacctaggaccttaactaatcatcttccctcagcattgatagaattctttattatacatgttaatatcagattagtcaggatgggctrgattatgctgtgttaacagccattctctaaatctctgtggctcaactgggagctctgcctgtcatggtcacttgggacccaggctttgggtataaggctacagcacatggaaaacgtatgaatgtctctcagattcttaaagcttctgctggaagtgacatgtcattctgctcaccattcattggctaaatgagtcacgtggctctctctaacttcaaggatggtatgaaattg

SEQ ID NO: 624750 - DNA, 559 bp, Homo sapiens
atgaatttttaaaagctggaatgaatgagcagcaatagcagaaggagaaaagtgagtgagggctctccaagaagccatctggcaggctaagggttctgagggaagctctggtttcagaagcaactcaggaattacttctgtcatattaggatgggatggtaggagattgggaactctagggactagaagtcatttaatttcctgtctacaatccttggaagaaggtttgagacttgcaacctaggaccttaactaatcatcttccctcagcattgatagaattctttattatacatgttaatatcagattagtcaggatgggctggattatgctgtgttaacagccattctctaaatctctgtggctcaactgggagctctgcctgtcatggtcacttgggacccaggctttgggtataaggctacagcacatggaaaacgtatgaatgtctctcagattcttaaagcttctgctggaagtgacatgtcattctgctcacmattcattggctaaatgagtcacgtggctctctctaacttcaaggatggtatgaaattg

SEQ ID NO: 624751 - DNA, 559 bp, Homo sapiens
atgaatttttaaaagctggaatgaatgagcagcaatagcagaaggagaaaagtgagtgagggctctccaagaagccatctggcaggctaagggttctgagggaagctctggtttcagaagcaactcaggaattacttctgtcatattaggatgggatggtaggagattgggaactctagggactagaagtcatttaatttcctgtctacaatccttggaagaaggtttgagacttgcaacctaggaccttaactaatcatcttccctcagcattgatagaattctttattatacatgttaatatcagattagtcaggatgggctggattatgctgtgttaacagccattctctaaatctctgtggctcaactgggagctctgcctgtcatggtcacttgggacccaggctttgggtataaggctacagcacatggaaaacgtatgaatgtctctcagattcttaaagcttctgctggaagtgacatgtcattctgctcaccrttcattggctaaatgagtcacgtggctctctctaacttcaaggatggtatgaaattg

SEQ ID NO: 624752 - DNA, 367 bp, Homo sapiens
ccctgtcccaggtgagcagagggccccaccttcggaggttgcctcccttccaccttcaccaatcctatgaccagattatccccaaggaaatgtcaatttccaggcagcaagggaatcatataaagataagatcattgagagatttttttcctccgtgattggcagtttatattttcttgggtctacaaatctgacagcatttattaaattttctagtttgatactgacctctgtctgatgctgggctgtcaccatgcccaagactgaggggacccacagtctagctagaaggcatggatcaattccaactgycctacccctagcctgtgggcaggagaaagctctcaggctctggcacaggagtccc

SEQ ID NO: 624753 - DNA, 624 bp, Homo sapiens
ccatgccaatctctctattgttccaacttaagtatgtgtgctactgaggcaagcatgagtaatktaagatagagtggttaagtgaaataaggaagaattatggagaatttaaaaatctatgctatttataggcacctagtaacagctcagtaaatattagctgctactattattatttttatggtaatttcactcaattaaaaactgtcattaaaaattaccattgtcatggaacataatgtctcctactgtataattgtaaaaacagatacaatttgtcccttggtatatggggggattagttccaactctcccatttctgtgtataccaaaatccacgcatactcaagttttcgaagtcagtcctgtggaatccacatataacacaaatgggaaaattagtgaggtgtggtgacaagcacctgtagtcccagctacttgtgaggctgaggcaggaggattgcttgagcccaggaggttgaggctgcagtgagccataattgcaccactgcactccagtctgggcaacagagtgagacagaaggttgactttttaatagaatttttctgttcacttgaagatatggtcaggattgtggcatatgaaaattcttcataaaataa

SEQ ID NO: 624754 - DNA, 624 bp, Homo sapiens
ccatgccaatctctctattgttccaacttaagtatgtgtgctactgaggcaagcatgagtaatgtaagatagagtggttaagtgaaataaggaagaattatggagaatttaaaaatctatgctatttataggcacctagtaacagctcagtaaatattagctgctactattattatttttatggtaatttcactcaattaaaaactgtcattaaaaattaccattgtcatggaacataatgtctcctactgtataattgtaaaaacagatacaatttgtcccttggtatatggggggattagttccarctctcccatttctgtgtataccaaaatccacgcatactcaagttttcgaagtcagtcctgtggaatccacatataacacaaatgggaaaattagtgaggtgtggtgacaagcacctgtagtcccagctacttgtgaggctgaggcaggaggattgcttgagcccaggaggttgaggctgcagtgagccataattgcaccactgcactccagtctgggcaacagagtgagacagaaggttgactttttaatagaatttttctgttcacttgaagatatggtcaggattgtggcatatgaaaattcttcataaaataa

SEQ ID NO: 624755 - DNA, 543 bp, Homo sapiens
ggtgatgtctggtgctcaggtgtgttgaggtccccatgcctggactatgggtgmtgagtgggatttacttgtccatccattttctatattccagcactgggaaactagggtttatccatcttgataagatgtcatttaaattccacttcacaagaaccacaaatggaagaaaggccatgaaaccgcaggacagtacttgttctcaagggaatcttcagcttaggtggctctgtaaaagagaaattacattgttgaaaaatcgtcgcaggtcaggtgaggtggctcatacctataatcccagcccactgggagactaaggcaggaggattccgtgaggccaggagttcaagaccagcctgagcaacacagtgaaacctcatctctacaaaaaattagaaaatgaactgggtgcggtaaaacattcgtatagtcccagctactctggaggctgaaataggaggatcgcttgagcccaggaagtggaagctgcagtgagctctgatctcaccactgcactccagcctgggtgacagtgagaccctg

SEQ ID NO: 624756 - DNA, 543 bp, Homo sapiens
ggtgatgtctggtgctcaggtgtgttgaggtccccatgcctggactatgggtgctgagtgggatttacttgtccatccattttctatattccagcactgggaaactagggtttatccatcttgataagatgtcatttaaattccacttcacaagaaccacaaatggaagaaaggccatgaaaccrcaggacagtacttgttctcaagggaatcttcagcttaggtggctctgtaaaagagaaattacattgttgaaaaatcgtcgcaggtcaggtgaggtggctcatacctataatcccagcccactgggagactaaggcaggaggattccgtgaggccaggagttcaagaccagcctgagcaacacagtgaaacctcatctctacaaaaaattagaaaatgaactgggtgcggtaaaacattcgtatagtcccagctactctggaggctgaaataggaggatcgcttgagcccaggaagtggaagctgcagtgagctctgatctcaccactgcactccagcctgggtgacagtgagaccctg

SEQ ID NO: 624757 - DNA, 543 bp, Homo sapiens
ggtgatgtctggtgctcaggtgtgttgaggtccccatgcctggactatgggtgctgagtgggatttacttgtccatccattttctatattccagcactgggaaactagggtttatccatcttgataagatgtcatttaaattccacttcacaagaaccacaaatggaagaaaggccatgaaaccgcaggacagtacttgttctcaagggaatcttcagcttaggtggctctgtaaaagagaaattacattgttgaaaaatcgtcgcaggtcaggtgaggtggctcatacctataatcccagcccacwgggagactaaggcaggaggattccgtgaggccaggagttcaagaccagcctgagcaacacagtgaaacctcatctctacaaaaaattagaaaatgaactgggtgcggtaaaacattcgtatagtcccagctactctggaggctgaaataggaggatcgcttgagcccaggaagtggaagctgcagtgagctctgatctcaccactgcactccagcctgggtgacagtgagaccctg

SEQ ID NO: 624758 - DNA, 543 bp, Homo sapiens
ggtgatgtctggtgctcaggtgtgttgaggtccccatgcctggactatgggtgctgagtgggatttacttgtccatccattttctatattccagcactgggaaactagggtttatccatcttgataagatgtcatttaaattccacttcacaagaaccacaaatggaagaaaggccatgaaaccgcaggacagtacttgttctcaagggaatcttcagcttaggtggctctgtaaaagagaaattacattgttgaaaaatcgtcgcaggtcaggtgaggtggctcatacctataatcccagcccactgggagactaaggcaggaggatyccgtgaggccaggagttcaagaccagcctgagcaacacagtgaaacctcatctctacaaaaaattagaaaatgaactgggtgcggtaaaacattcgtatagtcccagctactctggaggctgaaataggaggatcgcttgagcccaggaagtggaagctgcagtgagctctgatctcaccactgcactccagcctgggtgacagtgagaccctg

SEQ ID NO: 624759 - DNA, 367 bp, Homo sapiens
ccagccagtggtgggtctcatatctcaatgtggacttttactaactcccgwtgcctcagtttcctcatcagttgaaaggaatgaatgaaagatatgtgtttttcatattatcaggtagatgataaggagattttaattttctttttttttttaacttttattttaagtttaggggcatttgttacataggtaaactggtgtcacagggggttattgtacagattatttcatcacccaggtattaaacctagtacccaatagttatcttttctgcttctcttccttttctcaccctccaccctcaagtagaccccagtgtctgttttattctttgtgttcattagttctcatcatttagctaccactt

SEQ ID NO: 624760 - DNA, 452 bp, Homo sapiens
actcctgaccttaggtgatccaccagcatcggcctcccaaagtgctgggattacaggtgtgagccactgcgtccagccagtggtgggtctcatatctcaatgtggacttttactaactcccgatgcctcagtttcctcatcagttgaaaggaatgaatgaaagatatgtgtttttcatattaycaggtagatgataaggagattttaattttctttttttttttaacttttattttaagtttaggggcatttgttacataggtaaactggtgtcacagggggttattgtacagattatttcatcacccaggtattaaacctagtacccaatagttatcttttctgcttctcttccttttctcaccctccaccctcaagtagaccccagtgtctgttttattctttgtgttcattagttctcatcatttagctaccacttataactgagagta

SEQ ID NO: 624761 - DNA, 367 bp, Homo sapiens
ccagccagtggtgggtctcatatctcaatgtggacttttactaactcccgatgcctcagtttcctcatcagttgaaaggaatgaatgaaagatatgtgtttttcatattatcaggtagakgataaggagattttaattttctttttttttttaacttttattttaagtttaggggcatttgttacataggtaaactggtgtcacagggggttattgtacagattatttcatcacccaggtattaaacctagtacccaatagttatcttttctgcttctcttccttttctcaccctccaccctcaagtagaccccagtgtctgttttattctttgtgttcattagttctcatcatttagctaccactt

SEQ ID NO: 624762 - DNA, 452 bp, Homo sapiens
actcctgaccttaggtgatccaccagcatcggcctcccaaagtgctgggattacaggtgtgagccactgcgtccagccagtggtgggtctcatatctcaatgtggacttttactaactcccgatgcctcagtttcctcatcagttgaaaggaatgaatgaaagatatgtgtttttcatattatcaggtagatgataaggagattttaattttctttttttttttaacttttattttaagtttaggggcatttgttacataggtaaactggtgtcacagggggttattgtacagattatttcatcacccaggtattaaacctagtacccaatagttatcttttctgcttctcttccttttctcaccctccaccctcaagtagaccccagtgtctgttttattctttgtgttcattagttctcatcatttagctmccacttataactgagagta

SEQ ID NO: 624763 - DNA, 691 bp, Homo sapiens
gcctcactagtatctgttattttttgactttttaatgatagctattctgactggtgtgagatggtatctcattatggttttgatttgcatttctctaatgatcagtgatgttgaactttttttttgtatgtttgttggctgcatgcatgtattcttttgaaaagtgtctgttcattccctttgcccaattttaatggggttgattgtttttcttttgtaaatttctttacattygaaatgtttttattattaagttgagctgcctcattcttagtatggtttttcactttaaaaagcataaaggtggacatggtggcgtatgctagtaatcccaactactggggagactaatacaggagggttgcttgagcccaggagttcaaggctataatgtgctatgatcatgactgtgaacaaccactgtactgcagcctgggcagagtgacatagtgaaaccatatctctaaaaaaagagaaaatgtaatttaaatctttaaatacatatgtatatgtgtgtatatatgtatatatattgcatatatcaaaaatggtttgtagtttccattcacagcacatagtaaaatgtcttaacctcctccctcctccctatgtgtgtttttctaagagagagttttttttaccttaatttttctcttagtgtctcatagtcttcttagatctccctctttct

SEQ ID NO: 624764 - DNA, 691 bp, Homo sapiens
gcctcactagtatctgttattttttgactttttaatgatagctattctgactggtgtgagatggtatctcattatggttttgatttgcatttctctaatgatcagtgatgttgaactttttttttgtatgtttgttggctgcatgcatgtattcttttgaaaagtgtctgttcattccctttgcccaattttaatggggttgattgtttttcttttgtaaatttctttacattcgaaatgtttttattattaagttgagctgcctcattcttagtatggtttttcactttaaaaagcataaaggtggacatggtggcrtatgctagtaatcccaactactggggagactaatacaggagggttgcttgagcccaggagttcaaggctataatgtgctatgatcatgactgtgaacaaccactgtactgcagcctgggcagagtgacatagtgaaaccatatctctaaaaaaagagaaaatgtaatttaaatctttaaatacatatgtatatgtgtgtatatatgtatatatattgcatatatcaaaaatggtttgtagtttccattcacagcacatagtaaaatgtcttaacctcctccctcctccctatgtgtgtttttctaagagagagttttttttaccttaatttttctcttagtgtctcatagtcttcttagatctccctctttct

SEQ ID NO: 624765 - DNA, 550 bp, Homo sapiens
ctagtatctgttattttttgactttttaatgatagctattctgactggtgtgagatggtatctcattatggttttgatttgcatttctctaatgatcagtgatgttgaactttttttttgtatgtttgttggctgcatgcatgtattcttttgaaaagtgtctgttcattccctttgcccaattttaatggggttgattgtttttcttttgtaaatttctttacattcgaaatgtttttattattaagttgagctgcctcattcttagtatggtttttcactttaaaaagcataaaggtggacatggtggcgtatgctagtaatcccaactactggggagactaatacaggagggttgcttgagcccaggagttcaaggctataatgtgctatgatcatgactgtgaacaaccactgtactgcagcctgggcagagtgacatagtgaaaccatmtctctaaaaaaagagaaaatgtaatttaaatctttaaatacatatgtatatgtgtgtatatatgtatatatattgcatatatcaaaaatggtttgt

SEQ ID NO: 624766 - DNA, 691 bp, Homo sapiens
gcctcactagtatctgttattttttgactttttaatgatagctattctgactggtgtgagatggtatctcattatggttttgatttgcatttctctaatgatcagtgatgttgaactttttttttgtatgtttgttggctgcatgcatgtattcttttgaaaagtgtctgttcattccctttgcccaattttaatggggttgattgtttttcttttgtaaatttctttacattcgaaatgtttttattattaagttgagctgcctcattcttagtatggtttttcactttaaaaagcataaaggtggacatggtggcgtatgctagtaatcccaactactggggagactaatacaggagggttgcttgagcccaggagttcaaggctataatgtgctatgatcatgactgtgaacaaccactgtactgcagcctgggcagagtgacatagtgaaaccatatctctaaaaaaagagaaaatgtaatttaaatmtttaaatacatatgtatatgtgtgtatatatgtatatatattgcatatatcaaaaatggtttgtagtttccattcacagcacatagtaaaatgtcttaacctcctccctcctccctatgtgtgtttttctaagagagagttttttttaccttaatttttctcttagtgtctcatagtcttcttagatctccctctttct

SEQ ID NO: 624767 - DNA, 550 bp, Homo sapiens
ctagtatctgttattttttgactttttaatgatagctattctgactggtgtgagatggtatctcattatggttttgatttgcatttctctaatgatcagtgatgttgaactttttttttgtatgtttgttggctgcatgcatgtattcttttgaaaagtgtctgttcattccctttgcccaattttaatggggttgattgtttttcttttgtaaatttctttacattcgaaatgtttttattattaagttgagctgcctcattcttagtatggtttttcactttaaaaagcataaaggtggacatggtggcgtatgctagtaatcccaactactggggagactaatacaggagggttgcttgagcccaggagttcaaggctataatgtgctatgatcatgactgtgaacaaccactgtactgcagcctgggcagagtgacatagtgaaaccatatctctaaaaaaagagaaaatgtaatttaaatctttaaatacatatgtatatgtgtgtatatatgtatatatrttgcatatatcaaaaatggtttgt

SEQ ID NO: 624768 - DNA, 550 bp, Homo sapiens
ctagtatctgttattttttgactttttaatgatagctattctgactggtgtgagatggtatctcattatggttttgatttgcatttctctaatgatcagtgatgttgaactttttttttgtatgtttgttggctgcatgcatgtattcttttgaaaagtgtctgttcattccctttgcccaattttaatggggttgattgtttttcttttgtaaatttctttacattcgaaatgtttttattattaagttgagctgcctcattcttagtatggtttttcactttaaaaagcataaaggtggacatggtggcgtatgctagtaatcccaactactggggagactaatacaggagggttgcttgagcccaggagttcaaggctataatgtgctatgatcatgactgtgaacaaccactgtactgcagcctgggcagagtgacatagtgaaaccatatctctaaaaaaagagaaaatgtaatttaaatctttaaatacatatgtatatgtgtgtatatatgtatatataktgcatatatcaaaaatggtttgt

SEQ ID NO: 624769 - DNA, 553 bp, Homo sapiens
ttttttttttttttttgataggaaactagctctgtcacctaggctagagtgcagtggtgcaaacatgactcactgcagccttgacctcatggactcaagtgatcctcaagtgatcctcttgcctccacaacatccagctaacttttaaaaaaatttttgaagagaaggttttgccatgttgcctcagcctcctgaagtggtgggattacaggtgtgagccactgcacctggccacgttttctttccattcttatggaaggcagtagtcagcaaaacagttaatcaattgagaatatattaggttgttataggaaccatgaaaaaataaaatagagtgtgtaaagaaggcttgatggccaggaagcttttacagggaagtgacattkgaactgagaccaaatacttaaagaagccagttctttgaagagttgatgggaaagtattccaagaagtgggaatggcaaggggaaaggacttaagatgtaacctcagaatgattaaggaggagcatggtacaagaggatgtcagaaacatagccaggaaagagagcta

SEQ ID NO: 624770 - DNA, 553 bp, Homo sapiens
ttttttttttttttttgataggaaactagctctgtcacctaggctagagtgcagtggtgcaaacatgactcactgcagccttgacctcatggactcaagtgatcctcaagtgatcctcttgcctccacaacatccagctaacttttaaaaaaatttttgaagagaaggttttgccatgttgcctcagcctcctgaagtggtgggattacaggtgtgagccactgcacctggccacgttttctttccattcttatggaaggcagtagtcagcaaaacagttaatcaattgagaatatattaggttgttataggaaccatgaaaaaataaaatagagtgtgtaaagaaggcttgatggccaggaagcttttacagggaagtgacatttgaactgagaccaaatacttaaagaagscagttctttgaagagttgatgggaaagtattccaagaagtgggaatggcaaggggaaaggacttaagatgtaacctcagaatgattaaggaggagcatggtacaagaggatgtcagaaacatagccaggaaagagagcta

SEQ ID NO: 624771 - DNA, 561 bp, Homo sapiens
tcacaattctagaggtgagaagtccagatcaagaagctggcagggctaggctgcctgaaaaggtgctaaggaaggaactgttccagtcctctttctctccttccagtagttccttggcttgtgacagcacagtgtcaattctcatatggcatcctccccgtrtgcctctctctatgtccaaatctcccttttatttaaggacagagtcacagtggattagaacacccccataacatgaagattgcatgaaattatatacatattaattcaacaacatagcttccaaatagaaaacactcagcctttgtcatctcatcattatttgtttacacctttgtattattggtatagctctagtcttttgaaaggtgcagttactcatctttgtgttttccactcctttatagctaagtgtaaggtgcttttgcaaaatccagtactgcatatttgagaaatgctttttattcctacacatactgcatatactgttacacaattcgattttgtaggtctaatgaagttggtctttctatgagttcctatggctaaaaatagtcacaa

SEQ ID NO: 624772 - DNA, 505 bp, Homo sapiens
gttggaattacaggcacccaccaccatgcctggctaatttttgtatttttagtagagacggggtttcaccatgttggctaggcaggtcttgaactcctgacctcaggtgatccacccacctcagcctcccacttttcttttttcttttttctttttttttgagacaggatctcattctgacacctaggctgaaatgcagtgccactatcgtggctcactgcagcctcaacctcccatgctcaagcaatacttctgcctcagcctcctgagtagctgggactacaggtgcacaccaacatgcttggcattttttgtttgtttgtttgtttgtgtttttgttttgtagagaagggatctccctatgttgccaaggctgagccactaactttctgagaagggaggtatcattagaggatagagaggcatcattactcaatggaaccyggcttcctgtattcaaatcttggctcagccatttgccagccctatgacctgaagcaagtta

SEQ ID NO: 624773 - DNA, 478 bp, Homo sapiens
tcctttatctgtggaaagagctattctggccacagttactgccaagaaacaaggtgttagaaaaggcctaaagttaagtgcagaactgctgtgttttgatgaatattcygttgttttgagaggaggtagaagcattctcagcttcaggatatttgctcactactcattagtctctctgagaagtagcaaacttcaaaggttaaatatgaaggatgaattgtgtaatgcctagatgtcagtagcggagaaggtatctgagcaaattcaggattttatccctgtctccatgggcctagtgtgaagaacagtcatttgtgtaagtgggtctttgtgtatatggtactgaatcaggtcactgagtcagaaacttagagctgtaaggaaagtgaggtgctctccagtccagtgttctggaatttcttctgcagtggcccccaacagcaggtggcagcctcatccatgattgtattcttaagtg

SEQ ID NO: 624774 - DNA, 622 bp, Homo sapiens
aagaaaattattcttaaaaatgaccaaatagcaatggaattttcatatatcaactgcctgcctgtggggatggttttgtggttcactgaggttgcaacttccttgtgcactttcaccttttacttcccttcactcttctgccagaaaggtgacaggtggggcctttctgggcagtgagaacatactgtttactttggcaatcttacagatttcttacagaaggtgatacgattttctttagggttagacttctgaagcaattrtttgaccagtatcattttgtactttatgaatcaagagcttaaaaaatagattttctgaaaagtctcttctttcctttctatcttagtttgtctactttctttttctttttcttttgagatgtggcccaggctacagtgcagtggcacaatcttggctcactgcagcctctgcctcctggcttcaagcgattctcctgcctcagcctcttgagtagctgggattacagacgcctgccactgcacctggctaatttttgtatttttagtagagatgggagtctcaccatgctgcccaggctggtctcgaactcctgacctcagcctcccaaagttctgggattacaggcgtgagtcactgt

SEQ ID NO: 624775 - DNA, 585 bp, Homo sapiens
ctgggcacagtgactcacgcctgtaatcccagaactttgggaggctgaggtcaggagttcgagaccagcctgggcagcatggtgagactcccatctctactaaaaatacaaaaattagccaggtgcagtggcaggcgtctgtaatcccagctactcaagaggctgaggcaggagaatcgcttgaasccaggaggcagaggctgcagtgagccaagattgtgccactgcactgtagcctgggccacatctcaaaagaaaaagaaaaagaaagtagacaaactaagatagaaaggaaagaagagacttttcagaaaatctattttttaagctcttgattcataaagtacaaaatgatactggtcaaataattgcttcagaagtctaaccctaaagaaaatcgtatcaccttctgtaagaaatctgtaagattgccaaagtaaacagtatgttctcactgcccagaaaggccccacctgtcacctttctggcagaagagtgaagggaagtaaaaggtgaaagtgcacaaggaagttgcaacctcagtgaaccacaaaaccatccccacaggcaggcagttgatatatg

SEQ ID NO: 624776 - DNA, 564 bp, Homo sapiens
  misc_feature 237, 240, 254, 260, 264, 266, 268, 272, 279, 285, 286, 289,307, 308, 311, 313, 327, 364, 379, 386, 412: n = A,T,C or G
ggtacaggtgcagtgctgggctcagtgaggagtctgcagctctaccccaacattcaggcggccacagtgctagtgaagggttttggagaagaggacttctaatccccttctcccactactgaaaacacagctagggcttcttccatgggagcatggcatgagtgcaatacacaaccttcctggaacacctcagggtgactgcatcacctcaagaggagwgccctccatgctcaggcncanataagagggagcgncaaacncgcncncnacanggaacancagcannccngcaaaaaaaaaggggagnnagngngaacttttttatcnttttcactgggaccgcagctgcgaccaagaagcaaanagcttttttgttggnaaggaangagaaccggggctcgcccccgccccncctttgaaaagacttcagtgcatttgaatgagagcttacccaggcaccctgtatcaaggctgagacctcttcctaacatggggatattggatttacccacctgctttagctgcagccagtttttacccatgggcacaccctaacctgcctga

SEQ ID NO: 624777 - DNA, 602 bp, Homo sapiens
ttgaatccactgggaagagtctctcagcaaagactgctgtacttattattatgtttatgtgggagcactcctggcatcagctctggtttggagcatggggaagtgagattgggctaaatgagaggtctagttcttgttcaggcaggcaccaataacagcctcagttgaccctacagaaagctcaagagctaaaacagcttattagaagcattccaagtacattgcaattaaaataagccctttatcctcttgtatctgtctctgtagatgtgagccatccccaatatgataatcccatgtaaagcatcttgctgaagttgaggcagtctctgaaggccaactgaaagttatttgccaactgyaagcccagaagataaggcaatgtgattttcttcaaagggtgtgctgtatggtctatttctatgcaagaaaacttattttaccttgatgtagaagaagaactgagagaagtgatttgaataaagtaataaagatatcaagatatagaatctgagataaaggaatattcttctaaactttttaaatctctctaaatgcacagtaacttactcatgatgaagacaggttcaggcccaaaaaat

SEQ ID NO: 624778 - DNA, 472 bp, Homo sapiens
gaattgaaaactgcagaagggagatacatctcattttcttaaagatagtcatagatcaaacagatttttctatttttaagagagagaatgagaataagaagaatttatttggatttatatcaataacaacatacagagttacattattagatattttttgaataatttgttctcaattttttataatcaaattttcaaaaatattcacaaattgtttcttaacatctcaaacttgcagaataggtgctttttgtaattataatacattctttgtagttttttcacatttgaaaaaatccagacatagttgacaactattttatttagtaattaacaaaacagaacggcttgctagttaatawaatatataagctattagtcacacaaattactaccatacaggaggaaaaaaacattaaatttcatgagaaaagctaatgacaggaagcctacactgattttcacttcttta

SEQ ID NO: 624779 - DNA, 627 bp, Homo sapiens
gagctttgggttatggttcactaataataattagaaaaaatgggcatgcacattgagagagataatagttaggtaacattctcaacaatagtggcaagcataagaaaatataggttgagtgtgccatcttgctgtttcttatacaccataaagagaggctactacttgataaactattccttatcttcgtgatgggcattgaccttattttctagaatttctcaaatggactcagacctaaataaataaagtaatatgttttgtttgcagaattggccagcacaccatcytccactatcttcttccatctgacattggatgttgactctagagtgactcagaaatcatgtagtgaagatggtgaagtctcctggatctttgaatgtttagaaatacactttctactacccattagaaacacatattttagaattaatgatagagaaaattttatgtataagctactcaaattttgagacttatttcttatagcagctaacttaattaatatagcatcttaattttctttatcactatagcatttaacaaaatttattttaaagaatctataaagacttctctcacaaataaaaaagtcagtataagagatgtttattttttcttttt

SEQ ID NO: 624780 - DNA, 682 bp, Homo sapiens
accttttgggaaattgtttgtttcttataatgttaataatatatttactatgtgattcaamtattttaccactaagtgtttacacaggataaataaaaacatatgctcatacaaaaactcatatatgaatgttcattgacagcattcttttaatagccaacatgggaaacaacctaaatatccaccaacaatggggagaactcttggagagagaactaaggagagaacttcaacaatttttttgtttttttttttttttagttttcaagagagacttggatataatatttttgctccttcataatgtcttttatccaaggggagaggatttggcaatcaaatatttgcaagcttgatattcatcacggctgcctttattatgtgctaggatctgtttgttggcagtcagagagaaatgcacaggcttctattcactgatttgggaagagagccaaagctttttgagtgtttaaggatgtctgggcaccacagagtggcagcctgtgtcaggattctgttaggattactaaccaattaactgaatgtcctaggtcaacttctagctagtcatggggcatacaactgagttcttctcggcttctttttctgcctgtaatggacaaggtgaagcaggcctgctttatttatctaggcagctgtttgggttactggactttatata

SEQ ID NO: 624781 - DNA, 568 bp, Homo sapiens
ttgatgagattccactgccttcctgaaaaggctaagagaggccttggtaaagcacacctctctacctcctgattcagctgaaggacaactaatcctaaaggataaatttattactcaggcaacccctgatatcaggaggaaactatacaaacaggtcctgggaccagacagtactttagagaacctcctgaaagtggccaccctggtcttttataatagatacaagaagaccccagagagagagagagaagacaaaggaaagaggtagaaactttaatggccaccatggaagcccacaagccccagaatctctgaggtgcacttgttawcagctacagatttggtaaatcagggcattttagggaggattgcctaggcagcatgaaaaacccatcttgaccctgttcaatctacagtgaggattactggaaggtgaacttcccccagggatgctggtcactgggcccagagccaatttcccaaatggtccagtaggaatgaggagtcgtggggcttctctccctggctctgatggtccagatcaccattaacatccaggagccctggg

SEQ ID NO: 624782 - DNA, 565 bp, Homo sapiens
caaacatccatgaacaccttcaagggctgcttctctcctgtccttggacagtcctccactgtctgtctcttactcatggcctctggggagcaggacaggggcctggctccagaccatatggtccaaaaattctcatcaacatcccgcatttccagcacttgaagtttccacctcctgtgagtaacataggggaaaagctcagaacgtagacaaggacccacccctgacctgggctttcactccacatcaaggacytcagctgcttttttcctcagcgcccctccttctgtctcttctccatccctttcccccttggattctgcctggtacccacttctagtgcctttaccttccactgggagcaggcaggttcctgtttcctcagtggaccctgtatggtgagcagtcctttcccagaggagctgggcaatagccaagaacgttcccagctttctcactggcaccatcagaagcccctgggccaccccaggttcccaatttgtctgacccagctgcttagtccctggacacctgggccctccccacctgggtcacctcacctggg

SEQ ID NO: 624783 - DNA, 245 bp, Homo sapiens
tcctgtttcctcagtggaccctgtatggtgagcagtccttttccagaggatctgggcaatggtcaaggyctctcatgggcaccatcagaagcctctgagccaccctagctccccaaccccaccactcctcctgagccagctgtcccttccctggatgcctggacccttcccaccaggccacctgagtcacctcacctggggcgaagcttctgggccagcagtgtatcaagtcccttcagcacagc

SEQ ID NO: 624784 - DNA, 245 bp, Homo sapiens
tcctgtttcctcagtggaccctgtatggtgagcagtccttttccagaggatctgggcaatggtcaaggtctctcatgggcaccatcagaagcctctgagccaccctagctccccaaccccaccactcctcctgagccagctgtcccttccctggatgcctggacccttcccaccaggccacctgagtcacctcacctgrggcgaagcttctgggccagcagtgtatcaagtcccttcagcacagc

SEQ ID NO: 624785 - DNA, 245 bp, Homo sapiens
tcctgtttcctcagtggaccctgtatggtgagcagtccttttccagaggatctgggcaatggtcaaggtctctcatgggcaccatcagaagcctctgagccaccctagctccccaaccccaccactcctcctgagccagctgtcccttccctggatgcctggacccttcccaccaggccacctgagtcacctcacctggggcgaascttctgggccagcagtgtatcaagtcccttcagcacagc

SEQ ID NO: 624786 - DNA, 477 bp, Homo sapiens
ttcctcagtggaccctgtatggtgagcagtccttttccagaggatctgggcaatggtcaaggtctctcatgggcaccatcagaagcctctgagccaccctagctccccaaccccaccactcctcctgagccagctgtcccttccctggatgcctggacccttcccaccaggccacctgagtcacctcacctggggcgaagcttctgggccagcagtgtatcaagtcccttcagcacagcttgcaaggtctccagatgaggtgtcttcatcagggatcccagagggaggcggaggaagggccaggcctgcaccatcagcttcagggcctcaaaatgtctcatgctggaggcctccatgaacatcagagggaagacctccctgggcagctcgtccaggatgaagatggtcaagaactggttcctcagyaggctctggcctgccagctccaggagtctggatggggactggaggctcatt

SEQ ID NO: 624787 - DNA, 477 bp, Homo sapiens
ttcctcagtggaccctgtatggtgagcagtccttttccagaggatctgggcaatggtcaaggtctctcatgggcaccatcagaagcctctgagccaccctagctccccaaccccaccactcctcctgagccagctgtcccttccctggatgcctggacccttcccaccaggccacctgagtcacctcacctggggcgaagcttctgggccagcagtgtatcaagtcccttcagcacagcttgcaaggtctccagatgaggtgtcttcatcagggatcccagagggaggcggaggaagggccaggcctgcaccatcagcttcagggcctcaaaatgtctcatgctggaggcctccatgaacatcagagggaagacctccctgggcagctcgtccaggatgaagatggtcaagaactggttcctcagcaggctctgscctgccagctccaggagtctggatggggactggaggctcatt

SEQ ID NO: 624788 - DNA, 546 bp, Homo sapiens
aatgggatccggggagtgaaccaagacttggtaaacatgttgggggttattgagggcgtggaggaggaatctttccaacattgcactgaggcccccttggtgttgatacttgtgaccaagaatgagtcttccaaaacagtgtatgtaattctcctgatttttcctttcaaaacctttgtcttcctttacctccctgaataatctcacatctattcccattgctttgctcatttcataataaaaatcctttttttttttaaaagaatctctttctctgtgaagtagaccatatattttattgccacacaacatgagtagcctggtattatggagagaaagggtcaaaaggatcccattccccaccagytgggggtgatataaaggtcctggttattatttgtcatatgtgcacctgcatattgccagtgaaaacttacaggtcacatttttcaggagtccaaattaaccacctgtggaaggtcttatgattggcttacattctgtccctgagtaaagaatctgatcttgagttcatgagtgcctcaa

SEQ ID NO: 624789 - DNA, 603 bp, Homo sapiens
gaattccctttatttccttctcctgcctgattgctctggccagaacttccaacactatgttgaataggagtggtgagagagggcatccctgtcttgtgccagttttcaaagggaatgcttccagtttttgtccattcagtatgatattkgctgtgggtttgtcatagatagctcttattattttgagatgcgtcccatcaatacctaatttattgagagtttttagcatgaaggttgttgaattttgtcaaaagccttttctgcatctattgagataatcatgcggtttttgtctttggttctgtttatatgctggattatgtttattgattttcgtatgttgaaccagccttgcatcccagggatgaagcccacttgatcatggtggataagctttttgatgtgttgctggattcagtttgccagtattttattgaggatttttgcatcaatgttcatcaaggatattggtctaaaattctctttttttgttgtgtctctgccaggctttggtatcaggatgatgctggcctcataaaatgagttacggaggattccctctttttctattaagtggaatagtttcagaaggaatggtaccag

SEQ ID NO: 624790 - DNA, 543 bp, Homo sapiens
actatctatataaccaacagatgttacatcatctatataaccccaaatccctaggcatggtaagcagataccttatttgaacsactatcatctaaagtcatgagttcccaccctgttaggagttatttacagaaggggagtctagtctccataagagagtgctacaataaggctgtcatgttgtggaagctcagaataataattccccaaaacacattcttgtactaatctatggaacctttgactgtgttagtttacatggtgtattagtccattgtttcatgctataaagaaatacctgagactgggtaatttataaagaagaggtttaatttgctcatggttccacaggctgtacaagaagcaggaaatttctaattacagcaaaaggcaaagggggagcaggtacatcacatggctagaacaggagcaagacagaaagagggaaggtgtcacacacttttaaacaactagatctgggaagaactcactattgtgaggatactgctaagaggatgatactaaaccattcatgagaaacca

SEQ ID NO: 624791 - DNA, 543 bp, Homo sapiens
actatctatataaccaacagatgttacatcatctatataaccccaaatccctaggcatggtaagcagataccttatttgaaccactatcatctaaagtcatgagttcccaccctgttaggagttatttacagaaggggagtctagtctccataagagagtgctacaataaggctgtcatgttgtggaagctcagaataataattccccaaaacacattcttgtactaatctatggaacctttgactgtgttagtttacatggtgtattagtccattgtttcatgctataaagaaatacctgagactgggtaatttataaagaagaggtttaatttgctcatggttccacaggctgtacaagaagcaggaaatttctaattacagcaaaaggcaaagggggagcaggtacatcacatggctagaacaggagcaagasagaaagagggaaggtgtcacacacttttaaacaactagatctgggaagaactcactattgtgaggatactgctaagaggatgatactaaaccattcatgagaaacca

SEQ ID NO: 624792 - DNA, 581 bp, Homo sapiens
tttcaggttttataacaatgtccccctcctcagcaccaattttctgtattaagctgttcttgcattgctataaagaaatgcctgagactgagtaatttataaagacaagaggtttagttggttcacagttctgcagatattaaaagaagcatgatgctatcatctgcttgtcttctggggaggctgcaggaaacttccaatcctggcagaatstgtaggggtagcaggtatgtcacatagccagagcaggatcaagagagaaatagggaacgtgccacatagttttaaatgaccagatcttatgagaactcactatcacaagtgcagtgctaaaatgatggtactaaaccattcaggaaagactacccctgtgatccaatcacctcccaacaggcctcacctccaacattagcaattacatttcaacatgagatttggttggggacacagatccaaaccatatcacatggcaaagtggaagtaaagttgcagatagaattaagattgctaattatctgaccttcaaataggaagatgtttctgtgtgtattcatttatgcattcattctattcatctatat

SEQ ID NO: 624793 - DNA, 360 bp, Homo sapiens
tgttgtctgcattttatggggcgaatgagacaaagagtcagcctcttcagtccctgaggcccagcctcgcccctctcaccccccagaggcagctcccatgcatccaagcaaggcacccaggattccgggcttcaaaagaccaggcatggggcccataacaaatttcttgccataacaagacttcttaaccctttttgtgccctaggyccttctggcaactagtgaagcctaaggataatctcagaataatgattttagacacataaaatgaaatgtataggattataaagaaaatcaattatatcgaaatacagttgtcaaaatatttttcaatttgttataaaatcataagtaggcttc

SEQ ID NO: 624794 - DNA, 624 bp, Homo sapiens
tctcgctctgtcgcccaggctggagtgcagaggtgcaatctcagctcaccgcaacctccgcctcccgggttcaagcgattctcctgcctcagcttcccgagtagctgggacaacaggcatgcaccaccatgccctgctaacttttgtatctttagtagagatggggtttcaccatgttggccaggttggtgtcgaactcctgacctygagtgatccgcctgcctcagcctcccagagtgctgggattacaggcgtgagaccccaagcctggccctcctctttaaacaccacttttttttttcccaactcacaaaccttaagttattccctatttcctactgaaaatcatccaaatttattcgccggacactcaaggcaccactatcagctggatgtatctttccttacatgtttccagactggtttccctgatgtctccatcacatactagagtaatcagggtatgctggctgctgtaacaaataacccccagatctcagtggcttatcacaaccaaggttgattgcccactcatgacacaatccaatgtagctggcagtgggggagcagtagagttctgctccacacagacatttaggaacccaggctgcctccatctagtga

SEQ ID NO: 624795 - DNA, 515 bp, Homo sapiens
ctacttttaaatacacaaaggaattttgaaaacaccaatcaaaagtcaaaatttcaccctgcagcatggcccggcacccagaacactcagcaagaggaaggtctgtatttatggcttttccactgacttgaaatttgacctggaataaatcatgtttaacttctttatgcttcaattagcttttgaaagatatgtgtggttgtgtttagccagtggaaaggcaataactgaagttcacaacgaaaggagaacttgaagggaaattttgttaggaaagaacagtgggcaagaatacaatcttcaggcagggtgctattcctaaaaagtcttggtacacatggttcctaaggaaggtgggacattttcttataatattctttctgtattttgtagaattaagaaatatattattgtacataaatattttatattacattatatatgtataaatacatttatatatatatatatatatatatatayacatactgttttaccctttaactccagaaagc

SEQ ID NO: 624796 - DNA, 558 bp, Homo sapiens
aatggatagaggctttgggatggacatctcgtgaactgtatcttcatatcaagctctgtgaactgaatggcaacaaggaggcattcatccagaccaggagtaggcaaactatggtccatgggccaaatccagcctgttcttgtaaataaagttttattagcacatagctacatccaataatttgtctaatgtctatagcagtttttgcactacactggcagaatttgatttgagtcatggtgaaagagaccatagtccaagaaagcctgaaatatctactatctgatcctcatcagaaaatgtttgccaactgtagtctayacctttgcacgtcagagaattgcatcagggaagaactagaagccctccttttgcacccccacaaccctgccacaattcagtgaacaaacagaagatcagagagggaatgtgacttgaccaaagtcacacagctggttcataggaaagccaggacctgagctcagatcttccagttcctagtgtatttgtcttctacttttggaggacgttgtgagttttctggtttacagatgatta

SEQ ID NO: 624797 - DNA, 387 bp, Homo sapiens
taaatgaaatcatgtaatattatgaatggcttctttcacttaacataatgttttcaaggttcatcygtgttgtagcatctattaaaatttcattcctttttattgctgaataatatctaattgtatggatataccagtttgtttatccattcaaagtttttactttttggctattatgtataatgctgccatgcatatttatgtgcaagtttttgtgcttacatgttttcagttctcttggatatatcaaagaggagtttctggtccatatagtaactctatgtttgaccatttgaagaacaattaccctgttttcgaaagtgcctggaccgtcagtagtgtatgagagttcagtttctccacagcctttttactcctttttactat

SEQ ID NO: 624798 - DNA, 567 bp, Homo sapiens
atgtggtttgcaaatattttcttgcagtttgtagcttgtcttttcattcttttcatcccgtgtctctcacagagaaaaaatttttaattttgatgaagtctagttcaccaatttttccttttatgaattgtactttcagtgtcaagtctaggagttgtttayctggccctagattccagagagaggctcctattttttttcctataaggtgtttagctttttgttttatatttaattctgtgacacattgtaagttcattattgtataaggttgaggttcaatatttttgttgataaatgtccagttccctagcactaattgtggaaaaagctatcttctctccattgaatcacttttgcaccattgtaaaaactaaccgagcatatttgtgtgggtctgtttctgggttctatgcctgttaatatgatggattataatgatagattttcaaatattgaaccccttgcatccttggcctaaaccccacttagtcatggtgtatacttctttgtatatttgctgaattctgtttgtaatattttgttaaagatttttgcaccctatat

SEQ ID NO: 624799 - DNA, 584 bp, Homo sapiens
ttaatatagccatttctcatttcttttgattaatgttcctatgatatatctttttccatccttttagtttcaacctgcctgtatagttatatttgaagtgagttttttatagacagcatatagttggatcatgttttttaatccagcctgtcaacgtctattttgaccatttacatttaatgtattattaatattttagggcttaagtctttttttgtctacgtgttctctctgcattatgtcctgttttcttccttcctgtcggttacttaacattgtttcagaattctgaaaaataaactatttatttatagtgtttttgagactatctctttgtatagcytttttagtggttgttctaagtattacactatgtttacataacttatcacagtctactgatgcaattgttttaccagtttaagtgaactgtaaatctccctttatgtctctttacccagctctttaaaaaattatctttagttatttcctgtacatatatttagaaccatatcagacaatgttatcatttttgcttctatggtaaaacataatttagaaaactcaagaggagaaagaaagtc

SEQ ID NO: 624800 - DNA, 602 bp, Homo sapiens
gagaagctcatttgtttcaggaagtttccctgagcgagtggaaggggaggcctcacactgaagccagaatacaaaggaagtcctcttgagatggataaagcagttcttacatgcaaatctcagaaaatggcaactccatctttccacctgttcaagcccagaaccgttggcagtgtcttgactctctcgtcagaccccacatccaatttgccaaaaatccagttaaatctaccttcaaaacatatccagaatctgaccatttttcagccctgggactgctaccactggagttaaaccaccaccgtccttcgtcagggttactgcgacagcctcctaaattggcycttgcttccccagttaccggcccacaccagtctactgcctgcattaggttgatgccacagctctgctcagagaccaagggctcccccaaggtcaagtaaaagcccttcatggcctacaaggctggcctcgatcaggtcctcaacttttctgatctcatctatccctgtccttgctcccacactgccagcctcactgtcctctttgctggtcctcaaataagccagctgctctcttgcctcagggcctttgtattagct

SEQ ID NO: 624801 - DNA, 602 bp, Homo sapiens
gagaagctcatttgtttcaggaagtttccctgagcgagtggaaggggaggcctcacactgaagccagaatacaaaggaagtcctcttgagatggataaagcagttcttacatgcaaatctcagaaaatggcaactccatctttccacctgttcaagcccagaaccgttggcagtgtcttgactctctcgtcagaccccacatccaatttgccaaaaatccagttaaatctaccttcaaaacatatccagaatctgaccatttttcagccctgggactgctaccactggagttaaaccaccaccgtccttcgtcagggttactgcgacagcctcctaaattggctcttgcttcyccagttaccggcccacaccagtctactgcctgcattaggttgatgccacagctctgctcagagaccaagggctcccccaaggtcaagtaaaagcccttcatggcctacaaggctggcctcgatcaggtcctcaacttttctgatctcatctatccctgtccttgctcccacactgccagcctcactgtcctctttgctggtcctcaaataagccagctgctctcttgcctcagggcctttgtattagct

SEQ ID NO: 624802 - DNA, 401 bp, Homo sapiens
tgggcaacagagcaagaccttgtctcacaaaaaaaaaaagaaaagaaaagaaaagaaaaagataaacacagtgagctgtggagagacttagaaaaggcacctgatccatctgtaaaagctcatggagggcttgttaagggagatgacagcaaagttgagtcctgaaagtgaggaaaatttaggaagtatgtgttcagmaaaccctaagtactgttctatggaagcatcactgagtgcaagggggagggaaaagagattgagctacagacaagcaggagcccaaacatgaagggatttccatgctatattaaggcatgtagacttaatccagtcagtcagaatatatattattcaattgacttaaagtcaatgagaaactactgaagcatcttttacaaggg

SEQ ID NO: 624803 - DNA, 393 bp, Homo sapiens
tctaaaacaggtatttgtctgtattcatagttctccttaggctaaagggggaaagagaaaaagaaaacatgcagccaaaactcagctcaagctggtcacagtggctcatgcctgtaatcgcagcactttgagaggccacggcaggcagatggcttgagctcatgagtttaagaccagcctgggaaacatggtgaaaccctgtctgtactaaaaatacaaaaattagccagcagtgatggcatatgcctgtaatcccagctactcaggaggctgaggcaggagaattgcttgaacccccgagggggaggttgcagtgasttgagatggcgccactgcactctagccggggcaacagaatgagactctgtctcagaaaaagaaaaaacaaaaaca

SEQ ID NO: 624804 - DNA, 564 bp, Homo sapiens
ttgctaaaggaagctcacacatgcaatgaagacagagcctatcttgtcattagatattcatttatgtttttaaattctgtagtatggtggtttacacagttttctttaaaatcttcagagtcatgaggattgccagaaatgtggcatggaggtataaccaatgagtggggctctagacctgcaatcctgtttcaatcagagcagaaaatatttgcatctgttgtatacagtggaattctgtgtaatattttaggagcaaaaggtaagggaggttctgctgccaatgaaattatgttgaagatcactgatatagagaaaaggatactcaacctggaatttaatgttctgggtcaaaatacaagcactgctgtgagtaagctgcatgatgctgaatgtgtcagtytctctgaacttcaattttctcacctagtgaagaggttggatttctttggggactattctaagccatctaaatgtattttttcaattaaaaatgaaaataattttgtgagggaggtggtatgattattcccattttactgaagagcaaactcaggcacacag

SEQ ID NO: 624805 - DNA, 642 bp, Homo sapiens
aaaatactgataaggtcaaagtatgaatgctttataaactgattagctagattttaaatttaaaaatgrtaattttattaatattattttaaccgacaaatcatagttgtatacatttacggggtacaatgtgaagttttgatatactgtatgtatatgctgtagaatgattaagtcaagttaattaacatatccattacctcatttatttgtcatcttttgtggtaaataaatttgaaatatactttataattttgaaatatacaatacaccatttgttgaacagggagtccttttcccaatgcttgtttttgtcagcttcattgaagatcaggtagttgtagatgtgtggcctcatttccatgctctctattctgtttcattggtctatgtctgtttttggaccagtatcatgctgttttggtgctgggataactggctagccaaatgcagaagattgaaactggaccccttccttatatcatacacaaaaatcaactcaagatggattaaacacttaaatgtaaaacccaaaactataaaaaaaaatcctggaagacaatctaggaaatataattctggacataggaactggaagatttcacaatgaagatgccaaaagcaattgcaacaaaagcagaa

SEQ ID NO: 624806 - DNA, 599 bp, Homo sapiens
attattctgctatttggaaatatgcacccctatttcaaactagctctacagctagcaggccctttagggagcgttgtaacatcatttaaatggagccagcatccatgtcttctcaccatacagacgtgggaccaaggatctcatatggtgagaagggctgccttacactgactgattcattccttttgtattggctcaaggkgtatagagaagctgcaggtgtcagacacatcctgaggttccaggaagcagagaacatcagacaggttcttgccctcagaagattcctatgccagtgatggagacaggatgttcacaaatgaatatgccttaggatgcttagagaactggtgaatgtgggaggagagatggagaaaatctgacgccctcagccttctcttcttcctaagaggctgtatttctgctcaaagttgcacaggactcaggcaggcagccacagcctttctctattcagcaagacaagcccctcatctacatcaacaaatttcactgtaaagtccagttctggttctgccatacctttccaaaacgatcacctctttaccagcagaaataaaatcttagccacttttctcttc

SEQ ID NO: 624807 - DNA, 599 bp, Homo sapiens
attattctgctatttggaaatatgcacccctatttcaaactagctctacagctagcaggccctttagggagcgttgtaacatcatttaaatggagccagcatccatgtcttctcaccatacagacgtgggaccaaggatctcatatggtgagaagggctgccttacactgactgattcattccttttgtattggctcaaggtgtatagagaagctgcaggtgtcagacacatcctgaggttccaggaagcagagaacatcagacaggttcttgccctcagaagattcctatgccagtgatggagacaggatgttcacaaatgaatatgccttaggatgcttagagaactggtgaatgtgggagragagatggagaaaatctgacgccctcagccttctcttcttcctaagaggctgtatttctgctcaaagttgcacaggactcaggcaggcagccacagcctttctctattcagcaagacaagcccctcatctacatcaacaaatttcactgtaaagtccagttctggttctgccatacctttccaaaacgatcacctctttaccagcagaaataaaatcttagccacttttctcttc

SEQ ID NO: 624808 - DNA, 616 bp, Homo sapiens
ttatactgggcacctggaaatgccacagacactcaacagtagcccttgagagcagccatgcagagccacagcggtgsaactgcccaaggccttgggagtccaccccttgcatcggtgtggcctggggtcaaagattattttggggctttaagatttaatgactgccctgctgggtttcagacttgcatgaggcctgtagccgctttgttttggccaatttctcccttttggaatgggagcatttacccaatgcctgtacccccactgtatcccagaagtgactaacttgttttttattttacaggcttataggtggaagagacttgccttgtctcagagtttgtactcagacatttgaattaatgctgaaatgaataaagacttgggggactgctgagaaagtatgattgtattttgcaatgtgagaaggacatgagatttgggaaggaccggggtagaataatatggtttggctctgtgtctccacccaaatctcatatcaaattgtaattgctagtattggaggaggggccttgtggaaggtgattgaataatgggggcaaacttcccccttgctgttctcatgagatttggttgtttgaaagtgtgtagcact

SEQ ID NO: 624809 - DNA, 687 bp, Homo sapiens
gacttgtcccaagggagtgcttcagctatgaaaagtcagaaattatatgaaaatttccaatttatatcatcccaaactagattatcatttggggtagtaaaatttgaatactacaaccatgttggtggtatttattaaaaaatccaacactatttaggcactagcttgaattagaggttaggagattcattatgagaagtcactgacaatctcagggattaaagagaaactgagacaaaactaaaacactagatgtaaaccatatgtgcagttaatataaacataatatttgaaatgtaaataaaatatttaaatgtaaatattaaaaatattttaaaagtcaattactagtatattttatagttatagtcagttataggcaatttataactgttgtttccctagagctcagttttatttaaataataaccgattcatccagtataatcatgtccattccattatgttcctaaaaggatttgggttcagttgatctggttttaaaaaaacaaaaamcaaaaaacaatgaactacccccaaactcagatctattgtttaccattgtttaatatatgcaaatgggtaattcacaacaacaatttctacttttctacaaattctgccactgtgcatatggaccctgacagaggaggcagaagagattctgaagcctgaattctatcccag

SEQ ID NO: 624810 - DNA, 457 bp, Homo sapiens
ctttacactccactagcatgagttcacttacacagttcttaacaagggcttgccacgttaaaatttattgattgctacagcgttgcttccaaaacaaaagtgacacaaggcacagtcctgccctcagtctcatgatataatcgggcaagatggcactatttccaataatgcatagcaaggtctgaaacagagtataagcaaagtgctactgaagcacagagagaggaacaattagttttgtccgatgatcaggaagagtttctsagagaagactacaattaagctggaacttgacatataaataaaactttcccaggtatgaaggaggagatatcttctagaagacatagcagcatgaacaaagcgggaaggcttgaaaaggacacgatgtatttgaggaagtagcacagtttgttacagtatagtgtatgggggttaaattataattaggctatca

SEQ ID NO: 624811 - DNA, 597 bp, Homo sapiens
gattgtgaatactgaaccatcactcctgggagaaatacagggctaggttcctgtgagcctttgatcacattttctttgttaattttttattttaatagcttttagggtacaagtggttttttgttacatgggtgaattatatattgatgaattctgagacttttggtgcatgagtcacccaagtagtatacattgtacctaataggtaggcttttttatccctaggtccccatccactctggctcctgagtctgtaaggtctattatatcactctgtatgtctatgtactcatagcttagttcccacctataagtgggaacatacgatctttgggtttctactcctgtgttacttcacttagaatactggcctccagctccatccaagttgctgcaaaagacattatttcggtattttctatggctgagtggtattccgtggkgtatatatgccacgtttctttatccactcatcagctcatgggcacttggattggttccacatcttcacaattgtgaactgtgctgccatcaatgtacatgatcacaatatttgtatcgagcaatcaataacataaccttgtttatgtgtgtttc

SEQ ID NO: 624812 - DNA, 597 bp, Homo sapiens
gattgtgaatactgaaccatcactcctgggagaaatacagggctaggttcctgtgagcctttgatcacattttctttgttaattttttattttaatagcttttagggtacaagtggttttttgttacatgggtgaattatatattgatgaattctgagacttttggtgcatgagtcacccaagtagtatacattgtacctaataggtaggcttttttatccctaggtccccatccactctggctcctgagtctgtaaggtctattatatcactctgtatgtctatgtactcatagcttagttcccacctataagtgggaacatacgatctttgggtttctactcctgtgttacttcacttagaatactggcctccagctccatccaagttgctgcaaaagacattatttcggtattttctatggctgagtggtattccgtggggtatatatgccacgtttctttatccactcatcagctsatgggcacttggattggttccacatcttcacaattgtgaactgtgctgccatcaatgtacatgatcacaatatttgtatcgagcaatcaataacataaccttgtttatgtgtgtttc

SEQ ID NO: 624813 - DNA, 549 bp, Homo sapiens
aagcaagtctgaccttatccttaaaaatagtcaaatctatcgaattaaggttttttgttttccaaaaaatttttgttacagacaaaaccatagtccatttcactggaatatctacaacatagagaaggcggaagctacatcttctttgtcaatgttttccaccttttcccttagtttgctgctgctatcttattaataagcaggaggtgagatggacatttggggtctgcaatgtatccttcttagctgctcctatggcctctggcaagtcagcatgtagtcctacaggggcgggaaatgagaacatgggtggggcttgagggtgtggggcatataaaagcagacattcctgagaattccacactaacttgtggcctttggtactaaggatttctctgaaataacctacagtcaactgccaattagtggcacattamagataaaaatgtccagacagtaaccctaattctcaaacgatgtgtacgtactgtttcaatggtgtagggaaggcctgggaacattagaggctgttacaacaagattggaagc

SEQ ID NO: 624814 - DNA, 598 bp, Homo sapiens
tagctagaaatcaatgaaaagtggtatatcaggaaagcagtacttgaatcaatcttgaaatgcattgctgcatttgtgagggttttgatcaatccaccagcccctgaaccttcatagaaaccagcaccattttcttgggccatttatcagtgtgatgaactggaccaggccatagccaaagagaaatgggccatttcccaaaacgcatacacctaaaaggtaaatatttaacccgatttctgactttcctaccaaagattcaacatatttcactcttcacccttttaaacctccttccttaaaagagaagggtacacagttttgccaagtgcagcatactcaaccccctgtagaagacagtgcaaaactgacttagtattatataagcattcacctctgttatacttgattctttagtacaacatcaagaataatgtccacagaaggaagacagaatgcaaagaaagaataaaataagatagagaaatacacaaggttgattwaaaaaaacacatacttttaaatggaaaagacaatttgctgtgaagttttttggttttaggtctatctgtggcaagttcctttatttattcacctt

SEQ ID NO: 624815 - DNA, 562 bp, Homo sapiens
attttgaatctgcttttcttttcaaaataccttaatgggataaagtgtttttatttgcatatttttgcaatttgcatattttctgcaaaaattcaatatagatgatgattctataacagtctctctaaatatatttatttggattctactttctgaaaaactactatgactttgccatcttmcttttctcaccattcttatagttatgctttatgtttattatttaataagatttatttcttcaccaaataagagtctccatcacaatcctttagcctgaattagttatagagttgcactatgcatctccttgggttaccccttgtaaatgtaaattatcttatcgcctaaatttagaaagccatatgcagaaattgacaggtcatttacattcagttcaaagaagaggataggcagccaattatattgtgttgaagccttgagaaacattttacaaatcaaatgattcaaaaacaggttttaaattcctaactcctgtcacttcttgataagtatgggaagatcattccgctatcatttgaaagatttagaacaaacttaa

SEQ ID NO: 624816 - DNA, 641 bp, Homo sapiens
ttaatatcactgaaaaaattgacctagccaacaaattgtaatgtagcttaaaaataaggcctaagttttttgagaatcctttatgtgatgatagtttagctatcaaatttccccctcaatgttatatataattatgtatgtataatttatggtaaacatagtgagcagacagaattatctagatttttaaatttttgtcatttttctcctgaatagaaaataaaattgggcctattgtttataattttattcattataattctactttcatagaacaaaggtgctaatgggtgcctcagggagcattgctctggaaatgaacatatttaatattctaattaatgatctggaagagagaaaaacctggcctttaataaaataggtagcatgactaatttaaaaggtgctaaacataccatcagggacatttaartcataaaaaataacttagaaaaaacataaataattgacacaaattcatattttgcacaaaaatctcagggcagcctaactaaaaagaaaacaacattcccacactagcaaaagtaacaataaaataagattaggaaagaaattgtattcatgatagaagatgctttgattcaatgctaacatttttactgtttttgagtatttgcatt

SEQ ID NO: 624817 - DNA, 577 bp, Homo sapiens
tataacagctttgttgttcaggctctatattataacacacttctctgctgataagaggtgctaacgatataaaatactcaatactcaggytgctaaataatgaattcacctactaactaatcagaacaggtaagaattaaagctaaatttgtttcttcatgctcatatttcacaaatttgcttgactgtattttctaccattgaatttaaaatatgaaatgtctgatcaacattttactaaaacaggtgaatcttcaatatattcattaatatttaagaaaactgagtaatcaaaggtattttcatacaaacagtattagtttatattgtttaaattaatgaatatgacacaattttttcattttttcttcaaacatacataaagaatattttatttttctctaataactgctcttatctattttcttttttgcaaatgattaaaagatagattacttatgaattgttaaatatattgaagttctttaacagtttctgataaaagcaaatgcaaaaatttacaggtcaactctcaacagatttttttgactcaggacatatgatcttaaccaacaag

SEQ ID NO: 624818 - DNA, 577 bp, Homo sapiens
tataacagctttgttgttcaggctctatattataacacacttctctgctgataagaggtgctaacgatataaaatactcaatactcaggttgctaaataatgaattcacctactaactaatcagaacaggtaagaattaaagctaaatttgtttcttcatgctcatatttcacaaatttgcttgactgtattttctaccattgaatttaaaatatgaaatgtctgatcaacattttactaaaacargtgaatcttcaatatattcattaatatttaagaaaactgagtaatcaaaggtattttcatacaaacagtattagtttatattgtttaaattaatgaatatgacacaattttttcattttttcttcaaacatacataaagaatattttatttttctctaataactgctcttatctattttcttttttgcaaatgattaaaagatagattacttatgaattgttaaatatattgaagttctttaacagtttctgataaaagcaaatgcaaaaatttacaggtcaactctcaacagatttttttgactcaggacatatgatcttaaccaacaag

SEQ ID NO: 624819 - DNA, 609 bp, Homo sapiens
tgtggccttataacagctttgttgttcaggctctatattataacacacttctctgctgataagaggtgctaacgatataaaatactcaatactcaggttgctaaataatgaattcacctactaactaatcagaacaggtaagaattaaagctaaatttgtttcttcatgctcatatttcacaaatttgcttgactgtattttctaccattgaatttaaaatatgaaatgtctgatcaacattttactaaaacaggtgaatcttcaatatattcattaatatttaagaaaactgagtaatcaaaggtattttcatacaaacagtattagtttatattgtttaaattaatgaayatgacacaattttttcattttttcttcaaacatacataaagaatattttatttttctctaataactgctcttatctattttcttttttgcaaatgattaaaagatagattacttatgaattgttaaatatattgaagttctttaacagtttctgataaaagcaaatgcaaaaatttacaggtcaactctcaacagatttttttgactcaggacatatgatcttaaccaacaagaatttcctacatgtcatttggaga

SEQ ID NO: 624820 - DNA, 577 bp, Homo sapiens
tataacagctttgttgttcaggctctatattataacacacttctctgctgataagaggtgctaacgatataaaatactcaatactcaggttgctaaataatgaattcacctactaactaatcagaacaggtaagaattaaagctaaatttgtttcttcatgctcatatttcacaaatttgcttgactgtattttctaccattgaatttaaaatatgaaatgtctgatcaacattttactaaaacaggtgaatcttcaatatattcattaatatttaagaaaactgagtaatcaaaggtattttcatacaaacagtattagtttatattgtttaaattaatgaatatgacacaattttttcattttttcttcaaacatacataaagaatattttatttttctctaataactgctcttatctattttcttttttgcaaatgrttaaaagatagattacttatgaattgttaaatatattgaagttctttaacagtttctgataaaagcaaatgcaaaaatttacaggtcaactctcaacagatttttttgactcaggacatatgatcttaaccaacaag

SEQ ID NO: 624821 - DNA, 592 bp, Homo sapiens
  misc_feature 93, 94, 95, 96, 97, 98, 99, 100, 101, 102, 103, 104, 105,106, 107, 108, 109, 110, 111, 112, 113, 114, 115, 116, 117,118, 119, 120, 121, 122, 123, 124, 125, 126, 127, 128, 129,130, 131, 132, 133, 134, 135, 136, 137, 138, 139, 140: n = A,T,C or G
  misc_feature 141, 142, 143, 144, 145, 146, 147, 148, 149, 150, 151, 152,153, 154, 155, 156, 157, 158, 159, 160, 161, 162, 163, 164,165, 166, 167, 168, 169, 170, 171, 172, 173, 174, 175, 176,177, 178, 179, 180, 181, 182, 183, 184, 185, 186, 187: n = A,T,C or G
  misc_feature 188, 189, 190, 191, 192, 224: n = A,T,C or G
aggaatttcaaaattctccttgtttttaatttttttaaattagtttttaaaaattcttaaattttaagaacttaaaatttacaaatctataannnnnnnnnnnnnnnnnnnnnnnnnnnnnnnnnnnnnnnnnnnnnnnnnnnnnnnnnnnnnnnnnnnnnnnnnnnnnnnnnnnnnnnnnnnnnnnnnnnngcttggagttgcaagaccgcgactcggtctanaaaaacccgccaatcttttcaagatcgcttgtgaaagtgtttgtttgaactctcattagtccagattgtctgaattttctttgttgtccaagtaggcttgatgctccaggtctacctgtgtgaattgtttctttctctttcttatagttcgtatctttgccaaaagacacattaacaactgtggctttattattytgttgcctaaactatcaccctaatttttcaatatggctagttaatttctattcagaatatttcttttttatttcattcctgctaagtgggtaaatattaagcagtaactaaaataaatgttattctgttttggcttgagagtaaaagctaatgagaattcggaaccacctatc

SEQ ID NO: 624822 - DNA, 591 bp, Homo sapiens
gcctaactatgacaagacaatataattgggttagaacaacttaaaattcactttcccaatttatcttagagaaattaaataacagttgcatttaagaggtagaagtggcattctctgccaaaaggccaaattttaaaaggattccccagtataaagttttctgtgtatcctactkttaaaacatttcacattttgtgagtttacatttactgagttcatgaagcactcagctatgcattatgagttctgtcatttagccctgattgctatccaaactccagatgtatacttttagctacctatttgacaataacacttggattcccagtattcacttctaattatacatatctaatttaagagactgacatcctctccaacaacctgtttttactctacttttctccatctcagaatggtgcacaaacaggtgcctcgttattcgggacaataccctaggggtcagacttgtgtatcctttccctgtctcctatattcaatttattgtttcgtcctgtcactataaatctccaaaatgtatcttaaatccaagtaattccctccatatattaccaccaccataacccacat

SEQ ID NO: 624823 - DNA, 640 bp, Homo sapiens
cagaaaaagagaagacacagacacagaaggaaagcaaagtaaagacagaggcagagattggagtgatgcagtcacaagccaaggaaggcctggaggcaaccagagccagaagactgaaggaagaattctcccctatggccttcagtgggggcacggccctgctggccccttcattttagacttctagactccagaactgcaagagtataactttctgtcagtttaagccatctggtttgtggcattttgctgctgcagccctaggaagccgatccagtgctgatgtggcacctgtccttcaagcacacactcactggagtttgcacggggctatgccaagcactgagagccattcctgttcttctccgatgccagcttggactcgggaaagaccaagcatgaaaccttctggaaagckgcagtgctgtggggaatgtatgagctgctacttcaggaaaaagcagctctcctctcctgccttgactgtgtaactcccctacccctaaaccctcttggtatcatggaaagtccgtgcacttgacctcaagtccatgcttcttgaaggagtgactggtccacttgtaagttttctgaaagctttcaggaagtaaaattttctgggcaggagtttattagtagt

SEQ ID NO: 624824 - DNA, 653 bp, Homo sapiens
ccctgctggccccttcattttagacttctagactccagaactgcaagagtataactttctgtcagtttaagccatctggtttgtggcattttgctgctgcagccctaggaagccgatccagtgctgatgtggcacctgtccttcaagcacacactcactggagtttgcacggggctatgccaagcactgagagccattcctgttcttctccgatgccagcttggactcgggaaagaccaagcatgaaaccttctggaaagcggcagtgctgtggggaatgtatgagctgctacttcaggaaaaagcagctctcctctcctgccttgactgtgtaactcccctacccctaaaccctcttggtatcatggaaagtccgtgcacttgacctcaagtccatgcttcttgaaggagtgactggtccacttgtaagttttctgaaagstttcaggaagtaaaattttctgggcaggagtttattagtagttggctgatcttagcagaaggcagagaaaagggatgaagaaagaggtgcctgctctgtcatccttacctgaatcatcttgaccaccagcagagagcagcttgggccagcaggaaagaaagaatgaagatgtcatgggggtggcccaaaggcccaactggagagaagaatt

SEQ ID NO: 624825 - DNA, 506 bp, Homo sapiens
acccaactctctgtgctgtcagaaatgttttctttcatttctttttttttctctttttctaatcttccttaaaattttggtgtgaattaaactcaccgaggaggaaaccagtsaacatcttctgcaatgcagttatgaaaataagagcggagttgttattgctcccatctgggacgccagatgtttgcagactggtgtgggagttgcagcacgtttctgaccccaaactgaagacctggttaaatgtgtttaaaatatcccccttcctgctccaaacatgaccatgcaatcgagtaagaacagaaacaaaaatatgaatacctggcgtctgctaagaaggcatgggaaataatcactggcaaagactgaattagaatctggttttatctattgtttgtaatacaaaaggagggcagaaagttctgccatgcaggcttttgttgttttaataaaaccacaccctgttttactactgctgaaagcaggaagtccaatagaggaagctt

SEQ ID NO: 624826 - DNA, 518 bp, Homo sapiens
ttcttaattaccttacagcaatggtagcatagaaataaataactcaaacttcaggttatttatgacttatgtcaatattttagtccctgrattcctttctgatcttattattacaaggaaataataattaaccagaacatggcatattttaacatccttactattctgtcttatttggctgtttataaataccctcttggtcatgatcataaatgagttggattctgtccaactgctctgccacttctcaacctccaagtctgggttgtctgcaggggaaagcagcaccatgtggccatgtacgttggttcaggttgatatcctttgcgaagcctttcctgaggaccccaaccttcacagagtcccattctctgaataccttgtactctgcatcatacagagcatgcactgttctgttccagagcagtacgttcctctccttctttcatgggtattggtgttatccgcccacatggatagggaataagcctgagggtagcaggctctttcctgctttg

SEQ ID NO: 624827 - DNA, 628 bp, Homo sapiens
gtgccactcataaataattttttcataattatcagcataagaagaattttatgaagatgcttcacatctaggtttttggtaaggcatttttgttgactttcagttaatcaagggattcaaggaaccagtaaggtcaggcttgcctagactgtactttgtaaaatgcaaatccttcaggaatctgttgtcaaagatatacatacatcctgagtgacaggctctgaaatccataccataagtgtgcttttatctgacataaactgtctgttccataagactctgttggaatgaagaaatctctctgctttgctggcctaatcaaaataattagtaggaggagagaaatgggcagattcccagaattggtcatttccacatgattaacatcagaggggctggcagggagaaaatggtcccctcagtattctaattgaggactggtctttagggtggtggttcataactgggggaagtgaggtcaattttgcccctcatgggatatttggcaatgtctggagacattttttattatcttaacttgggaaggggagtgttactgatatcttgagggtaaaacccagggctgtggctaaacttcctytgatgcacaggacagcccctgcaagaa

SEQ ID NO: 624828 - DNA, 585 bp, Homo sapiens
aaataacgtgtgttgtatattttgattacatacacatatggcttatttttaaatcrtggtgggagttacagaacattctctagaggttagaagtgctaaagcagaaagcaaaactatataaaatggtattctaagtagatgtttgattctactgattttactcatggcattatcagaaaacctggagatcattcatctagttaatcatttgttccacacgtatttattgattaatgacaacataaagggcatagtgcaaaacccaataacaataaacagctagaattcagcttccttgggaactgttgtccaacttcagcacacaaaagagtggcctttcttctcacaaggaaagagctcaatgaattatgaatcttttcctttttcttgaaaaaccacagcctatattttggaggaaaattcaacataattggtatatacccatctttttaggtgaattaggccttaactgacagataacccactttgttctaaaattcaacaaactctaggaaaatcttattccacacaatcttttgaatatgtcatttgccatttatatttgatggccttaagaaaaaaaac

SEQ ID NO: 624829 - DNA, 638 bp, Homo sapiens
aagaaatacagtttttttttttttgaaagagagtcttgctctgttgcccagatgtgagtgcagaggcatggatcttggctcactgcagcctcaacctcctggggtcaagtgatagtcccacctcagcctcccaagtagctgggtctggctaatttttgcacttttttttttttttttttaaagaaacagggtctcactgtgttgcccaggctggtctcgaactgctgagctcaagcattacacctgcttcagcttcccaaagtgttgggattacaggcatgagccaccatgcctggccaagaagtacactttaaatgtatatcatatatacattaagaataaaataatggatacagatatgccatgcaaatacaatttttttaaaacctagagtggctatctagatataaaacaaaatagacttcagaataaggaatattaccaagrataaagatgactattacatagtaacaaaaaggtcaattcacaaagatgtcataaaacccctatatatatgggcacctaaaaacatagcttcaaataccagaagcaaacctgatataaatgagagaagaaatagacatacccataataacagtttgataattcaacattcctgtctcagtaatcaattgaac

SEQ ID NO: 624830 - DNA, 574 bp, Homo sapiens
ttcctcatactactagtagtgtcagagttaagattctagttggagcagttagatgccagagtccttcctcataaaaagccaacagaatatttggtgaggatatttcagagagccagcaactgatgaggctggaccaaagccacaaaaagtaagatctgattctttggacctggaaggaggtctttaaaagataagagaaatctgttatcacaaaatccctgatgtgtttgtctcagagagaatggtggtttcttttgtttgtttgtttgttttttaactaggttaatcacaatatgggacagaaaactgcaaaacaaatttccgtccttccatttyattccttcatattgatagtaaatcatgagcagtacaaccggcttctctattttaagcatcttttgaaggaactggttttggctcaatatatgtgctaaaatagactgtgccatgaagatcaatagtgagtatgtacttgagtattatacttttagcaaatgataacaattctgctattttaagtcattttattaaacttaatggttctctctactaatggactgtatagctaatgcta

SEQ ID NO: 624831 - DNA, 513 bp, Homo sapiens
acaaaccttcataccaaacccggtaaagacatttcaaaaaaggacaatttcagtccagtcttactcaggtttgagtagaatctagcaatatacaaacaggataactttaacatcaggacgaaatgggtctgtcccaggagcacaatgttcattttaatttgaaaatcaatgtaattaacacattaacagattaaagagaaaatacaatcatctcgatagagtcacaaaaaccaccattcatgatttaaaaaactcaggaaactgagaataaaagggaacttcctcagtctgaccaagggcagccacaaaatgccaacagccaagatcacactcagtggtgggctgaacacctgctcccgcgcctggaatgagggttgggtgtctgcgcccaccacgtctatccacagtgcagcggtggttcccaccagcacagtaaggcaagaagaagaaacagaaagaacgtacatatgcatattgtacaggaagagaaaayactgttttaatctcagaaaa

SEQ ID NO: 624832 - DNA, 551 bp, Homo sapiens
tctacaaaaaagttgaaccrgttcaatggaaaatctgttttgtttcctttttgatcttttgtatttttttaattaaaaataaagttgggaaataatttccccctgagatttttagggctgtttcctcaaatatatacaagtgtacttacagtataagataaacagatgagttttgtagcaaatatcctatttccaaaaaagtggagctcaaagaatacattcaacaatgcatattatttagactaggtatgtagctactttgaaagatagtactgttttaatgcatgaattcaagcattgttagtttattattagattttatattatttatttatttatttttgagacggtgtcttgctctgttgcccaggctagagggcagtggcacaacctcaggtcactgcaacctccgcctcctgagttcaggcgattctcctgcctcagcctcctgagtagctgggagtacaggcacttgctaccatgcccaactaattttgtgtttttagtagagacagggtttcaccatcttggccaagctggtttcaaactcc

SEQ ID NO: 624833 - DNA, 551 bp, Homo sapiens
tctacaaaaaagttgaaccagttcaatggaaaatctgttttgtttcctttttgatcttttgtatttttttaattaaaaataaagttgggaaataatttccccctgagatttttagggctgtttcctcaaatatatacaagtgtacttacagtataagataaacagatgagttttgtagcaaatatcctatttccaaaaaagtggagctcaaagaatacattcaacaatgcatattatttagactaggtatgtagctactttgaaagatagtactgttttaatgcatgaattcaagcattgttagtttattattagattttatattatttatttatttatttttgagacggtgtcttgctctgttgcccaggctagagggcagtggcacaacctcaggtcactgcaacctccgcctcctgagttcaggcgattctcctgcctcagcctcctgagtagctgggagtacaggcrcttgctaccatgcccaactaattttgtgtttttagtagagacagggtttcaccatcttggccaagctggtttcaaactcc

SEQ ID NO: 624834 - DNA, 597 bp, Homo sapiens
aagtttagaactgcatttggagaacagtgacagctatccagtactcccatgggctaactgacttagaaaagacattaaaaggaaaataaatgaaattgagaaatttcagtaattatttctagaaattcctctacatcatagaccaccagttggcaagtgcttctgttagagagatagaatggaggaagacgttgtgatacagaaacctgtagctgtccctttgaaattcactctttccttactaatagaaataggagagtattggctgaccttccttatagttgatgatggccatttgacaccgttctttccagtgagatataagtgaaaattatgctgccataggggcaggaaaaataataattttggacaggagctgtggctcatgtctgtattcccaacactttgagaggccaaggtgggaggatcatttgaacaaggagtttgaaataagcctgggcaacatggtgagacaccgtttataccaaaawtttaaaaaagtagccagatgtggtgggacattcctgtactcccagctactggggaggctcaggagggaggatcatttgagcccaggagatagaggctgcagtgagc

SEQ ID NO: 624835 - DNA, 597 bp, Homo sapiens
aagtttagaactgcatttggagaacagtgacagctatccagtactcccatgggctaactgacttagaaaagacattaaaaggaaaataaatgaaattgagaaatttcagtaattatttctagaaattcctctacatcatagaccaccagttggcaagtgcttctgttagagagatagaatggaggaagacgttgtgatacagaaacctgtagctgtccctttgaaattcactctttccttactaatagaaataggagagtattggctgaccttccttatagttgatgatggccatttgacaccgttctttccagtgagatataagtgaaaattatgctgccataggggcaggaaaaataataattttggacaggagctgtggctcatgtctgtattcccaacactttgagaggccaaggtgggaggatcatttgaacaaggagtttgaaataagcctgggcaacatggtgagacaccgtttataccaaaaatttaaaaaagtagccagatgtggtgggacattcctgtactcccagctastggggaggctcaggagggaggatcatttgagcccaggagatagaggctgcagtgagc

SEQ ID NO: 624836 - DNA, 564 bp, Homo sapiens
aatggctctgactaggtttctccctcagactctgtccacactctaggatgctggaggacagcgtcctggtttctgtcagkcttctctgttaagtctagtctctctctatctcttctccttctctcgttcaggtctctaggagacctcggttttaaacgggtataaaaaattgtaataaactctgtgagtgagtgagtacatgtggagttcaagggcttgtgcttgaatttctagtttgtagctccatggcgaaagctatggagtttcagagggccctcacctgcggttccgtggcgacctcataaagcttagggcagcatcgggcatagctggatccgagccgggggtttataccggcctgccaatgccaggaggagcctaagtccccgcaaggggagcagccaggcaggcatctgactgatcccatcacgggacccactccccttgtctgtctataaaaattgccatacttgtttatatacccccgtgtctattgtcctgtttggtgtctgtctaaatttcgtaggtcaggtcatcgatactgcccaagacgactgggcaagg

SEQ ID NO: 624837 - DNA, 564 bp, Homo sapiens
aatggctctgactaggtttctccctcagactctgtccacactctaggatgctggaggacagcgtcctggtttctgtcagtcttctctgttaagtctagtctctctctrtctcttctccttctctcgttcaggtctctaggagacctcggttttaaacgggtataaaaaattgtaataaactctgtgagtgagtgagtacatgtggagttcaagggcttgtgcttgaatttctagtttgtagctccatggcgaaagctatggagtttcagagggccctcacctgcggttccgtggcgacctcataaagcttagggcagcatcgggcatagctggatccgagccgggggtttataccggcctgccaatgccaggaggagcctaagtccccgcaaggggagcagccaggcaggcatctgactgatcccatcacgggacccactccccttgtctgtctataaaaattgccatacttgtttatatacccccgtgtctattgtcctgtttggtgtctgtctaaatttcgtaggtcaggtcatcgatactgcccaagacgactgggcaagg

SEQ ID NO: 624838 - DNA, 450 bp, Homo sapiens
  misc_feature 228, 229: n = A,T,C or G
gaaggaggcatacgagcctatctacagcacatcccctgcacttaccctcctcccagatacttgtgaaacattagtgctgggtgcagcttgagatggtgtcatccagggtggaggtrggcacaggggtaaggtggaggaagccagagcaagtttgctcattgtggaaaaagatttgagttttgcatgtcaacctgaagtcaagccctcaccaaaaaaagtgaagggtgnnaaaaaaaagggcttctttctgagtccaagaaaagaccaagtttgctggaattttaacctttaacttcttacaatgtaatttccttcattgtcctgagccttcaaaaaaaaaaaaaaaaaaaggttttattgaaaatggaattggccgggcaccgtggctcacgtgtgtaatcccagcactttgggagaccaaggcaggcagatcacttgagttcagaagtt

SEQ ID NO: 624839 - DNA, 558 bp, Homo sapiens
gaaaaactccttccacttaagggaaggagagggaaggagagaaaagagtagagactttgtcttgcaagtgggtaccagcccagctacagtaaaacaaagcatcaggcaggatcccaaagcccctgatttcaggttgttactccaggataacacttctagttgtaccctgggccaaaaggaaatcttctgccctggtggagcagacacaaggcccccccatcccgcaagcttcaacgtctctgactaaaaatggcttcaggccttgaataaacatcagtgtcaggcagaaacaatcatgggctttgggtgagccctggcattgtgctggtctgagagactataggctttgagtacaacccagcatagtgccagctgcggtgcctrtgacagtgcctacatcatccctcctccaactgcaggaaacatagcatacacacacacacacacacacacacacacacacacacacacacagagagagagactcctttcacttgagagaaagagaagaaagtaaaggactttgcctgagaacacagataattctcccttaccttt

SEQ ID NO: 624840 - DNA, 558 bp, Homo sapiens
gaaaaactccttccacttaagggaaggagagggaaggagagaaaagagtagagactttgtcttgcaagtgggtaccagcccagctacagtaaaacaaagcatcaggcaggatcccaaagcccctgatttcaggttgttactccaggataacacttctagttgtaccctgggccaaaaggaaatcttctgccctggtggagcagacacaaggcccccccatcccgcaagcttcaacgtctctgactaaaaatggcttcaggccttgaataaacatcagtgtcaggcagaaacaatcatgggctttgggtgagccctggcattgtgctggtctgagagactataggctttgagtacaacccagcatagtgccagctgcggtgcctgtgacagtgcctacatcatccctcctccaactgcaggaaacatarcatacacacacacacacacacacacacacacacacacacacacacagagagagagactcctttcacttgagagaaagagaagaaagtaaaggactttgcctgagaacacagataattctcccttaccttt

SEQ ID NO: 624841 - DNA, 588 bp, Homo sapiens
tgaggtaatttaaaaaaacaaaaattctggagctgtaaaattcaawtgatgaactgaaaaatgcatcagattgtctcaaaagcagaattgatcaagcagaagaaataattagcttgaagacaggctgaaaatacagaaaggagaaaaacgaaaaggtacactttcaagatctagaaagtaaccacataagggcaaatctaagaattattgaccttaaagaggaagtaaaggaataaattaagacagaaaatttattcaaaaaataataacagataacttgtcaaacctagaggaaagtaagaataaccaggtgaaaaggtcaacaaacaccaagaagactcaacccaaatcagatactacaaggaatgtaataatctaactctcaaagggcaagggcaaagaaagtaccctaaaagcagcaagagaaaataagtaaataacgtataatgaagctatgatacatctggcagtaaatttcttggcaaaagtttacaggccaggagggagtggaatgacacattaaaagtggtaaagaaaaaaataactttgaacctaaaatactgtactccaaaaagctatccttcaaac

SEQ ID NO: 624842 - DNA, 588 bp, Homo sapiens
tgaggtaatttaaaaaaacaaaaattctggagctgtaaaattcaaatgatgaactgaaaaatgcatcagattgtctcaaaagcagaattgatcaagcagaagaaataattagcttgaagacaggctgaaaatacagaaaggagaaaaacgaaaaggtacactttcaagatctagaaagtaaccacataagggcaaatctaagaattattgaccttaaagaggaagtaaaggaataaattaagacagaaaatttattcaaaaaataataacagataacttgtcaaacctagaggaaagtaagaataaccaggtgaaaaggtcaacaaacaccaagaagwctcaacccaaatcagatactacaaggaatgtaataatctaactctcaaagggcaagggcaaagaaagtaccctaaaagcagcaagagaaaataagtaaataacgtataatgaagctatgatacatctggcagtaaatttcttggcaaaagtttacaggccaggagggagtggaatgacacattaaaagtggtaaagaaaaaaataactttgaacctaaaatactgtactccaaaaagctatccttcaaac

SEQ ID NO: 624843 - DNA, 588 bp, Homo sapiens
tgaggtaatttaaaaaaacaaaaattctggagctgtaaaattcaaatgatgaactgaaaaatgcatcagattgtctcaaaagcagaattgatcaagcagaagaaataattagcttgaagacaggctgaaaatacagaaaggagaaaaacgaaaaggtacactttcaagatctagaaagtaaccacataagggcaaatctaagaattattgaccttaaagaggaagtaaaggaataaattaagacagaaaatttattcaaaaaataataacagataacttgtcaaacctagaggaaagtaagaataaccaggtgaaaaggtcaacaaacaccaagaagactcaacccaaatcagatactacaaggaatgtaataatctaactctcaaagggcaagggcaaagaaagtaccctaaaagcagcaagagaaaataagtaaataacrtataatgaagctatgatacatctggcagtaaatttcttggcaaaagtttacaggccaggagggagtggaatgacacattaaaagtggtaaagaaaaaaataactttgaacctaaaatactgtactccaaaaagctatccttcaaac

SEQ ID NO: 624844 - DNA, 388 bp, Homo sapiens
ggatcaaacagaaacacctctgttctagttataacttgatgatgttctaagcagcaagcaaaakatttatttcattattgttgtccccaagaattgaataaatttactttctaaagtcaagccccttgcttagggggggaaaattaaggaatgtgaggtttttcatttctgttgttgctttgtttggtcaaattttgttttatttgggcaacaaaagttggtcttttgtgtgtgtgttttttcttttgcaaatttgttagttacaataataataaccatctgtgccacagataggctcttatttttacttcttcattttcctcagcagcagtctttgtgataaatctttgttgcaaaggattttaaaaagcaataattttttttcctt

SEQ ID NO: 624845 - DNA, 388 bp, Homo sapiens
ggatcaaacagaaacacctctgttctagttataacttgatgatgttctaagcagcaagcaaaatatttatttcattattgttgtccccaagaattgaataaatttactttctaaagtcaagccccttgcttagggggggaaaattaaggaatgtgaggtttttcatttctgttgttgctttgtttggtcaaattttgttttatttgggcaacaaaagttggtcttttgtgtgtgtgttttttcttttgcaaatttgttagttacaataataataaccatctgtgccacagataggctcttatttttacttmttcattttcctcagcagcagtctttgtgataaatctttgttgcaaaggattttaaaaagcaataattttttttcctt

SEQ ID NO: 624846 - DNA, 604 bp, Homo sapiens
tagaaactgggaattggaagatgcagtagacctgaataaatatacttaataaagtaacacttaccttccactacacccctccctcatgtatctcctagtgatttccctaaaaatgtactgcttctagacagatctcttttttccctgtcatttcttctcaaatttattgttctttgtctaaaaaggataaaagcatcatcctttggccatctttggacttcactcgtgaagatccccatatacatgtaaaactgataaaatttgtatgttttcctcttgttaatctgcctggtgtcaatttggtttcttgattcagccaaacagcccacataagagataaagagaggtgatctctgggtctcctacagcagtatttgttcttgtttgcttttgaactgcatagtgggaggagaatttccctgcaattttcattttgcaaacatttattctttgatttaacccaccaccactacgaccaccatcactcactgattcaccaaaagctggcagcaagttaaataatgattgtgtttgtttttattarcctttcttaaatgcatagtgaaatgtatactgaaacaggcccaattgtctcatagaacga

SEQ ID NO: 624847 - DNA, 604 bp, Homo sapiens
tagaaactgggaattggaagatgcagtagacctgaataaatatacttaataaagtaacacttaccttccactacacccctccctcatgtatctcctagtgatttccctaaaaatgtactgcttctagacagatctcttttttccctgtcatttcttctcaaatttattgttctttgtctaaaaaggataaaagcatcatcctttggccatctttggacttcactcgtgaagatccccatatacatgtaaaactgataaaatttgtatgttttcctcttgttaatctgcctggtgtcaatttggtttcttgattcagccaaacagcccacataagagataaagagaggtgatctctgggtctcctacagcagtatttgttcttgtttgcttttgaactgcatagtgggaggagaatttccctgcaattttcattttgcaaacatttattctttgatttaacccaccaccactacgaccaccatcactcactgattcaccaaaagctggcagcaagttaaataatgattgtgtttgtttttattaacctttcttaaatgyatagtgaaatgtatactgaaacaggcccaattgtctcatagaacga

SEQ ID NO: 624848 - DNA, 535 bp, Homo sapiens
cattgactggctttatgctgaaacaactttatatttagatttaacataatccctgtatctaaactatatgcaatataatttgaaagttgctaacatctcctacataaaaatatttaccaaagttatcttgatatagggctaagcatttctctaatattaactcctttcgctttaaaattcttcaacttttacaaatattccttcagagaggtcatatatttagtcaccccaaccatgctcaccttakttgaaattcatcagaatggttcacaggtatctagcagtcatgtgacaacatgacatgggatgataagttttaaaataaggagttaagtattctggctactaggccctccccttcctgaatccgtggctttagagtcctgggatataataaaagatagcattaacaaaggccatttttcatcctacacattgaatcaaacaatgtatcagagacagaaaaaaactgtcttaaatagttgaaagctccaaactttacaacttctcccatctactatggacatagagctgc

SEQ ID NO: 624849 - DNA, 614 bp, Homo sapiens
aatgtaccctggatgcaaagcaaaacattcaatccaaaaccacagggttttcatcaacatgataccaagtaaccagtgcaattgtctccacaccagcctgctagtcccccatggaattktctagctgctatgacttaagtaaatgcagccttgtgagcttggacattcaggtgcaaacaagctctgtaaatcataaaacatgttgccagccctctgtagaataaatggcatactaacaaataccaagagaaattatgatgttcccttcccctcgtgtcacttgtcgaatgagccacattactccttctaacctccattcttgtctgcctatctttctatgtaaatcttctctctcctgcaagatatgagtttcccagagtcagcagggaagatagttttgttctagatcactgaccttttcatcagcctcgagccagtgatagcagagtcagtatattgctgatccatttaaagcctgaacttagacaatttttaaaactcagggaagcaaaccagcccctggctctctttacttttaatcctttccatcttttaaattttaaagacttttatgaaatttatactcttctatttgtataatttaactagcatag

SEQ ID NO: 624850 - DNA, 334 bp, Homo sapiens
agcccagatcgcgccactgcactccagcccgggccacagagcgagactccgtctcaaaaaaaaaaaaaaaaaaaaaggaaaaagaaagaaarcagcagcattttgtaacagtgatgaatttggatgaaatttgcaagaccttggactgttttcccaaatgtccgggcgtctgccaggcagccctcaactgcagacacaagccactaaagggagtcgtggctccagggagctcgaatgctttccctggaagatcccctccctaagcccccatctcctggacgtgaaaccctgtttagtctacattcaggaacagcagacgtgcttttctgagaga

SEQ ID NO: 624851 - DNA, 334 bp, Homo sapiens
agcccagatcgcgccactgcactccagcccgggccacagagcgagactccgtctcaaaaaaaaaaaaaaaaaaaaaggaaaaagaaagaaaacagcagcattttgtaacastgatgaatttggatgaaatttgcaagaccttggactgttttcccaaatgtccgggcgtctgccaggcagccctcaactgcagacacaagccactaaagggagtcgtggctccagggagctcgaatgctttccctggaagatcccctccctaagcccccatctcctggacgtgaaaccctgtttagtctacattcaggaacagcagacgtgcttttctgagaga

SEQ ID NO: 624852 - DNA, 549 bp, Homo sapiens
gtataagggtagtggttgtctgggacaaatatttcacacatgggtagcttataggctacagctatttttaatctgcctaaacatctgtaatatactcaagtgtatgccatctgttttttttgttgttgttgttctatagtctcataatatttattagaataaattgtattgaataattgcacagttaaccttgttatatttttggatgtacttgcctttctgaagccaacagccaatgtaatggattaataggaggcattagccaaggttaaagagttattactatatgtagcacactggccatttaaaagcctggcaaagggcctctagaggaaacatgaattgtgtgatgttatcttcctagtctacattccactatggatatcaatstagaaaatcccataattttcttcaggttcaatttttttttttcagcaaatcactacaatttcatcagtaaaatttgttgagttttttgggagcaaaagcctaccaaaagtgaaagaatcatataatcgtagagttgtaaggaaccttaagatcccttgg

SEQ ID NO: 624853 - DNA, 590 bp, Homo sapiens
gcattcccttaaaacatgactccgctttgccaatacatttccaaagggagttcagggccacatatttgcctgtcatttattttttactcaactaaatttgttcaaaaatttagtaaaatcttcctcctagtaattctgtgtataaaatttagttctgctctgtggagctatccagattaaagctgtcttcatcattttacatctgtggaaacattgcttcctggcatctcttcatctattacttccacttattacaaatatggcctggttttcagaaacattcacactsctttatcctcttctaagcacagtttcacttgccaatacctcaattaacagatgacaactaaatagaaaactcccagaatggctgtgtgaattctatctccagtgaaataaccataactggggaaaattattaaaacaacacttacaactatttaaagtctctgttaattgtcctaagggcacacagaaaatgaagatacatttattcaagaaaatctactaactcttagaataccaagcagcctgtgtcatttaatacgggatcgatgccctctccatctctctagttcaacacaaaagaa

SEQ ID NO: 624854 - DNA, 600 bp, Homo sapiens
aaaataaattgaatgtgactactgtagaagatacgttacaatgtaaatggaacacatgtaactgcataaaattttataagcaaattttgaaaaataaggaactaataaggagacagcaatcaacaaatgaagaaagagatatgtaatttagagacataatttatttcacattaataatttttagtagaaatgtggctcatagaatattttaattttatcacatttagcatatgcacagacaattatgaataatttaattgggcatcctgtactattgctaaatttggcaaccctctttgtaagggtgtttttaaaggtaaaatagtagttgaaatgctccaagttttaagaaaaattacccattaaataaaaagcctccttttaatgtcaagaaaaggttcatctctgcygcatagggccaaatgggttattcccccttgaggcttcttcagggaataccaaacatcacctggggaaggctagggttgaaaatccaattaaatattgagaatgggaaagtttttgctaaaatgacttagcagggctcttactgaacctgaagagcacagatggacctaggagaagcttcaggagcctaag

SEQ ID NO: 624855 - DNA, 523 bp, Homo sapiens
acgcccctggcagagttcctcatgagtgttaaacaaggcaacacaagctaagccctgtacctgaggcayggtaggcactcagtgaattttcattcttattttgatggctgttacattagcatctaaaggctctaaaaaactctgtagtagataaacctgtttggctttgtccagccagctttcctcaaataatctgacacctgaggaattgtttttctcactcagcatcttgcactttgggaaatgcgatctgtttccttttatctaatgcctgaatcagcaaacggagagaagtaggaatggagagacagaatggtcatgcttcagattggtaaggaagttgacttgttctcttatttcaagttctcccacgagtgtcaacctgaagaattgccccgattctgtgctacagatcaccacaaacagttgacacaacttgtccaaaagcaatgccaaactttgtaattatctgtgtctgctataaagcagtagaagaaaaaaatactctattccttattttcca

SEQ ID NO: 624856 - DNA, 354 bp, Homo sapiens
cccttgtgtgcaactctcttgagtataccaacactcccctttcttgagtgtgtacttttcatttcgcaagaaatctctatactttcactattttctgaatcactcatgaattcctgcttgagatgatgtcaaaagcctggacacccattggaatcaaggtcccactggtgtttgggaactttccagagcccactggtgtcagtacaacaaactgttttaaaactctcagtatttcatcattacttaaccaagtaaaattcaaactccttatttgccatacgagtttttttgtgactatttgcctccattgtacctcccagaatcatctttcarcactttcctctagcattctcc

SEQ ID NO: 624857 - DNA, 578 bp, Homo sapiens
aaagaagtaccatacaaaggtgctataagaaaaaataaaaaaaaaagataaaaagatggaagatacatactaaaaaaaaagttgcctttaaatattaaactgtgaacacacaattttctatgaattaaacaagtttgataaagcagtggtctccattaagctccttgcacaaaataaaaatctatgaacacagggaagaaatggcaaccagaaaaagtaaaacatgagctggcagagctaaggaatgaaatagaagaataaaactgtcatagaaatgaaagtataattgcaaacagtaaaaaagaaaacagatactgttaagaagataataacaaatataaggaacagaatgacaaaaatgtgaaaaatataatggaaataaggagtttaaattattgatttcttgaagagaaaactgaaataatctaacatgatatatctttaaagatattagtcaagaaattctcccygggagaaaaaaaagtcatcaatctaagtacataaactgtacaatatgtcccagagtaaactgaatcaaaagagtcagcacggagacagaacctggtaaagttaagctt

SEQ ID NO: 624858 - DNA, 491 bp, Homo sapiens
agtttttgatatgcctagctagcagtcatgttcttaattcagtcttattagatttcatatgagagttcaagtgtgcatgaatgaggcaaagctgtctagcacaaattaaatttaaaagtttcattgatatttgtgcccattagcaaacagttttggacatggtagatactatttgactagcagttatatatagtatcaaggaagctttgtttctgtaggtgaaggctgagacatttaaagattgccattagggtatcagtctcatcaattaactcaaatttgatgacagttatgtattttgaatattctatatgataagctttagcctagaatttctttctacatcatttttttttcattttgacacttaggttctcatttgtacactgaaaaattttccaagccttttgcakacaatgaaaattaacttacttcttactggaaaattaatgggaattttagaaagcactttagtgtgcaaatagaagaaa

SEQ ID NO: 624859 - DNA, 607 bp, Homo sapiens
ccacacatgtaagatgaggtcagattaagttcctgattcatttagtcacagatatagaaatgtttaggtttgaggatcagatgcagcatgtttagtgtagagagttgtattagcccattttcaygctgttgataaagacacacctgagactgggcaatttacaaaagaaagaggtttaatttaacttacagttccatgtggctgaggaagcctcacaaacatggtggaaggcaaggaggagcaaaccccatcttacatgtatggcagcaaagagagaatgaggaagatgcaaaagcagaaaccccagataaaaccatcagatctcgtgagacttattcactgccacgagaatagtatgggagaaactgcccccattattcaattatctcccactgggtccctcccacagaatgtgggaattatgggagtacaattcaagatgagatttgggtggggacacagagccaaaccgtatcattctgcccctggcccctttcaaatctcatgtcctcatatttcaaaattaatcatgccttcccaacagtcccccaaagtcttatttcagcattaactcaaaaaggccacagtccaaagtctcatttaagac

SEQ ID NO: 624860 - DNA, 562 bp, Homo sapiens
agattggcaatatctttgtaattatttctatcataactcttacagtgataacacacaatgacttcaatagaagatatacgtatttaagtttccttgggaatgtcaaacacaatatgctagagagaggtgcaaggcatattgccgcacattcataatgccaacaaattggaaacaacctaatttaaaatttcttttttcaaaattaatgctttctttgctctatcccctctattttctacacaatgtatgggaggaataggcaaaaaaaattctcaatttgcagtggagatggaaggaaacgagagaatcaacattttttgaccaacctctttgggtcaagatttcacataaattgcctcrttgattctcacagcaatgttctgattcctatgtgtgtataattttttccaccatatgtatgaggaaatgaagactcagttcaagtaatgaaccaaaggttgaattgctaacaagaagccataaagggatttgaattaactcaatgtgacatcaactctggatgactatgacactatgtggtggggcgtgagaaggaaaagaa

SEQ ID NO: 624861 - DNA, 638 bp, Homo sapiens
tttaaaatttcttttttcaaaattaatgctttctttgctctatcccctctattttctacacaatgtatgggaggaataggcaaaaaaaattctcaatttgcagtggagatggaaggaaacgagagaatcaacattttttgaccaacctctttgggtcaagatttcacataaattgcctcgttgattctcacagcaatgttctgattcctatgtgtgtataattttttccaccatatgtatgaggaaatgaagactcagttcaagtaatgaaccaaaggttgaattgctaacaagaagccataaagggatttgaattaactcaatgtgacatcaactctggatgactatgacactatgtggtggggcgtgagaaggaaaagaagcatgtggcatccrtagaacagctttgagcgcattaatgtgtcattcattgaaagaatatttagctatcttcaaatctatccattttagtgtttgatgaaagctgagcaagtataattcaattagttgtgatgtggatatgttcaaagtgatggtaaagactgaatttgaacttaatgagacattcatgatttcatagatgactaagttaaaataactgaagggtcattaaacacacaggattgataactaaagca

SEQ ID NO: 624862 - DNA, 616 bp, Homo sapiens
agaaggaataagaggttgggaatagattggggataagcaatagaggagacattatcagtcagtgctaatcatgtgtgatctggtaccagaccactagagtttgaaacttgaatttataatagatatttataaaaatatttttattagttctgtggacctggacaaacttcagttttgtcacttacttaaagagggataatttagggttgttgtgaagattaggtgttacagtactttaaagtgcttagtccagtggcatgtggtaaacatgagatacacaacagctattattattgttgttgttagaaagctcctaaacagaaatcatagatgaaggtattggtgtaaaaaagtaaataagcatcaccttttcttactgaggaagatagtactgatgatgttatagtttacatgtacgaggtaaaatgaaggagaaaatatcagatggactcaagttttgtttgtttgtttktttttttttcaaagaagggagttagattatcaattgggaacaaatgcttaatcatactagatttggtttgaaacaactttgttccgttgacaaagagaattatgcaataatgataagtaaaataatgggtggaaaacattgaag

SEQ ID NO: 624863 - DNA, 629 bp, Homo sapiens
tatgcattcacccatgctccctaggccccaacccgggagcactagctcttcctaagtataatattctgtgtttccagaaagtactcaatcttgatttatgccacagttccctcacctgtccttcataccaggaacagcttttgtctttgatccatctttctttgtatctattcaagatctacctccakccctggcttatctgtcaacacagtccctttatcccctgttgcataaattcatcatgatcttaggtcttctgatatttctaacttcaatcctcaatgctgttatggattaaatcttttaacccacttgctattatattgatgggattttgaaaagaggaatgataaatatgacaggaaggtattttatattggaaatagaacaggtgatggttagggtaagaaaaggagcagaggtgaggagattagatgaagagactactgtaatagtacaagccaaaagattttgcttctgttttatttgaaatatgatttttcttttaatagctaggaggaaaattggattcaagtatgtaaaacagtaaaaaagttaatttaattattaaacactgtgtaacagtcttatttcagagtttttattaatagatttatcatgttttgtca

SEQ ID NO: 624864 - DNA, 531 bp, Homo sapiens
agtaaaacaattgctttctgcactcgtttccagctgttggaatagtctcctggcctttcttgtgttcatatcaaggactgaatcagcttgtgagagtcaacgcctgtttgcctaataaccctcaacagagtgctcacttcctctatttagaaagggtggtccctgttgtgctcctggtatgtcctctagaaaagagmaatggttgagaaaactgattggcaatactttacagagatagctgtcagatgtgttgttaaaacgtcaaaagggccacgagtaattccttcttaagaagaaaccatcttcatttttgtcttatattcagaagaaaactttccagcaagtaggaatccttgatttttttttcttttcaaggtaaggattgtgcaaatctgaataactccagagtaattgagcagtgatatgtggtagtcaataaaaaatagcacagccttggacaggccagtggcgcaggcacaggcctgtaatcccagcactttgggaggccagtgatggcagatcacttgagct

SEQ ID NO: 624865 - DNA, 531 bp, Homo sapiens
agtaaaacaattgctttctgcactcgtttccagctgttggaatagtctcctggcctttcttgtgttcatatcaaggactgaatcagcttgtgagagtcaacgcctgtttgcctaataaccctcaacagagtgctcacttcctctatttagaaagggtggtccctgttgtgctcctggtatgtcctctagaaaagagaaatggttgagaaaactgattggcaatactttacagagatagctgtcagatgtgttgttaaaacgtcaaaagggccacgagtaattccttcttaagaagaaaccatcttcatttttgtcttayattcagaagaaaactttccagcaagtaggaatccttgatttttttttcttttcaaggtaaggattgtgcaaatctgaataactccagagtaattgagcagtgatatgtggtagtcaataaaaaatagcacagccttggacaggccagtggcgcaggcacaggcctgtaatcccagcactttgggaggccagtgatggcagatcacttgagct

SEQ ID NO: 624866 - DNA, 531 bp, Homo sapiens
agtaaaacaattgctttctgcactcgtttccagctgttggaatagtctcctggcctttcttgtgttcatatcaaggactgaatcagcttgtgagagtcaacgcctgtttgcctaataaccctcaacagagtgctcacttcctctatttagaaagggtggtccctgttgtgctcctggtatgtcctctagaaaagagaaatggttgagaaaactgattggcaatactttacagagatagctgtcagatgtgttgttaaaacgtcaaaagggccacgagtaattccttcttaagaagaaaccatcttcatttttgtcttatattcagaagaaamctttccagcaagtaggaatccttgatttttttttcttttcaaggtaaggattgtgcaaatctgaataactccagagtaattgagcagtgatatgtggtagtcaataaaaaatagcacagccttggacaggccagtggcgcaggcacaggcctgtaatcccagcactttgggaggccagtgatggcagatcacttgagct

SEQ ID NO: 624867 - DNA, 575 bp, Homo sapiens
tgtatgacccactttatggctaatgggtcaaaaagaacccagttcatgataggcagttcaggtcacatggtgacttgacccacagtcaaacattcagtttccaccaaagcccagtaacatgccaagagctgtctctcagaagtagagtrgttatctgcagaagatggtagggactttccaaaatcctagaggcctctgctgtgattcacttatgggggccagccaaaggctccaaacagcatccctatctgtaacagatatcttaagcctcattggatctgctggatcatatggcccaagtggcagagcagcttgcacagcagcctggacctgttgcagagccttctcctgttctggacaccactcaaaactggcagcctttcaggtcacttaataaatgggctggagtaacacacccaagtgaggaatgtgttgcctccgaaatccaaataggcccactaggtgttgtgcctctttcttgtttgtaggagaggccaaatgcagcaacttatccttcactttagaagtaatatctcgacaggccccacaccactggacccctagacattttactg

SEQ ID NO: 624868 - DNA, 489 bp, Homo sapiens
ctctaccattatgacctcatgtaacattatcactttcatgactctatttccaatacaatcacatgaagggttaagacttcaacatacaaattttaggaaaacacagtttggaccatggcattacccaagtgactcttcagtgatgtttctcttctcccactttgaacccatctaaggttccatcattctagtctaaccactctggtcaattatttaatattaaataatttccagttcaaaaaccttctgtcttctgtttttttacctcctcactcatagaatttgatacataagtaccatagcactttgatatataattagttatgtgttttatctcccctgataaacaataagcacctcaagggtggcgttccaatgatccattgctgtgttacaaatcacagaaaaacttagtgacctaaaatgagaatcactgtttgattaytttgcatagttttgtgagtcaggaattaggggagggcttggctg

SEQ ID NO: 624869 - DNA, 632 bp, Homo sapiens
  misc_feature 119: n = A,T,C or G
acatatttgcatgtcaagtgtactaaatccagaatcaacctaggatgccattttacttgacattggctaattgacaatggttattggcttcatactggatctcttttatggtctacctntttattttaaaatagacactttagaagtaagggttctccagatgaacaaaagcaacagatgcgcgygtgcacacacacacacacacacacacagagagagagagaaaaagatttttaaaaaattcttagtctttagacatcctgggaacccaaagatgagttgatgctgcagctcaaatcccaaagcagtcttctgtcagaattttctcttgttcaggataggtcagtcatttgcttaagggctttaactgatgagatgaggcccatctacataatggaggttagtccactttactcaaagtctatgatttaaatgttaatctcatctgaaaaatgctttcacagcaacatccaaatgtgtttgaccatatatcttggtatcatgacctagccaagttgacacataaacttaatcatcacagacactaatgacagggttggtcagtgctttcactaggaacatttaaaaactttaaacccacatcagacagagactttattcatgaagttatc

SEQ ID NO: 624870 - DNA, 632 bp, Homo sapiens
  misc_feature 119: n = A,T,C or G
acatatttgcatgtcaagtgtactaaatccagaatcaacctaggatgccattttacttgacattggctaattgacaatggttattggcttcatactggatctcttttatggtctacctntttattttaaaatagacactttagaagtaagggttctccagatgaacaaaagcaacagatgcgcgtgtgcacacacacacacacacacacasagagagagagagaaaaagatttttaaaaaattcttagtctttagacatcctgggaacccaaagatgagttgatgctgcagctcaaatcccaaagcagtcttctgtcagaattttctcttgttcaggataggtcagtcatttgcttaagggctttaactgatgagatgaggcccatctacataatggaggttagtccactttactcaaagtctatgatttaaatgttaatctcatctgaaaaatgctttcacagcaacatccaaatgtgtttgaccatatatcttggtatcatgacctagccaagttgacacataaacttaatcatcacagacactaatgacagggttggtcagtgctttcactaggaacatttaaaaactttaaacccacatcagacagagactttattcatgaagttatc

SEQ ID NO: 624871 - DNA, 456 bp, Homo sapiens
  misc_feature 146: n = A,T,C or G
gtagtaggactcatgaagaatacttaaacatatttgcatgtcaagtgtactaaatccagaatcaacctaggatgccattttacttgacattggctaattgacaatggttattggcttcatactggatctcttttatggtctacctntttattttaaaatagacactttagaagtaagggttctccagatgaacaaaagcaacagatgcgcgtgtgcacacacacacacacacacacacasagagagagagaaaaagatttttaaaaaattcttagtctttagacatcctgggaacccaaagatgagttgatgctgcagctcaaatcccaaagcagtcttctgtcagaattttctcttgttcaggataggtcagtcatttgcttaagggctttaactgatgagatgaggcccatctacataatggaggttagtccactttactcaaagtctatgatt

SEQ ID NO: 624872 - DNA, 576 bp, Homo sapiens
aacatgtgtattttaggaaaatcagaaattataaataagcaaaataaagagctaaaatttgcctgtaatttcatccttcatatattatcactttttatttttaatcaaaatcagtcaatataaactatactatttyattggacatttcactcagtacaatattatacagatgcttttcaacttacaatgaagctacatcctaataaatgcatcataagttgaaaatgcgtttaacatacctaacctactgaatatcatagcttaacctagcctagcttaaatgtgctcagaatacttaagttatcctatggctgggcaaaatctaacacaaaactatcttataataaagtgtgatttcttgaatactatactgaaagtgaaaaacagaatggttgtatgggtactcaaagcatagagctgtcctagttttggaatcagttattgttatgatgatatcttagtttcttcaggctgccaaagcaaaatacttgaggttgggtaatttataatcattagaaaattatttcttacagttctggaggcagggaacaccaagatcaaggcaagagcagattc

SEQ ID NO: 624873 - DNA, 403 bp, Homo sapiens
ttgtatttccagtggcctagtaagtaaacatcacctggatatgccacagaatccctcaaactcactatgtctcacaaaagatacatgcatttgtctgggtcggtgtgatgggcatgctagcctgtgtcccacagcagatactcagagggcccagtctcagccctggcttcttctgctgcaatcttaactgtgcagggaattactgggtgacatgtacacctctgagctgagacatgtctctccagcttctatctcatagcagatccctagggtactagtatcagctctagtctcttctacagcagttggggagctgtcttttcagtgcagggacctgctaggagatgtgtgcacrtctgagccagcatgataggcacatgaggctccatctcacagcagatct

SEQ ID NO: 624874 - DNA, 563 bp, Homo sapiens
aaacaaagatttgagttattgtaattaaagagagaactgagaaagacaagggctagaaagtttattccaggaaaaataacagaaatatttccaaacctggaaaaatgtacagatgactagatacaagaaggtcaaaggtcaacaattagattccactcaaataagaataccccaatacatattataatcaaactctcaaaagtcaaagacaaagagaagatcctgaaaacagtgagagaaaataagcaaataatatattagggagctccaatatgcctgacaacagatactttacaggacaagaatgagtaggacaatatactcaaaatgttgggaaaaaaaagtaaaaaataaaaacatgtaaaccaagaataccatatccaggaaagctatccttaagaaatgaaggagaataagactttcccagacaaacaaatgttgagggaacttatcactttcagacctacatayaagaagtgctaaagggagttttaaaatggaaggaaaaggatgctaacatgattattgcactaatatttagtcatggtatgttaaccacttaa

SEQ ID NO: 624875 - DNA, 579 bp, Homo sapiens
ctttgtttatggagatagtgttggcagttatggtagtaaagaaacggctctaggccaagaaatggatagaaaagtggtagtgaaacaacatgaactcgtgcttttctctccagacaaggtaaataagtaatgaaaaaagcatcaaaaaactcacacacaaaatcacattatatacatctgcttctcccacctttagaggttgtaccgtagggtcatcaggaattctcatgagtgtactgtaacttcaatctcttctgtgactctgcacttgctggcaatcttacctttcactctcaatgtttgcaaacacagcaggacttagtatttacaatgttacatgcccayggtcatatttacttatccttgttaaagctccaaattgaagaatttaggttgttttactggaggtagggacaataaagtataaaaagaagcctctttcttcttcctgtctatccctaggttttagtttccctggctgatggttttttggggcattctttgctttgtaaagctactagataatattaccttggactataaaataatggcttgttgattctagagggagtaaaagct

SEQ ID NO: 624876 - DNA, 579 bp, Homo sapiens
ctttgtttatggagatagtgttggcagttatggtagtaaagaaacggctctaggccaagaaatggatagaaaagtggtagtgaaacaacatgaactcgtgcttttctctccagacaaggtaaataagtaatgaaaaaagcatcaaaaaactcacacacaaaatcacattatatacatctgcttctcccacctttagaggttgtaccgtagggtcatcaggaattctcatgagtgtactgtaacttcaatctcttctgtgactctgcacttgctggcaatcttacctttcactctcaatgtttgcaaacacagcaggacttagtatttacaatgttacatgcccatggtcatatttacttatccttgttaaagctccaaattgaagaatttaggttgttttactggaggtagggacaataaagtataaaaagaagccyctttcttcttcctgtctatccctaggttttagtttccctggctgatggttttttggggcattctttgctttgtaaagctactagataatattaccttggactataaaataatggcttgttgattctagagggagtaaaagct

SEQ ID NO: 624877 - DNA, 579 bp, Homo sapiens
ctttgtttatggagatagtgttggcagttatggtagtaaagaaacggctctaggccaagaaatggatagaaaagtggtagtgaaacaacatgaactcgtgcttttctctccagacaaggtaaataagtaatgaaaaaagcatcaaaaaactcacacacaaaatcacattatatacatctgcttctcccacctttagaggttgtaccgtagggtcatcaggaattctcatgagtgtactgtaacttcaatctcttctgtgactctgcacttgctggcaatcttacctttcactctcaatgtttgcaaacacagcaggacttagtatttacaatgttacatgcccatggtcatatttacttatccttgttaaagctccaaattgaagaatttaggttgttttactggaggtagggacaataaagtataaaaagaagcctctttcttcttcctgtctatccctaggttttagtttccctggctgatggttttttggggcattctttgctttgtaaagctactagataatattaycttggactataaaataatggcttgttgattctagagggagtaaaagct

SEQ ID NO: 624878 - DNA, 253 bp, Homo sapiens
agcttgctaaagtcagtgctattctaactactctaccttgccctgcaaagtatgaatgattagatagcgtttcacaggcacagtcctctggaagaggatttggttttttcscctcacaataacacttaataaaccaccatccaacatcactatgtgatcagtcatcaggggactcccatccccaagtccccatcctgacttactgtaagcgccgagggagaagctgtaaagtactacctaattcagatctctc

SEQ ID NO: 624879 - DNA, 635 bp, Homo sapiens
cagggccagagtggtggtggaagaactggagaggccgcaggttcagtcattcaaattggtatttgctgaggtccttccatgcaccaggcatacaaatgtgagtgaacagacagacatggtccctggtctcattcatagattttataattttgtggagtgagagggargtaagggacagacattaattaaagcaaacaaatacatacataattacaaattgtgaaaagtgctctgaaggaaaacaacaggataccataagagaaaataacaaggtcagctgggtgtacctaagacagactggaaagtcaggaaagacttaagacctgcaggaggagcaactaagtaatgaaagccactgggatgggtttacctagagaggatggagcggatgggtgtacctagagaggaaatggagaagagaaaacctgagagtttctcatgggagtcatgcaacatgagggcaggtagagaacagggatcagacaaaagaaagaacagaagccaccagacaggaggggagtgtggcgatcgtgcccaggagagtttagtgcttcaaggagaaaggagtcaccactgaaagatccagaaagagaggagaacagagtgtccatgagctttggcaacaagaggttatc

SEQ ID NO: 624880 - DNA, 631 bp, Homo sapiens
tacatgcttattctaaacatctggcaagtgtggagaagcagaaaaaacatacgtaattgaccttctaaactacaacctttgtagattttgctacttattttctgtagtttcttgtttatatggatattatcctgcatattatcctgatccacgccactcccccaatttaatgttatgctatcagcagtcccccttgccaaaaactctcttaagtatacttcttataatttcaggacgggcatggtggctcagacctgtaacaccagcactctgggaggycaaggatagaggatcacttgagcccaggagtttgatatcagtcttggcaatatagtgagacctcatttctacaaaaaaattttgaaaattagccaagcatgataatgcgtgcctatagtcccagctatttggagggctgagatgggaggattgcttgagcctgggaacgggaggttgcaacaagttgagatcgtgcctctgtactctagcctggtccacacagtgaaaccctgtctcaaaaaaaaaaaaaaaaacaccaaaagcaaaaaacttcaatgacctgtactattcactgtttacctgggtactgctctcaaaatttgaattaatgctttgtgcttcaagtctcatg

SEQ ID NO: 624881 - DNA, 631 bp, Homo sapiens
tacatgcttattctaaacatctggcaagtgtggagaagcagaaaaaacatacgtaattgaccttctaaactacaacctttgtagattttgctacttattttctgtagtttcttgtttatatggatattatcctgcatattatcctgatccacgccactcccccaatttaatgttatgctatcagcagtcccccttgccaaaaactctcttaagtatacttcttataatttcaggacgggcatggtggctcagacctgtaacaccagcactctgggaggtcaaggatagaggatcacttgagcccaggagtttgatatcagtcttggcaatatagtgagacctcatttctacaaaaaaattttgaaaattagccaagcatgrtaatgcgtgcctatagtcccagctatttggagggctgagatgggaggattgcttgagcctgggaacgggaggttgcaacaagttgagatcgtgcctctgtactctagcctggtccacacagtgaaaccctgtctcaaaaaaaaaaaaaaaaacaccaaaagcaaaaaacttcaatgacctgtactattcactgtttacctgggtactgctctcaaaatttgaattaatgctttgtgcttcaagtctcatg

SEQ ID NO: 624882 - DNA, 494 bp, Homo sapiens
cccaaagctagtatttattattattattattwttttttgagatggagtcttgctctgttgcccaggccacagtacagtggtgtgatctccgctcactgcaacctcccgggttcaagaaattctcatgcctcagccttccaagtaactgggattacaggcgcctgccaccacacccagctaatttttgtatttttagtagagatgaggttttgccatgttggccagactggtcttgaacttctggcctcaagtgttatctgcctgcctcagcctcccaaagtgctgggattacaggtgtgagccaccatgcccgccatatttattattttataaaattttaaattcttatatgaatatatatatacatgcacacaatgtatatatcaataccttatatataaaatacaaaaacattatatataaaatacataatactgctcgcatatttttaaactttatataaaaggtataccatccatattgttatatacttg

SEQ ID NO: 624883 - DNA, 549 bp, Homo sapiens
tttcttttattttatccttttttgtttgtttgtttttgcattattcctccaataagactggatactcttgaggaccagttttcatacccccattcagccatcagtattatgagccagctaggcagtcatcaataaatgagtctcgtgtgatacgcaagagatccaagtgtagggggcttctcactctcagttccactaccctgcccaggcctccagcttctcccacctcagtgccccaagaaagccctgaccagcctgtatgtgtccattccagggatatgtgagggcagactaggacagtctgaaaatggtctcacataagatcagaatccttwacttcccatttccaagccactggagagcaaactcacagcagctgcgctgccaaatcttgcttcattcccctacctgcctgcctggtgtccatgacagttaggaagcctgcctcctactagactcaggagagaccttagaagccaccatcaatcagtatgtcagcacatgagagggcatctacaaccactcctgccctacaggataaaaaacaag

SEQ ID NO: 624884 - DNA, 633 bp, Homo sapiens
aaaaaaatttatatgtatatatgaaacaccagcacccatttccactcagttaagaatgcacttgtaattcatctgacctccacttttatgcatagaaaaaaagtttattttaagaaatataaaatatatctaaagcttcaccaaagtacaatacgaactttaactttttatatttggattatttcctgcaaaaataaggtggtgatttaatttcttatttcaaagtccacatgcaaggatgtgcccaacaactacaaataatcttttytaaaaactgcacccattccagctgggcccatagctttcttcttgccactatttattaagcaaaaaacctactggcctgataaaacaggtttctcctttcacatattaaaatataattataaaacctgatcctctttggacttccttggatttgtaccaaaaatgctgtatctttctagagtaaactgagaggtttttttttttttaaccattattctaccttaagaaatgtctcatctgaagaagcaaagagatacaccctaaaattccagcaaccacaggcttcaaaagcctttggctcagatgcaggataaatctttggaaagcccagggtacaatgtgacctgggtgtacaaacttagacct

SEQ ID NO: 624885 - DNA, 425 bp, Homo sapiens
taaaatataattataaaacctgatcctctttggacttccttggatttgtaccaaaaatgctgtatctttctagagtaaactgagaggtttttttttttttaaccattattctaccttaagaaatgtctcatctgaagaagcaaagagatacaccctaaaattccagcaaccacaggcttcaaaagcctttggctcagatgcaggataaatctttggaaagcccagggtacaatgtgacctgggtgkacaaacttagaccttgctcactaggcaggtcaaagaatttttctctcaggacatcccgaaaacatcaaacagattcatgagatgaaatttccttgtccctgcagcctcaacatgattttatgatattcctgacacagtttatatatacaattcagatgcaaaatcttggtggcaacaag

SEQ ID NO: 624886 - DNA, 567 bp, Homo sapiens
cttcctacagcctcagcagaagcagttgctggtgctatgcttcttgtgcagcctgcagaaacatgagccaaataaatctcttttctttgtaaattacccagcctcaggtgtttctttatagcaacacaaatggactaagacagcatatatccctccagacatttttctatgcgtatttaaaggtagctaagacttactgaattcttagtatggattacaaacctctatgctgtgcattttaacatcacagtgatcctccgaggtaggtattttgttatccccattttatgtacaaggaaactgaggtttaatgaggtcaaataagatcccataggtggtaaagtgactgtcagtcaacttaggctgagttatgttctggtaacaagcattttctttttttcttttttttgagacagtgcagtggcatgatctcagctcactgcaacctctgcccccaccagttcaagcgattctcctgcctcagcctccygagtagctgggattacaggcatatgccaccacacccagctaatttttgtattttttaaggagagacagggtttcacc

SEQ ID NO: 624887 - DNA, 619 bp, Homo sapiens
cattttaggagactgagatgcaaggatcatttgaagccaggagttcaaaaccagcctgggcaatgtagggagaccctttctctacaaaaatctttttaaaaattagctgggtgtggtggtgcatttctgtgatcctagctacttgagaggctgaggtaggaggattgcttgggcctgggaggtcaaggytgcaaagagctatgattgaaccactgcacttcagccttcagcctaagtgacagagcgagaccttgtctcaaaaggaaaaatatatatatacatatatgtaaatgtatgtgtatatatatatgggtatatacgtatatacaaaaaatttaaataaaatttaattttaattttattattttaataaaataagttcatttttattacgtatattttcttttatttgccccacatttactctcaatataacaagggtacaagacattaaatgaggaaagatgactctttttcaacaaatgatattgagataactggataggcatatgcaaaaaatgaagttgcaccccctcttcacttcatttataaaattaactaaaaatggatcacagacctaaatgtaagacctacaactacacacttctttttttttttt

SEQ ID NO: 624888 - DNA, 448 bp, Homo sapiens
caataaacaaaatgctaaggacagaaagtttaggttgacctgtaggatgataatagggaatttttaggatagagtgaagggttaggagtccccctaraataatgaccctttacttaaatatgtctctgtcaacaggaacattgactcactggaagattcaactaccttaaatctttatggagcaacaagagatttttaaatgaaaaaaaaaaaaaaggaggaaagagaataaaaaaggaaaaaagaaagaactagtaggacaggggactgatttttattatttttattttttatttatatggacatagagtgtgaaatgaaaggggactgttttaaaaacacacatccacattctttcattcgcttttctccttcatcctatgcatggggcagtatgatatggtatttagccttccttgaagatgagcttcaagtcttatattttaaa

SEQ ID NO: 624889 - DNA, 448 bp, Homo sapiens
caataaacaaaatgctaaggacagaaagtttaggttgacctgtaggatgataatagggaatttttaggatagagtgaagggttaggagtccccctagaataatgaccctttacttaaatatgtctctgtcaacaggaacattgactcactggaagattmaactaccttaaatctttatggagcaacaagagatttttaaatgaaaaaaaaaaaaaaggaggaaagagaataaaaaaggaaaaaagaaagaactagtaggacaggggactgatttttattatttttattttttatttatatggacatagagtgtgaaatgaaaggggactgttttaaaaacacacatccacattctttcattcgcttttctccttcatcctatgcatggggcagtatgatatggtatttagccttccttgaagatgagcttcaagtcttatattttaaa

SEQ ID NO: 624890 - DNA, 536 bp, Homo sapiens
ttaactttttttaagaaaaaagttgcatgaatggaaaaaaaaatctgtatacagtatctgtaaaaactrtcttatctgtttcaattccttgctcatatcccatataatctagaactaaatatggtgtgtggccatatttaaacacctgagagtcaagcagttgagactttgatttgaagcacctcatccttctttcaatgcgaacactatcatatggcattcttactgaggattttgtctaaccatatgttgccatgaattaactctgccgcctttcttaaggatcaaaaccagtttgatttgggaatcttcccctttccaaatgaaatagagatgcagtacttaactttccttggtgtttgtagatattgccttgtgtattccacttaaaactgtaatctagtttgtaaaagagatggtgacgcatgtaaataaagcatcagtgacactctatcttactccaagaagtctctttgttctccctccccctttcttgaaccctaggaataaaatggcagtttctctcaaggtcttcc

SEQ ID NO: 624891 - DNA, 536 bp, Homo sapiens
ttaactttttttaagaaaaaagttgcatgaatggaaaaaaaaatctgtatacagtatctgtaaaaactgtcttatctgtttcaattccttgctcatatcccatataatctagaactaaatatggtgtgtggccatatttaaacacctgagagtcaagcagttgagactttgatttgaagcacctcatccttctttcaatgcgaacactatcatatggcattcttactgaggattttgtctaaccatatgttgccatgaattaactctgccgcctttcttaaggatcaaaaccagtttgatttgggaatcttcccctttccaaatgaaatagagatgcagtacttaactttccttggtgtttgtagatattgccttgtgtattccacttaaaacygtaatctagtttgtaaaagagatggtgacgcatgtaaataaagcatcagtgacactctatcttactccaagaagtctctttgttctccctccccctttcttgaaccctaggaataaaatggcagtttctctcaaggtcttcc

SEQ ID NO: 624892 - DNA, 601 bp, Homo sapiens
tacctacaagtaataaaaacacagattcttattttcccctcttattacacaaaatgtacatcatacaygctgtatatacacaggcatcttgctttttaaatgattttccccaagatggaggagattttaatacatagaaagcttcctcattctttttatagttacatagtattccattgtattaatttgtcataattgatttaaccagtagtcccctgttgatagatactggacattggattgtttgcagatgtttgctattaccggccacactacaactagtaaccttatacatttgttatttcatacatgtgcaagaatctttgtagaattaatgcccaaacatggaattgctgggtcaaagggtatatacatttttaaaactttatttcagtcgtttttggggaacaggtggtttttggttacatgaagttctttagtggtgatttctgagattttggtgcatctgtcacaaagggtatatacatttgatcaaggttgaccaaattgtcctccagtgtgccagttcaccactcacaccaatcatgtaggaaaatctcatatttttgatattttaaaaatgcagttgtagcacagtggc

SEQ ID NO: 624893 - DNA, 493 bp, Homo sapiens
gttaccattgcctctctcacaagatttttcatcatcctaagctgaaactccatacccattaaacaataacttcctgccatttttaaagccccgatggatcatgggtaatgaggaaattttacaaaagcctctgctctgatgtgtaggatcctcttatgctcaatgtaatatctttaggtatacgctgaagacaagaatcacctggcagtgtggtgataggagaggtgcctgctaaaaatgcagatctcttktccccttcctgaatcaaaatctcttgggttccaccctagcaaggatagttttaccaagtccccaccatgattctgatgctgatgtaaatgtgagaatcactagcctcagcctcatgggaagacaaagtgaggaagactattagccagggtggatgggttaactcacagtatggggagacagctgcctggatttgaatcttcacttcacctgtggttcactgtatgacttaatctgtcaaaac

SEQ ID NO: 624894 - DNA, 623 bp, Homo sapiens
ttttacttaatttaaatttaaataactgcgtgtggctagtgcccacagtattagacagcacagatctaaacttcaaataaatagatgcattcagtgtctggcttctttcatgcaatgtggtgtttttgagagtcatccatgtttgttatataatggaaatcattccttttattgctgagtagaatttagttttatgaatatactacaagttatttatttgtctgctggtagacttttgggttgttttcagttgggggctattgtgaataaagttgctataaacatttttgtataagtctgcttatggatatatgcttttacttttcttctacgaatagaatttttggattgtaaaatgtatttaagtatatgcttaactttataagaaactgccaaaatgttttccaaagtggctgtaccactttatattctgaccagcaatgttgcagttgctctatgtttttaccaactttggtatggctggtcattttaattttagctagtctagtgggtgtgaagtgctatctcattgtgattttaattgctatttccctkatgactaatgatgttgaatatcttttcgtgtacttatagaccatctgtatttcttcttcaataaagtg

SEQ ID NO: 624895 - DNA, 580 bp, Homo sapiens
gggctctcaatctgtgagggggccctatattatcaatagttacaaaataatgtgccatgacatgatgtggtggtggaaggtaggaagagctacaggaaacagatgagagcaattaatgcggacaggtgggtgtcagggagggctgcagaacaaagatggcatttaagctgaaygatggagtcaacagagttagaaaatagtgggaagggaaatgcacagaggcattaagtgctaggctgattcaataaattgcacaaaatccaatgtgactgcataactcttctttgggggttggccagagatgaagctggaaaaaatagactaggattgacttttggtgggtctagtgccatctaaaatcttgtgttgcccacttttctctcttttcatatcatcaaagttgtagatctgtgtgtgtttgtgcatgcctgcacacacacataactccagaatcttgacattattatacaatgaaggagagggagtcctgtgagcatcacaacatcacaattctatccacttccactcttggcttaaagttacattctactaacatcaatgacccatatttctgggagag

SEQ ID NO: 624896 - DNA, 580 bp, Homo sapiens
gggctctcaatctgtgagggggccctatattatcaatagttacaaaataatgtgccatgacatgatgtggtggtggaaggtaggaagagctacaggaaacagatgagagcaattaatgcggacaggtgggtgtcagggagggctgcagaacaaagatggcatttaagctgaatgatggagtcaacagagttagaaaatagtgggaagggaaatgcacagaggcattaagtgctaggctgattcaataaattgcacaaaatccaatgtgactgcataactcttctttgggggttggccagagatgaagctggaaaaaatagactaggattgacttttggtgggtctagtgccatctaaaatcttgtgttgcccacttttctctcttttcatatcatcaaagttgtagatctgtgtgtgtttgtgcatgcctgcacacacacataactccagaatcttgacattattatacaatgaaggagagggagtcctrtgagcatcacaacatcacaattctatccacttccactcttggcttaaagttacattctactaacatcaatgacccatatttctgggagag

SEQ ID NO: 624897 - DNA, 560 bp, Homo sapiens
tgagtacaccagtgcctttagggaatgttttaagaggtttgtttccttgtgagttatggaattttcatcataatagttcagagaaaggaggtcaggaaggagtggagcagcagatattcgggagaagaaaaagtaaagactgactcatattatgtagggtttgcatgtgggtgtatacacacttaaatccatgtgcaccgtgtgcacgtgataagggaaaagggaggaaaggattgcttaggcaaaatgttttctttaatctctttgctgagtgggccttggggaagagaatgcataagtaaataactgaccaatgttggttggttgttatatacagatactcaaagggactctataaaactctaaagaagcaaatagggatattaaattctattaccagttttggcagttactttagtrtctcttttccgtgatggtgaaattactgagtaacttttactgtctttgattggatgaaatgttcttctgaggacttcagatgaattcatggttatgcattgtgttttcctactttgtcttttgttacctggttcccttta

SEQ ID NO: 624898 - DNA, 561 bp, Homo sapiens
  misc_feature 250: n = A,T,C or G
ataagcaaaattcttaaattttatagtcaaacttattaaagttttatgaacactgctttttgtttattaaatgttttctctctacctaaagtctaagatattcacttatattttctgctagaagctttaaagttttrtttttgacatcgaattccctaacccatttaaatctttgattttgtatatggtgtgacgtaggcaggaatccattgtcattttctgtgtcaatattcattttccagctctaatngcacatgtcacctctatcatataccaaaattccacacatgtgtgggcttctatgagccctttaatttagttcattggttaattcatccatcactgtgccagtaacattaggaagtcctaacaacattttttaagaagtgtctttactattcctggccctttagttaccctgtctgtctgtctgtctgtctgtctctctctctctctcataattattgttgaagtataacacatctacagaaaaatatgcaaatcatataaggtgtacaggtcaatgtatttcacaaagtaaacacagatttagccagcacc

SEQ ID NO: 624899 - DNA, 561 bp, Homo sapiens
  misc_feature 250: n = A,T,C or G
ataagcaaaattcttaaattttatagtcaaacttattaaagttttatgaacactgctttttgtttattaaatgttttctctctacctaaagtctaagatattcacttatattttctgctagaagctttaaagttttatttttgacatcgaattccctaacccatttaaatctttgattttgtatatggtgtgacgtaggcaggaatccattgtcattttctgtgtcaatattcattttccagctctaatngcacatgtcacctctatcatataccaaaattccacacatgtgtgggcttctatgagccctttaatttagttcattggttaattcatccatcactgtgccagtaacattaggaagtcctaacaacattttttaagaagtgtctttactattcctggccctttagttaccctgtctgtctgtctgtctgtctstctctctctctctctcataattattgttgaagtataacacatctacagaaaaatatgcaaatcatataaggtgtacaggtcaatgtatttcacaaagtaaacacagatttagccagcacc

SEQ ID NO: 624900 - DNA, 572 bp, Homo sapiens
cattcagcctgggcaatatggcgaaaccttgtctctacaaaaaatacaaaataattatcagggcacggtgatgtgtgcctgtagtcccagctacttgggaggctgaggtgggaggatcacctaagcctgggaggtctaggctgcagtgagttgtgatcacgctgccrcgttccagcctgggtgacagagtgaggccctgtctcaaataaataaataaatatcattagtaacagattataacatattaaataaaatgggaattcatgagcccatactgatacgaataaatgaataagtaagtaggtggatagatgatagataggaaaacttttctttacattggaaagtcaattgaggctgggcacggtggctcatgcctgtaatcccagcactctgggaggccgaggcaggtggatcacctgaggtcactttgagaccgcctggccaacatggtgaaaccccgtctctactaaaaatacaaaaattagccaggcgtggtggcacaagactgcagtcccagctactctggaggctgaggcacaagaattgcttgaccccagtgacagaggttg

SEQ ID NO: 624901 - DNA, 538 bp, Homo sapiens
gggcactctgctgtgttcctgccttagttcattattccaaggaaactgactctagtcagggtctgactaccagcaaaatctaggatccatgttgtttaagttgattttgccccaatcattcctttttaaactcttagtgaaccattcttatgaacagggcactccgttttggactaggagaaggggagtgtaaaggaaagacagtgggctgtcctaaaagaatttatgattsagtgggagtagacatgggggcatttggagatgggaggagcttggacaaggaaggtcacccagcatctgccttctccatacggcttaggagggtttggggaaagtggaaaagatttggaacagctgctgtaaggaatgtgctaggttaaataatgtgtctggagaagtgaggggtatttcaagatctttctttccacacctcagaattaatggagcttattttctcagattttccaaaataaagttcacctctggctagagctcaagcttgaagaatttcagtacagaatttaatcttgtctcttga

SEQ ID NO: 624902 - DNA, 617 bp, Homo sapiens
gagcttgagctcgttatccttagcaaactaacacaggaagagaaaaccaaataccacacgttctcacttataagtgggarctaaatgttgagaacacatggacacatagaggaggaacagtggacactggagccttccagagggtagagggtaggagaagggaaaggatcaggaaaaataactaatgggtactaggcttaacacctgtgtgatgaaataatctgtacaacaaactcccaagacacaggtttacctatataacaaatctgcacatgtacccctgaacttaaaagttttttgtttttgtttttgttttgttttgttttgttttgtgatggagtctcgctctgtcacccaggctggagtgcagtggcaccatctcagctcactgcaacctctgccccccgggttcaagcgattctcctgcctcattctcccgagtagctgggattacaagtgcccaccatgatgtccggctaatttttttgtatttttggtagagacggggtttcaccatgttggccaagctggtcttgaactcatgacctcaggtgatctgcccacctcagcctcccaaagggctgggattacaggtgtgagccaccacacccggcccc

SEQ ID NO: 624903 - DNA, 639 bp, Homo sapiens
actcagtgaggtatcagtacttctattttgcctctgtggggcggggrtgatagttcctgataacacagagtcagcctcctaaatcactacagcaagctctgtccaagcagggattgccgttcctggtgcatgtttcttgtcacttcagtcacagaggatgatgcttgttttactttatccattgattggatcatatagtaagagatctatattctggagccatagcccaaaaatgtaactgattaaatgaagaaaattatgtattcatagtatattcaagggtgttattgtttatgcagcagctatgttcaatggaaagaaaagtatacattggttgggcagggtggctcatgcctgtaatcccagcactttgggaggctgaggcaggcagatcgcttgagctcacgagttcgagaccagtctgggcaacatagggagaaacccccccccccccacatctctacaaaaacatttaaaaattagccaggtgtggtggcgtgtgcctgtagtcccagctactggggaggctgaggtgggaggatcacttgaaccgaggaggttgaggctgcagtgagctgtgattgtgccactgccttccagcctagccaactgagtgagaccctgtgtcaaaaaaaaaaa

SEQ ID NO: 624904 - DNA, 546 bp, Homo sapiens
taaaacctgctttctgggtacaaatgtaccatattttgttttgtttgtttttgagatggagttttgmtcctttgcctaggctggagtgcagtggcatgatctcagctcactacaacctccacctccctggttcaagctattcttctgccttagcctcctgagtaactgggattacaggtgcgtgctaccacacccggctaatttttgcatttttaataaagacagcgtttcactacattggccaggctggtctcgaactcctgacctcaagtgatctgcctgcctcagcctccaaaagtgctgggattacaagcttaagccatcatgcctggtgaatgtatgatgttttatttaatcattccactattgatagaatatgccttgtttccaacttttacatctgtccatcctacaggaatttgcttctaggagactgctgaagtgccccagaggctggaatactttggtaaatagtcagccaggaggtaacaagccatctggggcaacaagaggcacataaggagaaaggaggtagaaaatgctcct

SEQ ID NO: 624905 - DNA, 493 bp, Homo sapiens
gttaccattgcctctctcacaagatttttcatcatcctaagctgaaactccatacccattaaacaataacttcctgccatttttaaagccccgatggatcatgggtaatgaggaaattttacaaaagcctctgctctgatgtgtaggatcctcttatgctcaatgtaatatctttaggtawacgctgaagacaagaatcacctggcagtgtggtgataggagaggtgcctgctaaaaatgcagatctcttttccccttcctgaatcaaaatctcttgggttccaccctagcaaggatagttttaccaagtccccaccatgattctgatgctgatgtaaatgtgagaatcactagcctcagcctcatgggaagacaaagtgaggaagactattagccagggtggatgggttaactcacagtatggggagacagctgcctggatttgaatcttcacttcacctgtggttcactgtatgacttaatctgtcaaaac

SEQ ID NO: 624906 - DNA, 620 bp, Homo sapiens
  misc_feature 7, 8, 9, 10, 11, 12, 13, 14, 15, 16, 17, 18, 19, 20, 21,22, 23, 24, 25, 26, 27, 28, 29, 30, 31, 32, 33, 34, 35,36, 37, 38, 39, 40, 41, 42, 43, 44, 45, 46, 47, 48, 49,50, 51, 52, 53, 54, 55, 56, 57, 58, 59, 60, 61, 62, 63,64, 65: n = A,T,C or G
  misc_feature 66, 67, 68, 69, 70, 71, 72, 73, 74, 75, 76, 77, 78, 79, 80,81, 82, 83, 84, 85, 86, 87, 88, 89, 90, 91, 92, 93, 94,95, 96, 97, 98, 99, 100, 101, 102, 103, 104, 105, 106: n = A,T,C or G
gagcctnnnnnnnnnnnnnnnnnnnnnnnnnnnnnnnnnnnnnnnnnnnnnnnnnnnnnnnnnnnnnnnnnnnnnnnnnnnnnnnnnnnnnnnnnnnnnnnnnnnntgcttaaatagttttaaatttttgaagctttttataataaagaatcagtctctctctctctctctttctgtctctcatatatcactcactatgggtggaagccagctgccatgttgcttgaactaccccagagaaagagatgcacgtagtgaagaactgaagtctcctgacaacttccatgtgagtgagcctgggggtggattcttcaatcccttcaagtggctacaactccagctaacatcttgactgcaaccacatgggagacaataagtcagaagttactacctatgacactctgattcctgaccttcagaactgtgtgagataataaatgtttattgttctaagatactaattttgaggataatttattgcatggcaatagataactaatacaattatatgagtcatcagctgctcctagatttgggcaaaatatttcaggtttaataaatttcccatcacatttaaaatacctttattctcacaaaatcaaatagtttaaaaatgract

SEQ ID NO: 624907 - DNA, 525 bp, Homo sapiens
gctaaatttgctaatttgtaatctaagctatttttagtaattaaagtaacgaagaaaagaaatattttcctttgccagcttcccatacagcacacacacacacacacacatacatacayacacacactttaatatttttaatacatactcatatatattgtttgtcaagctagccaaatctcaactacacaataatttccaagcaaaagtatgtatttaaatacaagtctgaacaaaatgagttgaactcagaaatctcttgaccttccaaaaccttaaggtctaaataaatgtcatcaagcatatgaaatgtagaacctgatactttactgctaaaatttctagagcaggagggttttaatgatgaaattccaagagtcataatccccaatagagttcaataacaacataaaaagtgtcactttataatagacaagacacgaatgaatgaatgaatgactagaagaattaataaataaaatttctatccacctgttatcagccacagaaaagattccaaaaatg

SEQ ID NO: 624908 - DNA, 399 bp, Homo sapiens
ttttggtcttttcagttttccaatatctagtcaacaatttttwaatattcaattctttgcaaaaatatctggtatgatttctatctcctaactgaactctgaccaatacattggttatacaaccccaaattaactacatgaaattaacaaaattgcactcttttccaccagttccttcgctgaaattagtccttttggacttgcattcaaaccttacttgcttccttattccttctcctcactctattcagactcattcttcattcatttatttaatgaaattgtgctgagatggaaatgagtggatgagattctacaaaaatataagtgaatatgacaagatcttctcacagaatagtggacaacgtagacacataaaccaataacaaccatccagag

SEQ ID NO: 624909 - DNA, 543 bp, Homo sapiens
ttaattaaaaaaataaatcttaaaagtgctataataaattttgaaatatgtaattaatctgtattctgctaagtcacattatcaacacgtaacaatagacagtagctcacatatgtgtagaacatatctatttaatctctgggccatgcttggtattcccatggatcagagttccttacaatattaactccagggtacccagagatctgaggcccacaagttgggaagtcactgaactaaaatcaattccaaacctctcagctcagtattgagyttttcacactctggtccaatctacttttctaaccatatcattcactgacttctcacattactccagttaaattactataatcactgccctgaccacatgtagggctaccctaagcctaaaatatactccttcatccttcctctttatctatccaattcttacctttcttcaaagcccacgttatacccctcttccaggtgatttttcttggccactgtaccagatgtgtctgattctcagactctcactgaacatctaagttatctcct

SEQ ID NO: 624910 - DNA, 543 bp, Homo sapiens
ttaattaaaaaaataaatcttaaaagtgctataataaattttgaaatatgtaattaatctgtattctgctaagtcacattatcaacacgtaacaatagacagtagctcacatatgtgtagaacatatctatttaatctctgggccatgcttggtattcccatggatcagagttccttacaatattaactccagggtacccagagatctgaggcccacaagttgggaagtcactgaactaaaatcaattccaaacctctcagctcagtattgagtttttcacactctggtccaatctacttttctaaccatatcattcactgacttctcacatyactccagttaaattactataatcactgccctgaccacatgtagggctaccctaagcctaaaatatactccttcatccttcctctttatctatccaattcttacctttcttcaaagcccacgttatacccctcttccaggtgatttttcttggccactgtaccagatgtgtctgattctcagactctcactgaacatctaagttatctcct

SEQ ID NO: 624911 - DNA, 620 bp, Homo sapiens
gagaaattatctccttgcaaagactcttgccagtttaagagtctcctaaaccacctacatttaaatttagaaatttaaattctctaaatctcagatttaagaattcactagaagaacttacagaattcacttacagctattatacccacagttattgtttattatagtgaaaggatatggattaaaatcagctgcaggaagaggcctatgaagtagagtccagggcatctccaagcatgaagcttccagttttcctcttccagtgcagttatggacagtactaaattctcccaccagtgatgtctgacaatacacatggagtattgtccacaagggaagctcacctagccttggggtccagcstttttagtgaggtttggctgtgtagacattgttgcctgtccacttggctgacctaagtttctaagtcctctagaggtcaagataatgtgtgtcacccaaagttcccatcatatattatattgttagcatagactattcggcatggcccaaggtttctaggtaaacaaagacaaccttataaggcagaatattccaaaggcttaaaggttacctcccaggagctgagggcaaaggccagacctctatttgggtaaggt

SEQ ID NO: 624912 - DNA, 624 bp, Homo sapiens
tcataaaaagttttgaatacttactatgagctatgcacagatctacaaatcactagagaaacaaagacaagtaaaacattgttcctttccttaaagaatctgcatagggttgataaagagggcaccttggaattatctatattcttgtaatgatcacggatcacaagttttctaagagagtgcttataacaattattcatttttaatttactgtcttattttggaaaagttcagcatatgcaaaataatcatataatcaacccccataaatccatcaaccagtttgagaaaatagcaagcaattcatgaccaattctttttatctaaattacccacttatctaccttgtttattggattattttgaagcaagtcccagacatcatgtcttttcatccttaaatacttagawtgtatcttcttttttaaaaaaataaccataccaccattattatgcttaaataattaacaataaatcattttttacagcatcaaatatcaaggtagtgtccaaattttcctaaatatatatatatatatatatatatatatattttgagacagagtttcactcttgttgaccaggctggagtgcagtggcgcaatctcggctcacaacaacctc

SEQ ID NO: 624913 - DNA, 498 bp, Homo sapiens
tccctcagcttttgattcaaaagtatcaagcagatgagccaagaatgctggctctggaagccagaacaactgggttcaactgtcacctctgaaaccacaggtcattcatttagtctctctgtgtctcagttttctcacctgttaagtgggggtgatcataataataaaaaacggaatttattatcattagttattctaataatgctgttatgttagtggttttttttttttttgggaactaacatcaaaccactactgtgtctttggtccctgataagtgcyttaaacatgtcatttctctgaatactcatataaagcatttggggtagatatattattagccccatttaaagatgagagattaggccgggtgtggtgacgtacgtctgaaatcccagcacattgggaggccaaggcaggtggatctctggagctcaggagtttgaggccagcctggacaacacagtgaaatcccatctctactaaaaatacaaaaat

SEQ ID NO: 624914 - DNA, 524 bp, Homo sapiens
tcataagaactgaatgagattttaagaaatgtgaaaatgtccagtccagagcatctattaaataaatgcaaactccatttcttccttttctttacagtatrtaaagccatgctaatttcaaggcaaggtcactcaaaataggtgaaaaatctgaatttgaaaattctcttttgatgtaatggaacttttctactttaaggtatacaaaagaactagaatttagctattccagtcgtgtccagtagagatcatttgggatctgactatgtaagactgatttttaatcagcatacccataatttgtatgaaaatagatgcttgagaatacttgaaacagactgttctcttaagtagtttaagtgttttcccagaaatcttgtttacgattctgaagttgcttagctaaactattttcagagataggccaaagcctgcctgtacccagctgtaggtcatatcatctgtaactctgaattaatgaaatcactgattcatctttgattcccaaagttatggaagtgaat

SEQ ID NO: 624915 - DNA, 562 bp, Homo sapiens
tcatctttgattcccaaagttatggaagtgaatggaagaaatccaagtttartttaaaattagattttaaaagttttggcaattcacttttaagttcaggtcgagatttaaaaataaagacaagatatggtcctaaggatgtgagagtgggtagatctggaagtttaaaataattcatgaaatacagtgaaatacactaataaaatcactcagtttactggaactttcatttttccatcccatttttatcagtaaggaaaatcaagaacatcaggagttttatttttaaaaacaactttggggcagtgacatttgcaagctctcatgtggactcccagagattctgtcttactcagtttgggggtgggaccaggaatctgcagttttagcaggcaccaccccccagtgcaatcctgctgcaggtgggaagcagcatcctatagttattcaaagcccagggcctgactttgtgggcttaaaccaaaattgttacctaccacttgtgtaatcttgggaaaataacttcatctccacatacttcagtttctcattgataagatag

SEQ ID NO: 624916 - DNA, 612 bp, Homo sapiens
cacatgcacttgcatgttaattgcagcactatttacaataggaaaacatggaatcaagctaggtgcccatcaatggtggattggatatacgtatataccatggaatactacacagccataaaaaagaatgaaatcatgtcctctgcagcaacatagatgcagctaaaggctattgtcctaagtgaattaatgcaggaacagaaaaccaaatactgcatgttctcacttaaaagtgggagctaaacactgggtacacatggacataaagatggcaacagtagacattggaaactactagagggggaagagagggaggtgggcaaaggctgaaaaactacctattgggtactatgctcactacctgggtgacaggatcatttgtaccccaaacctcaagtgtcatacagcayacccatgaaacaaacctgcacatacatccactgaatttaaaataaaagttgaaattataaaaacaaaatacactttaaaaagttctcaccataaaagtgataagcatttgaggtgacggatatgttaattagcttgatttaatcattcctcatcgttcacatctatcataacatcactttgcactccatatatatataatta

SEQ ID NO: 624917 - DNA, 535 bp, Homo sapiens
ttttactacctggtaagtttccatttccccaatcagggcccaaagacaattgttttcaaagctcaaaaaatttcagatctcaaggtaggagttcatcattaaaaggtaggcaaagccaacaagtaactgtcacattggagagctgactgctggggtccagttcaacrtggcatccagcaggcaggtctccactgattcctactgaacagtggaagtacccatgaagacacaaaagtgatgcatgcacactgacagtctgacatcaggactaggaaagaagtcacacctgtggccagactttgcccttcccagtcctgactccaagccagggcctaccaggaacctgggcagtgggcaccctctgccctgtggaatatgcaaatacctgcctccatctccctaacaccagactgcccttcccaaatccagaaagggaactcgaggctcagatgacaaacagccaggcagaagaggcatcgaccatcagcaagggacatcttagaagatgggagtccctgagataaagacagaaaaa

SEQ ID NO: 624918 - DNA, 535 bp, Homo sapiens
cggttactctacatcaggttgccagccgctggttacgtagaatatataaagaacgtagggggcacattttcaactttctccattttttggactgtttactattagacaatcatgttaaaatgaatgtcattttttttttggaacaactagtcctttaacaaaagatagcttaaagagaatccacagggatcaagtcagaaaaggtctcttttgttttgagacagtctcactttgtcactcaggttggagtgcagtagtgctatcttggctcactacaacctctgcctcctggattcaagcaattctcttgcctcagcctcccaagtagctgggattacaggcgaatgtcatgaagcccggctaaatttttttgtatttttagtagagacggggtttcaccatgttgcccaggctagtctcaaactcctgagctcaggcaatccacccaccttggcctcccaaagtgctggcattacatgcatgagccacccacctggmccaagtcagaaaaggtctctaacaaaaaaaagtagat

SEQ ID NO: 624919 - DNA, 505 bp, Homo sapiens
aaatccagagaataaggaagaaaacacaaagaaaaacaattctctcattatttcaacttttctgcaccactcccaattacacagtaaatcacctcttttcatagctgctgtcatgacatctgtgtgggccttggggtcacttaatttcaagctgcctttaaaaccaggtcctctgaggaacagatatttgttttatgctgatgcaattaaagaagctaatttcaattttgaagcacacaagatgtatgcaagttaatagcttttcggcttttggcctccaagcagaatgaaaagcttgttgttcrgctttaataacctgtgggacaaatctgagtgttcatataaattggaaaccttgctcttaactatttttttcatacaattgcttcctgatacaaggatccttatcttaaatcctgtaaatcttcaaaagtcttttgtttcttgtgcatctggctgtgccatttatttggggtgtcataaagggaaaatgaagtagaaacag

SEQ ID NO: 624920 - DNA, 512 bp, Homo sapiens
gcattatattgtttgctgccggagaaatgaaatgatggctaagatcccccgcctggaattgcttgctattgggaaaggaagattcaagttgttacaacctaaataaagtaaaatatgtgttataaattacaagccacactctagaatttacaaagagcacttcacagtgcatgcctgcctatgtgtaagcctgctgtgcttcttggtatctcttcagataattctcacacagccctgataaagttctatggatgcaagtgatttcatctttccatatgcaaaatccaatttgaacttgggaaggaaaaaaatgaaacaccttaatwacagagatttatgacatttttaacctgagaaagattaactttttctatcatttataattcagctcccctagcaaccttatttacaagccagatccatgttcccttacgcagctggctcaattatacagcagcatgaaaaatcatctgggcagagagtattagcttaaacagaaatttgtcttccac

SEQ ID NO: 624921 - DNA, 576 bp, Homo sapiens
tgccattagttcatttctttttatgactgcattatctctmttttcaaaacttcaggagagagaagaaggccccagcaacccatgatgggtggaagtcccacatgtagataggggccctggacggaggttgttgcctgttctgtgaaggagcatgaggaagggtgaggatgagggagttttagcagcaggagaggagatgaagtgacttgctcagggacacagaacttttctgcttccaggaagacagtatcactgtatcacttctcatctggcaagctgaaggctccttctttttgagacagagtcttactctgtctcccaggctgaagtgcagtggtacgataacagctcactgcagcctttacttcccaggctcaagtgatcctcctacctcagcctcccgagtagctgggaccacagctgtgcaccactgtgcccagctaatttttaattttttttttgtagagacaggatctcactgtgttgcccaggtttgagagggccttctgagcagagagtttgaggcaacaaactagaagcagcacagtgagaagcacttgttctgggaacgcagag

SEQ ID NO: 624922 - DNA, 543 bp, Homo sapiens
cttgggaggctgaggcaggaggatcacttgagcccaggaggtcaaggctatagtggaccataattgcaccattgcactctagcctgggtgacagaccaagaccctgtctcaaaataaattaaataacttttaaaatacaagtatgtttctatggattatcacagtatactgctaagtcttctaccatgcagtgcaaacctgggcacctgttttttttcctctcagggaagttaagtccttattgtgatctctcactaagattaagcctctgtcctcccttcccagagctatgatccttttctcttctctattccttctagccccctcaycctcctgcaaccattcaaaagaaaagcaactaaaataagactgctgtatacaagttgtgtaaacacttgcataagtcacttcttagtcttagcttcttcacatgcagaaaaagagtgagcttactatcatttaagcacactggaggtttctacaagcatcttgagggatggaactttatatttacacatgtatttttatattcttctttatatt

SEQ ID NO: 624923 - DNA, 555 bp, Homo sapiens
ttttgcccatgtgtaataagattttttgttttttagttactgacctgctttgcaaatattttctctcattctatagattgtctcttcactctgctgatttttttctttgctgtgcagaagctttttagtatatgaacccatttgtctatttttgcttttgcctgtgattttgagttcttatccaaaaaattattgcccagaccaatgtcatgaagcaattccgttatgttttcttctagtattttcatagtttttggtcttacatttaagtatttaatccatttgagttcttttttcgtatgtagttagagataggcatctagtttcatttttgtgcaygtagtttgcactcagttttcttagcaccatttattaaagaggctgtccctttccccaatgtgtgttattggtgcctttgtcaaaaattatttgactatgaatgcatggatttatttctgggttctctattttgtcccagtggtcatgtgtctgtttatatgctggtatcatgctgttttaattactataattttgtagaatattttgaggttttgc

SEQ ID NO: 624924 - DNA, 572 bp, Homo sapiens
gctactaatttgtatacatttatttcctatcctgaaacttcactgaattcatttattagatctaggagcttttggatgagtctttagggttttctaggtatacaattttatcatcagccaacagtgacaacttgacttcctctttactgatttgaatgccctttatttctttctcttgtctgattgctctggctagaacttttagtactatgttgaatagaagtggcaaaagtgggcgtccttcttttgttccagttctcggagggaattcttccaactttttcccattcagtagaatgttggctgtgggtttgttatagatggcttttttttttttttaccttaagttatgtcccytttatgctgattttgctgagggtgttaattataaagtgatgctggattttgtcaaatgctttctctgtgtctgttgagatgatcatgtgatttatgtttttaattctgttaatgtggtgtatcattatttatttacttgcttatgttaaaccatccttgcctccctgatatgaaacccacttaatcatggtgtattatttttttcaatgtgctgt

SEQ ID NO: 624925 - DNA, 521 bp, Homo sapiens
aatcagatgacaccttgtgtttacttggaccaaatatgcatattttgcatgtgggatatagaaattatttgtagccagagtacagactgttacagtttgcaaatggctacaaattctttgtagcatctcctatcaayagatggaacatatttctctactttttaaagctgagatttttttctttaagacgtggtcttgccctgtcacccaggctggagtgcagtggcacaaacaaccactgcagctttgacctccagggctcaagcaatccttctgtctcagcttcccaagtagatggaactacagatgaacaccattaaacccagctttttttttttttttttttggtagtgatgagggtctcaccatgttgttcaggctaggcttgaactcctgggctcagcaattctcctgcctcatcctctcaaagtgctgagattacaggcatgagccactgaacctggcaaaagctgaaataatcttatgatttgctttgaccaagagaaagtgatatacgtgac

SEQ ID NO: 624926 - DNA, 478 bp, Homo sapiens
atgtcagtgattttgtcgatgattaaacagttaatacacaacaaagctgaaaccagaaccaagtactaccagatccctagcaaacgtgtgtttcacttcttcatttggcctttcctttcacttagtgcwtcttagtacgtccgtaagagtaggtgcatttgcattgccctgcaaggtgttctgaccacttttccctctaaatattaataaatatcatccaatgaacagcacaccttagaggccaaatagaactggccaaatagaacacaggagccaatcaacaaatatttgatgaaaaggaagaagaaaagggtgaaaatagtaagtaaaagtcagcacagcttcctcctcacttgccatccggcactgcacacctgcctgccatgtgctattgagggatggtcatgtccttcacacctgtcacacactatcttactaaagttctcaaataaataaccttaggttatttaactgacct

SEQ ID NO: 624927 - DNA, 582 bp, Homo sapiens
aatttgaggtggttcataagtgtctttataaagataaaatgcatagcaggggctcagattttagttttatctaacatatattcattcaatagttaccctgtactaggaactgtggtagtttaagatacagttcttccaataagagagatagattttagagaaaagaaatgatacactattaggactgcacaaaatgatatttcagaaggaatcytagggcatatagctgtacagagaagaccctccctctgctatctacacacaacaattctattagttcagacaggaaagactttttgaatgaggtgatctttgagttgcgttttaaagaagaagaaaacagctgaattagagaaacagagccaaagaatgaaagggtgaatcaaagaaaaggcaagagtaaaagtaaaatttcattcagctcaaattttgaagtcagtgccttttaaatatattaggtatgtaaaggtgagatacatattattttgtcccactattattttattttcattttttatgtatgctctatagaggcccagtataattaaatggtatgtcaggattggaattcaattccattct

SEQ ID NO: 624928 - DNA, 493 bp, Homo sapiens
tatttgagtttgaacctttaatgtatggcttaagcaagtgggtgaaggaactctgaaccctgcctgctttctctcagctctgcctcactgaagatgggaackcagccctcctcagaggcaactgggacacctggctgcagtgcccacgtgacattcctgtggagaaaagcactttagggccagtctccagatgccctctcatgggtcttctgatttcacatgaagcctgggagaaaacaaagcaaaaaaatgtgagaagaactacactgcccttcccaaatagaaacctgttgtgcagaggcacatgcaactgaggacagagctcagcattttaaattaaatttgcatatagtttctgtgacctcatttgacagactgtttttgagctccctgttgccaatgtgtccattttcctgttcatttaaacctaaaggaatactcacatcagccgcaagaggtgactttgttgcactggtgctcctgtatcctctta

SEQ ID NO: 624929 - DNA, 598 bp, Homo sapiens
tgccttgccactcacctccgatacttggctttatcctttgtgtctcactctaggactatttattcgtttcctggtgctctaggacacagcagagagagctgactggctattctgggatgaatggagatgccaaaagcctatggaaccgggtaatatcaggtgattttccattcaagtcctatctggttggtacctccatgagattttaaaaatagaaaagacgaggctttctgtaggtccatgtacttcagcstggcctttggatgcagaggccagctgggaagctagcagtgcttctggccaagactagatccctagcgcagagcctcagggctctctgtagcttcccagcttgtgcatgcacagttcatatctgacgtgatagcatcacatcactgcgcaagctaagctttagtatggtgacagacactatccattcactgagtcagcagtgtccaagagactttttctgatgtggttttcattgcctgccaacaatttcggagtctagaaagccagaaccctgttttccatgtgttttgtttttatgaaagaaacttcatgcacctgactcctcaagcacctcaagaacaactgc

SEQ ID NO: 624930 - DNA, 598 bp, Homo sapiens
tgccttgccactcacctccgatacttggctttatcctttgtgtctcactctaggactatttattcgtttcctggtgctctaggacacagcagagagagctgactggctattctgggatgaatggagatgccaaaagcctatggaaccgggtaatatcaggtgattttccattcaagtcctatctggttggtacctccatgagattttaaaaatagaaaagacgaggctttctgtaggtccatgtacttcagcgtggcctttggatgcagaggccagctgggaagctagcagtgcttctggccaagactagatccctagcgcagagcctcagggctctctgtagcttcccagcttgtgcatgcacagttcatatctgacrtgatagcatcacatcactgcgcaagctaagctttagtatggtgacagacactatccattcactgagtcagcagtgtccaagagactttttctgatgtggttttcattgcctgccaacaatttcggagtctagaaagccagaaccctgttttccatgtgttttgtttttatgaaagaaacttcatgcacctgactcctcaagcacctcaagaacaactgc

SEQ ID NO: 624931 - DNA, 556 bp, Homo sapiens
tcatactgtacctcttactgattgtgaaggtagaggatattttaaaaatccaatttaaaacagatttaggccaagcactgtggctcatgcctgtaatcccagcactttgggagatcacttgaggtcaggagttcgagaccagcctggccaacatggtgaaattttgtctctactaaaaatacaaaaattagcctggtgtgttggtggcagcgcctgtagttacaggtactggggaggctcaggcaggagaatagcttgaacccggaagacagaggttgcagtgagccgagatcatgccactgcactccagcctgggcaacagagtgagactttgtctcaaaaaacaaaaacaaaaagaaaaaccagatttaaytggcacttacagaacccttcaccctgcaattagaggatacatacttttctcaaatagaatagaatatttattgaaatttatcacagtctgggtcattatgcaagcctcaatttccaaaaaagtggtatgacacagtatattctctaatagcaatgcatttaagataaaaataaatgacactca

SEQ ID NO: 624932 - DNA, 565 bp, Homo sapiens
aatgaattctatgaaagatttgttaacaaaatgcttgggaaaacagaggaggcgtactgacttctgatcctggcttctggagatgaccagaaaaggctagagaggaggaagcatatttactgaccttgaggaacaaggaggatacattatgtgggaaacaggtggcctgggcgcagtgactcacacctgtaatctcagcactttgggaggccaaggcaggaggattgcttgcacccaggactttgaggctacagtgagttatgatcacatcactgaactccagcctggccagtagagcaagactccaccacttaaaaaaaaaaaaagttgggcattccacatagacaacatgcaaaggcaaaggcagaactgagttttgggagataaagaggatttggaaggagcataaaatatgacaaaaattagtgagataagaatttrgaataagaattggagccaccttgtcagaaattcagatattatcatggaggctttagggagccattgcataaatttaaacagggctgtggtgataatttttttctaaaaaaagcaatgcaacaag

SEQ ID NO: 624933 - DNA, 567 bp, Homo sapiens
aacaaaatgcttgggaaaacagaggaggcgtactgacttctgatcctggcttctggagatgaccagaaaaggctagagaggaggaagcatatttactgaccttgaggaacaaggaggatacattatgtgggaaacaggtggcctgggcgcagtgactcacacctgtaatctcagcactttgggaggccaaggcaggaggattgcttgcacccaggactttgaggctacagtgagttatgatcacatcactgaactccagcctggccagtagagcaagactccaccacttaaaaaaaaaaaaagttgggcattccacatagacaacatgcaaaggcaaaggcagaactgagttttgggagataaagaggatttggaaggagcataaaatatgacaaaaattagtgagataagaatttagaataagaattggagccaccttgtcagaaattcagayattatcatggaggctttagggagccattgcataaatttaaacagggctgtggtgataatttttttctaaaaaaagcaatgcaacaagattgagagcacttaggaggaagaatt

SEQ ID NO: 624934 - DNA, 586 bp, Homo sapiens
tataaacaaacattgatcaggtatgcctatgctttaaaagttttcttttctytttttctttttatccaagtagactcatattctatgactaaaaaaaaaccatggacactggaaagtcaggtttactttcttttttcttcttattggctgcatattcttctattgcattgattattctaattgatttaggcactcctatactgtgagatattcagatttcttctacgttctgctaaaataaaaaatgttacaatagatactcattggcagatatttttcatatcttgtgcttgctctttaagatagattcctagccaaggacttgtggggccattgtttatataaattagaaattttgatgaatgtagtcaagctgcgtttctgaaaacttattctctccaacaataccggtttatacatattcatgctgatttggggaattatcagacattttaatcttcaccaatctgaaaggtaagaaaatgctacctccaaaattttcactaaattgtgacattttccttgcaataaaataggatagaactgttaggactgtctttgataaccagtagacttcagaatggat

SEQ ID NO: 624935 - DNA, 585 bp, Homo sapiens
atttatttatttatttatttatgaagggatctgcaaagttagaaaaagctgaaatattgcaaatgacagtggatcatttgaagatgcttcaggcaacagggggtaaaggtaagyagatgacttcattttttttttttttgccttttttacctttctcttttcatgttattccccctaatattgtaaggaagtcatagctgaacagttctttaacaagctgagataggaggccccagattaaagccatggaaatcaatgctaatggcaggattgaactcgtgggaaagaacttttggaacaaaagaagcacttgaccctgggcttgtgtttgctttcataatactgtgggagtaaagcttcattcacagcagcctggtcagagatttgtttaggacttaagaagcgcatgctggaatctgtacagaaagaacaaaaaacaaacacacaaacatccaaacataaacaggaggttagaggtaatccttttctcctccttctgcttctttcttcctactccttctcctcctctgtcttcattaaatgaaggctaagactgaaaataattcagctattccaaaggaattg

SEQ ID NO: 624936 - DNA, 506 bp, Homo sapiens
aggctggtctcgaactcctcacctcaggtgatccatctgcctcggcctcccraagtactgggattacaggtgtgagccaccatgcccggcccaaagggtgttctttacacaaaaggagagtggtcctagatgcaaagatgaagatacaggaaggaataaggagcatcaaatttggtatatatggaagttaatctaaatgattattgactctataaaaggataataatgatagatttaagcccaaacctcaaaaaccatgggatgcaggggacaggataaaattctaggaactcccaagaagtatggtgaagggagatcccaggatgacagctgttccagaaagagaaagaaattagttaagattggaaagagactgactcaagatacacaagcacattgaagactttatcatcaagacacctctgccatgtatctatctcctttttatcatgagttgaaaatgcctgggtgagccagcccaggcttttatttgtatttggcttgtc

SEQ ID NO: 624937 - DNA, 603 bp, Homo sapiens
aggctttcaaggtattggcaatatttttatttcttaatctgggtaatgaatactcaagagttcattttagtgtaaatctttacactgttcctctagattctatacataattaaaaagaaaagtggcaagaaaagtcacttagccccgccatttccatctcacaatcccaaacatactgcacttgctatttcctttctctttactagaaccctgctgccaccattgtccaaaccagcaccataacttgcctggaatatgacatggttttctaaattagaaattgtcttttcacttctaactctgtccccctacattgtgttttccacacaaaagccagctgatccttttaaagcytaagttggatcttgtcactcctctgctgaaaatttccaacagttcccacccaactcagatgaaatgagagttcttaccatgggctgcaaagctctaactgacctggccctgttaaccctctgcccttgcctgctggcttgccccttccatttcctgtcagactgggtccttgttgctcctttaactcacccagcacactcctagctcaaaggcctgctttttcatctcaagaagttcatagagaaaaat

SEQ ID NO: 624938 - DNA, 561 bp, Homo sapiens
gaggctggagctcagtggcaccgtgttagctcactgcaaccgccatctcctgggtttgagcaattctcctgccttagcttcccgagtagctgcgattacaggcgcccaccaccacacccggctagtttttatatttttagtagagacgggatttcaccatgttggccaggctggtctcgaactcctgacctcaggcgatccacctgcctcggcctcccaaagtgctgggattacaggcgtgagccaccgcatccagccaggtttcaccagttttaygtacattcatgcatgtttgtgtgtgtgtgtgtgtgtgtgtgtttatatgcaacattatcatatcttgtatcaccaccacaataaaatacagagctatcaccatgaggctcccataagctactcctttagaatcatactgatcttcctcttcaccacatcactatttctggcaaccactaatctcccatctctataatttcaagaatgctatataaattgaatcatatagtacgtaaccttttagattggcttttttcctcattcagtataattcccttgagatct

SEQ ID NO: 624939 - DNA, 542 bp, Homo sapiens
ccgaggctggagctcagtggcaccgtgttagctcactgcaaccgccatctcctgggtttgagcaattctcctgccttagcttcccgagtagctgcgattacaggcgcccaccaccacacccggctagtttttatatttttagtagagacgggatttcaccatgttggccaggctggtctcgaactcctgacctcaggcgatccacctgcctcggcctcccaaagtgctgggattacaggcgtgagccaccgcatccagccaggtttcaccagttttacgtacattcatgcatgtttgtgtgtgtgtgtgtgtgtgtgtgtttatatgcaacattatcatatcttgtatcaccaccacaataaaatacagagctatcaccatgaggctcccataagctactcctttagaatcatactgatcttcctcttcaccacatcmctatttctggcaaccactaatctcccatctctataatttcaagaatgctatataaattgaatcatatagtacgtaaccttttagattggcttttttcctcattc

SEQ ID NO: 624940 - DNA, 459 bp, Homo sapiens
cgccatgccttcaataaccttgtgaatagaaacccgaatcgttccatcttggcttctgaaacttaaccccaggcaaagcacacactcggcggggccaggtggggctggatggggtccgcgcccgacggcggggccgcgggggtcggtgaaccccagctcccctgtcggcctcagggcggatggctgggtcggcgcggggttcggggcctccgatcggctgcacgagggcgggccaggacccagaccccgtccccgctccggccccgcaatccagcgggtgacgagcctgacgcgcgccrgtcgcctgccacctcccgccccgagcgccctgggccagtacctcccggccgcaggtgaacgctccgcggcccgccaggctcaagctcgaccgtcacaactttccgtgagggctgcacgtttttctgaattcaaatgcctgcaggtgcaactcatgtttgc

SEQ ID NO: 624941 - DNA, 625 bp, Homo sapiens
aaataaacagccatgttgctcacacaaagcctgtttggtggtctcttcacacagacgcgcatgaaattaaccatacaaactaagaacctaaaattcaggtctttgttatgcctggccagttttacaattttaaatagacaatgtaggctgaatagttaattcagtttttaacttacagtactatgagcattttgacatattcggagttctttcattctttttatagttctatacttgtctctaggagtaaataagtcactttgtttcaataaattaccagttgggtgttgttttctgaaaccttagcaaaattagccttctccttactttgagttcttaaggaagggaaaggagagaaagtaagtgaacttcgaaacaggacacccagctggaattcctgctttaagcactgtttctaatgaaggcaactgtcatggagttacatgcccctttagmcttggcctaggctctttgaggactgtcactgtcactattgtgacctatagtttggtcaaataataaagaatgaaagaagtctcctttgcccacaaagcaatggtacatgtaacgtagtatctgaggaaggcacttagaggtggaaacaaggggtcgaagcaagggtcac

SEQ ID NO: 624942 - DNA, 503 bp, Homo sapiens
agttatttcttgccttctgctagcttttgaatgtgtttgctcttgcttttctagttctttyaattgtgatgttaggatgtcaattttggctctttcctgctttctcttgtgggcatgggtacataacgaaatgaaggcagaaataaagatgttctttgaaaccaacgagaacaaagacaacataccagaatctctgggacgcattcaaagcagtgtgcagagggaaatttatagcactaaatgcccacaaaagattttgagttttaaaaatttattgagacttgttttgtggcctatcatatggtctactttgcagaaggttccatgtgctgatgagaagaatatatattctgcagttcttggttagaattgttctgtaaatatctgtcaggtttatttgttctagagtgtagtttaagtccagtgtttgctgattttctgctccaatgatctatctagtgctgtcagtggagtgttgaagtcccctactattattgtgttga

SEQ ID NO: 624943 - DNA, 503 bp, Homo sapiens
agttatttcttgccttctgctagcttttgaatgtgtttgctcttgcttttctagttcttttaattgtgatgttaggatgtcaattttggctctttcctgctttctcttgtgggcatgggtacataacgaaatgaaggcagaaataaagatgttctttgaaaccaacgagaacaaagacaacataccagaatctctgggacrcattcaaagcagtgtgcagagggaaatttatagcactaaatgcccacaaaagattttgagttttaaaaatttattgagacttgttttgtggcctatcatatggtctactttgcagaaggttccatgtgctgatgagaagaatatatattctgcagttcttggttagaattgttctgtaaatatctgtcaggtttatttgttctagagtgtagtttaagtccagtgtttgctgattttctgctccaatgatctatctagtgctgtcagtggagtgttgaagtcccctactattattgtgttga

SEQ ID NO: 624944 - DNA, 503 bp, Homo sapiens
agttatttcttgccttctgctagcttttgaatgtgtttgctcttgcttttctagttcttttaattgtgatgttaggatgtcaattttggctctttcctgctttctcttgtgggcatgggtacataacgaaatgaaggcagaaataaagatgttctttgaaaccaacgagaacaaagacaacataccagaatctctgggacgcattcaaagcagtgtgcagagggaaatttatagcactaaatgcccacaaaagattttgagttttaaaaatttattgagacttgttttgtggcctatcatatggtctactttgcagaaggttccatgtgctgatgagaagaatrtatattctgcagttcttggttagaattgttctgtaaatatctgtcaggtttatttgttctagagtgtagtttaagtccagtgtttgctgattttctgctccaatgatctatctagtgctgtcagtggagtgttgaagtcccctactattattgtgttga

SEQ ID NO: 624945 - DNA, 542 bp, Homo sapiens
gtacaagggttactgtttctccctatcctccccaagattagttaccatctgttttttttttgttatactcattctagtgggtgtaaagtagtagatcacagtggttttaatttgcaaaacacctmatgattaataattttaaatatcttttcatgtttttatgggctgtttgtatattttctttggtgaaatgtttattaacatattttgcccattttaaaatttggcaatattattgagttgtaaacagttcttatagattctgaatttaattcctttggcaaatatatattgcaaagtctgtgactttgtctattcatttttcaatggtgtcttctgatgaagagaattttaaaatttctattacatgcaaaatattaactttttcttctatggttcatattttttgtggcctgtttaagaaatctttgccaattctgactcatgaagacactctcctatattttcttccaaaagctttgtggttctagcttttatgcttaggtctttgattcatctgaaattaactgtttgtatgaagt

SEQ ID NO: 624946 - DNA, 603 bp, Homo sapiens
ttccatgactgggccaggcccaagacgggagaaagaagatttacctggatacacatttgaagtcttgattaatattctgcaatggactggagttgtgtgattattggatcagactaaagttttaatccccaaacaagagaccatttgtttatcattggagaagtaaaaccagcctaagtttcatccaggggcagaaaaagaactaatccacagagagagtactaaaagagactgaagacacactttgaagggaaaatgacattgccttgttttatgcttgtgctctacagagcccatcttattcaatgaacccattacacctttatttcatttttggtggggtgcctgccaacccaaaatgaaagcacattccyttcttcatttgcactcaaccatcaataccttcccaaacaccttttcacagaaaagtcctttatctgtctttgtaataacagggacacatttaaagctgagaacttcatggaccaagtggatgaacagcatgtaggtacagaaatgtaatgttaaaatttgtctacacttttgttctggtttaaccatagttattgtagaaattagactaaatataaactttaaaaatca

SEQ ID NO: 624947 - DNA, 387 bp, Homo sapiens
cctgaaaagcttagatttaatactaacagacttctggattctctctataaattgaggcctgcagyacattcagtaaaatatacaaatcttgagtgcacagctttacaaatggttacatgtagatgtacctgtgtaactttcacctacatcaagatgctacacatttacatgtccccagagattcctgttgccctttccctatcagtgattctcttctctctaactatttcgacctccatccctctcggttagtattacgtgttcttgaagttcccataaattgactcagacagcattattcttttctatggtgggttccagtttcagatttattccccaaccagagattttcccatgcatgtcatcactgggtctgggcttccctgg

SEQ ID NO: 624948 - DNA, 587 bp, Homo sapiens
gatttctggacaaagaattagacaatgtgggtattagctgtggttcttctgttgactagcmaagtgaccttgggcaaatcatgtagctactctggtttgaaatttgtagtcctctggtttgtaaccttatattacaggatagtgctaacagtgaaagaaacttgtgacttatgcaaggtaacattgctactaaatggcaaagaacccaagtctatctgactctatgtactatggtagtggaattcaggatgttatggattttctattgttgctgtaatattggctgctcagtaaatgaaatatgctattttgaaaagaacatagttgggatgaggaagttagactagcatatatattcaaggatttttctatcacattagtccataatttatgaaatttatgtaactttctttctttcaatgaaagcttctatttggtcagttcatatgtccttaaatttcatacttccaattacaactcttattgtttcctccactgaagccaagtcagtttacctgtaatctctcacagacatgtctattcttaaattcctgaagtacttctaaaggtttatttaattttttatt

SEQ ID NO: 624949 - DNA, 529 bp, Homo sapiens
atgtgtttatgggttacatgagatattttgatatagatattttgatatttgatattttgatattcttattgtccttcccttcatacagtgcataataatcacatcagggtaaatggagtatctatcacctcaagcatttatcttttctttgtgttactaacaatccaattatactcttagttattttaaaatgtacaataaattattattgactatagtcaccctgttgttctgtcaaatactagatcttattcagtctaacagtatttttgtacctggttaacacaggtacccttgacccttcccagctcctggtaacctgccctgtgccaccccagrcagctgctccttgcatcctgggccctctggctccagcctcagctcaaagggcaccagatacagctggggccactattccaaagggcacaagtggtaagccttggtggcttccatgtgatgttaagcctgtgggcatgcagagtgcaaaagtgaaaaaggcttggcagacacctgcctcctccttcacctt

SEQ ID NO: 624950 - DNA, 689 bp, Homo sapiens
tcccagattaaatgacttaaagccaaaacactcagaaaacagagtataaagtcactcttgccgccagttttctttgtgccccttacaattcctttccctgaacacagtggttacttgccctacctcctttggccccagatcaatgtactggtgctctattatctgctgacaaattttgctggttacatgtgtcttgcatccgaggctctcttgctcctgaattaccaatgtagactagtccacttgtctgccagattaccattgctgccttttggaacctctgtctttttgattgttcattctcttctcaacattttcactacaacgttttcctattgtctgttactgaaccttcaaatgtcttgctccattgcttgactggacctatgtccatcattggcaactaaatcaggtgccctagcgccttctgtaggacagtggggataactaattccagatcctgactccactgttttcagtttaacgcagttaagcctgtctgcctgcattttccagattactatttttcaaamtcatcatgttgaatgaaagaagccccacaccaaatagtatatattgtattatcccatttacataaagttcaatatcaagcaaaactaatttctgtggatagaaattaaaattatagttacattgggagggaagtaaagattgacaaggaagtttgt

SEQ ID NO: 624951 - DNA, 607 bp, Homo sapiens
ggggatgaagtacaagtgcagagttttcattagttttctctttgcttatttgtttgtttctttacacaatcagtgttaattcttcatcggtttaaaataatggattataagatattatttgcaagacttgtggtaacctcaaataaaaaacatacwacaaatacacaaaaaataaagagcaagaacttaaaatatattacctcagaaaatcaccttcactaaaaggaagataggaaggaaagaaggaagagaagaccacacaacaaccagaaaataaataacaaaatgccagaagtaagtctttacttatcaataataacattgatataaatggattaactgtccaatgaaaacacaaatggctgaatgtattttaaaaagacccagcaatctcttgcatataggaaacacacttcagttataaagacacacatagaaataaaataaagggatgaaaaaagatatcctaggcaagcgaaaataaaaaaagaacaggagtacctgtacttatatcagacaaaatagatttcaagacaaaaactataaaaagagacaaagaatattattatataatgataaaggggtcaattcagcaagagggtataac

SEQ ID NO: 624952 - DNA, 607 bp, Homo sapiens
ggggatgaagtacaagtgcagagttttcattagttttctctttgcttatttgtttgtttctttacacaatcagtgttaattcttcatcggtttaaaataatggattataagatattatttgcaagacttgtggtaacctcaaataaaaaacatacaacaaatacacaaaaaataaagagcaagaacttaaaatatattacctcagaaaatcaccttcactaaaaggaagataggaaggaaagaaggaagagaagaccacacaacaaccagaaaataaataacaaaatgccagaagtaagtctttacttatcaataataacattgatataaatggattaactgtccaatgaaaacacaaayggctgaatgtattttaaaaagacccagcaatctcttgcatataggaaacacacttcagttataaagacacacatagaaataaaataaagggatgaaaaaagatatcctaggcaagcgaaaataaaaaaagaacaggagtacctgtacttatatcagacaaaatagatttcaagacaaaaactataaaaagagacaaagaatattattatataatgataaaggggtcaattcagcaagagggtataac

SEQ ID NO: 624953 - DNA, 497 bp, Homo sapiens
ttagaaaaccaacagttggggaagaacaaaattatttcataatagaggctaggaaaaaagctctgaaaaaagacagaaaataagtggcagataccagctgaattaatgaaacaactagaaaaccagacattttcaactggaggcatgaagtttctgtgcagcaagggattcatcttgcacaaagacaggtttggctcctaggaggtaacctctaacactttagaatgtcctgcctcataagaatgtgtttgtttacctgtgggccttgggccatgccagagtctatgttaaaaatgtgatttatggtgagggagtttcagaccatgcagtgtcagcttaacctttggaggagctgaagactaaagtcagccacccgggaggtcagccaagtctcaaggctgagccccaacaaaactccmgacaccaaggaagggatgagtttctctggttgtcaatcctttttatgtatcatcacacatcattgctgaaactaataa

SEQ ID NO: 624954 - DNA, 534 bp, Homo sapiens
tcataatataaaggagcattaccacctacaggtttttttgcctttttagaygaagcagatccaacaagtgtatttatttcattaatctgtaagaaaattaaatttacttatgatgaaaaaagccttatttgaagaatacttagatatatgtaactttcaaatatctaggtgatctgaagggttggggaacctagcaagaaagaggtacccatgaattaggtaaaatatttatagttacttcgtaagctgtcagtaattgtatgggtatgtgccacctggcagatcttttctatattattgctgtcctctgacctctgacagctatgattctctgtagccttcattttccaattagtcatgtacctccctggaatcttaaatagtctagtcttttataattatttaacttgaattaaatattttgtcacagaacctagcatggtgcctggtatgacctcagaaatctttgtcaaataaatgaatattgaattaacaaaattaataaacaaaaataaattcttccagattgaacaa

SEQ ID NO: 624955 - DNA, 508 bp, Homo sapiens
tccaagtcatggtttttctcagatcatcttgtcatctacattttcagaaaaataattccttaccttttcatgagaatcagcctttgtgactgcatcatctttgatctcattgtttgtggtctgctctgcaaatcaaagacaccaacatccagttgtgttctggctttgttcttgcyctgctggttaatgctgtgcttttttgttgcccatatgatctatgtttctgtgctgaaaaggcaatgcctgaaaggcatgttttgtgcctccagaaaggtgtttgtgtccataattctaaatctgtgcctacctagaaaaattatactaagctctttgaaaagaacctagcttcttgtgtgatatatcttaaatcataccagatattctgctttcagactgtatcattcacttctaacaatatacctttatctttaaaagttgtaattatttactgattaaatcaacttcttagtacacatgatttgtcttcttgtgctggtgactatcacaa

SEQ ID NO: 624956 - DNA, 508 bp, Homo sapiens
tccaagtcatggtttttctcagatcatcttgtcatctacattttcagaaaaataattccttaccttttcatgagaatcagcctttgtgactgcatcatctttgatctcattgtttgtggtctgctctgcaaatcaaagacaccaacatccagttgtgttctggctttgttcttgccctgctggttaatgctgtgcttttttgttgcccatatgatctatgtttctgtgctgaaaaggcaatgcytgaaaggcatgttttgtgcctccagaaaggtgtttgtgtccataattctaaatctgtgcctacctagaaaaattatactaagctctttgaaaagaacctagcttcttgtgtgatatatcttaaatcataccagatattctgctttcagactgtatcattcacttctaacaatatacctttatctttaaaagttgtaattatttactgattaaatcaacttcttagtacacatgatttgtcttcttgtgctggtgactatcacaa

SEQ ID NO: 624957 - DNA, 610 bp, Homo sapiens
gaggtccagttacattttggcacatggtaatccatagagccttctgcagttagaagaaaataggtacctccctttcttccggctatttcccttggcgaagtaacaagtcaaaagcaactggactggtcaggaaagtcctgaccaagagctcagacaagacacagctccgtgagatgcagtgtgcacagtcattgtctgagaccaagggcctgaaattgacaccatatgcgccccaggagtgattactccaaggggggagaaaagcaacatgtcagaacattttagtaacacctaattcatcccaaggttataaataaatatgatgcttgcttaaaaacaaaagtcaaaaamtacttcaactagattacttctgtgacaatgcttcaggcagaggtgaactttattagggagacaacatgaataaagagaaacacataacaactttttatggtatattttacgtgattttattttttttgcagtaaataaagtggttatagggctccaaggaaaagggcccagatgttagagcgttgtgtgaaatttaggggaaacaagctgtaaaaaacacagtcataaaacaggctgtcagtgccacacatctggacaa

SEQ ID NO: 624958 - DNA, 515 bp, Homo sapiens
caaagtcaaaagacacatgatagacttggaaggctatatttacaacacagatataaataaagggttcatatttttaatatgcaaagagtgctaacaaatgactaccaaaaatatagaccaatgaaaagtgagcaagattccagtagaaaattcaagatgcacaaatccaaaaagcaaataagcatgggaaggcacctgaatttactagcagataagggaatataaattaaaacaagatgccatttactttgctacacattagcaaagattaaaaagaagaatattggctgggcgcagtggctcacacctgtaatcccagcactttgggaggccgaggtgggcagatcacgaggtcaggagatcgagaccatcctggctaacacggtgaaacaccatctctactaaaaatacaaaaaattagccgggtgtggtggcaggygcctgtagtctcagctactcaggaggctgaggcaggagaatggtgtgaacccgggaggaagagcttgcagtgagct

SEQ ID NO: 624959 - DNA, 589 bp, Homo sapiens
accgtaccaggcacggtggctcatgcctgtaatcccagcactttgggaggctgaggcaggtagatcatttgaggtcaggagttcaagaccagcctgaccaacatggtgaaacctcatctctactaaaaatacaaaaaaattagccagacaaggtggtaggcaactgtaatcccagctactcaggaggctgaggcaggagaatcacttgaaccgaggaggcaraggttgcagtgagaagagatcgcatcactgcactccagcctgggcaacagagccacactccattctcaaaaaaaacaaaaacataagactgttccttcatgatctctgcctcacagtagcctgggctttggaatacagctgcctcagagacaatcaggaagccctctgatagccagggaactaggagacagggagggaggaagggcctagagggagactcagggctcctgtaaggaaatgtcactcaggagacgcagggaaccgtggtgggtctcagatccagatccaccatgaactttttctatttcctattttaagtgaggtatgtgtatctatgtgtgtgtgtctgtctctgtgtgtgtctgta

SEQ ID NO: 624960 - DNA, 575 bp, Homo sapiens
accatattggtcaggctggtctcaaacccctgacctcaggtgatccacccacctcagcctcccaaagtgctgggattacaggcgtgagccactgtgcccagccttacttccaccattgactaataggaataacgctgcaatgaatatgggctgaaaaattacatcttcaagactctgctttcaattattttggagtagatacctaacagttgaattgctggatcacatggtaattctatctttaattttttgaggaaccatcatactttttcctcaactgtttatcattttacattcctgccagcagtacacagggttccaatttcttcacatcctcaccaccacttgttattttttgggtttttggttcgtttgcttgtttttcatagcagcctctttatgggtatgcagtggtatttcattgtggttttcatttgcatttccctgatgattagtggtgttgaggatttttttttcatgtgcttagtggacatttgtatacwgtttttggagaaatgcttactcaggtcttttggattggttttgttattgttgttgttgagttttaggacttc

SEQ ID NO: 624961 - DNA, 559 bp, Homo sapiens
  misc_feature 13: n = A,T,C or G
tattacacacagnggccattttcataaacaatgcaagccagaaaaaaatgtaacaacataaagtattgaaatgggacagaaactgtcaatctggaactatatacccagaaaaaatatcctttaaaagtgaaagtatcataaaataaaatttagaaaatagaaacaaatttctaaaatgctggcagattagatattcataaaataaaatttaaaaaataaaaataaataaaagttaaggtaaaatatagattcagacaaataaaagctgagaaagtttattgccaatagaactgcacaacaagaaatgttaaaggggccgggcttggtggctcacacctgtaatcccagcactttgggaggccaaggcaggtggatcacctgaggtcaagggtttgagaccagtctggccaacatggtgaaaccccttctgtactaaaaatacaaaaaaattagctgggtatggtggcaaatgcctgtaatcccagcactttgggaggccaaggcaggtgkatcacctgaggtcaagggtttgagacccgtctggccaacatggtgaaac

SEQ ID NO: 624962 - DNA, 539 bp, Homo sapiens
tgaataaagcccttccttctttaactcggtgtctgaggggttttgtctgcggcttgtcctgctacaaaaccaggtgattttttaaaaatgttgactgcttcacttagagattgggtttgtggggaatgtaacgcttgttaaggaagaatagcaatagctgggccatcttacaaatcaaccgctccttcagcckatcaattcaaccttataacctggctgcttataagaaagtttaggtactctctgagagatttccttgagacaaccaaactcccatggaaaaccatagatgaggtatttactagtagtcaggttcttattggcctggatttggttcatgatgctgatgaaggtgatccactggagaatgagaaattgatccaaataaatctagataaattctggtgaccagccctgctgttttagaaaactctcttcactctaatattgaaattgccccaaaacttaggagatgttatggcaatgatgctctaggtgccctggattaaagctgacttgttaaggcaatttgctgttgt

SEQ ID NO: 624963 - DNA, 539 bp, Homo sapiens
tgaataaagcccttccttctttaactcggtgtctgaggggttttgtctgcggcttgtcctgctacaaaaccaggtgattttttaaaaatgttgactgcttcacttagagattgggtttgtggggaatgtaacgcttgttaaggaagaatagcaatagctgggccatcttacaaatcaaccgctccttcagccgatcaattcaaccttataacctggctgcttataagaaagtttaggtmctctctgagagatttccttgagacaaccaaactcccatggaaaaccatagatgaggtatttactagtagtcaggttcttattggcctggatttggttcatgatgctgatgaaggtgatccactggagaatgagaaattgatccaaataaatctagataaattctggtgaccagccctgctgttttagaaaactctcttcactctaatattgaaattgccccaaaacttaggagatgttatggcaatgatgctctaggtgccctggattaaagctgacttgttaaggcaatttgctgttgt

SEQ ID NO: 624964 - DNA, 589 bp, Homo sapiens
ctgaattggaatcttttcagcaagctgtgacatgctgtctatctttgggtcctcacaatcctaatgacccctttaagctacaagtctctgtgactgattatttttccaatcagatcatctggcgaagggaggcaacctcttaccttttggggctttgaacccactgttcccctgataaagctaccacacatgcctcttttgaaaagtagctattagcttgctaatgggctcttgtcaaaattgaacacctgacccaaggaggccttgtgactatccagactgatatttccactttggggtgagtcarcttagactcaatgactaataaggtgaggaaaactcaacaagcctcacttttcaaatagaaaaggtgaattcaagaatgcagccagcctagctccagcagcatcatggctttacatgacagaatggcagctatccctaagggggaaaatttattcctcactctgccatctgaagcaaagccactggttccatggaatcctcaattcacatagcttccccaaattcctgggcctgattcacttatatttacactaatctgaaaccaatggtgtccactggtctg

SEQ ID NO: 624965 - DNA, 471 bp, Homo sapiens
gcctcagcctcccaaagtgttggcattacaggtgtgaaccactgtgccccaccaggagtctcatgtcttctatcagcatccatcaaactgtcaccagatgacttgttaacttgcaagtagggtaaaatctcagacttttctcagctcttgatgcaacccctgtgtagtagacatggctgttcccatttcacagataasaaaactgagactcaaagagacttagtaagttgtttttgatgaatgtcacctaattgttctccagaatgcttgtatcaatttaatcaccaacagaatgtaatgtatggatgtgtccattttttgcatccacaccaatattggacattatgttttttaaaaaatcttttccttgtaatgaaaaaaatggtaactcataattattaaatatgaatttttaaattactattaaaggtgaatttttttttgctccatgatctcacgtggtcaagaatt

SEQ ID NO: 624966 - DNA, 586 bp, Homo sapiens
ttggtacaggctttttggaaaactagttggctctatctactgaagctgaacctatgcattccctatgaccagcaactccacttcttggtatatacccaagaaaagtgcatatgtatattcactaaggacattatgaaaagcattatttgtaatagccccacactgaaaaaaaaaaccaagagcccacaagcagtagaatgaataaataaattgtagtatattcatacattaaaatgtagcacataaaggagaattaactacaaattcacgacaacatggatgaatctcacaaacctaatgttgagcaaaagaatccagacacagaggagtatatactgaaagatcccacttatttaaagcagaaaagaggcaaaactaataatcaggagagtggttatcatccttgggcatagtgactggaaaggagcacaaaagaagcttatggcagggaggggagaggttgataatgtactgtgtcttgatctgagagctggttatatgggtgtctttactttgtgaacatttatcaagatatacacytaagatatgtatgtatgtatattgtactaaaataaaacattttgaa

SEQ ID NO: 624967 - DNA, 594 bp, Homo sapiens
gaaaacatttctcactccctgattcccaccctttctctcaccaatttgcarcagaataaacatatgctcctcaacttacaatggagttcagtccggttaaacctatcgtaaagtcaaataattttaagtcgaaccatcctaagttggagtccgtctgtattggacacaattatgcaacgtggaatggctacgcatgtggtttagacatgtattgaaacacagaattgagcacgggaatggttaaatttcctaactgctgcttgaaaaaactcccgtggtttcaggagaaaatcaggttccttgtatacctttgcatgaaacctaacttgatgcttttgcttttatacctctgaactgatcacattgccctcaaggaaaaatcaagctatgaaaagacttgctctaaaggtgaggctcacctcatcctgtctacctaaggtatccatgccttgaaggtgccatcactacaatatgagataggatggcagaggacaacgttcaagtgcttgggttctggactcagactgacgtggatttgaatccctgctcttccatttatcagctgtgtgatcattggacacattacttagttac

SEQ ID NO: 624968 - DNA, 594 bp, Homo sapiens
gaaaacatttctcactccctgattcccaccctttctctcaccaatttgcagcagaataaacatatgctcctcaacttacaatggagttcagtccggttaaacctrtcgtaaagtcaaataattttaagtcgaaccatcctaagttggagtccgtctgtattggacacaattatgcaacgtggaatggctacgcatgtggtttagacatgtattgaaacacagaattgagcacgggaatggttaaatttcctaactgctgcttgaaaaaactcccgtggtttcaggagaaaatcaggttccttgtatacctttgcatgaaacctaacttgatgcttttgcttttatacctctgaactgatcacattgccctcaaggaaaaatcaagctatgaaaagacttgctctaaaggtgaggctcacctcatcctgtctacctaaggtatccatgccttgaaggtgccatcactacaatatgagataggatggcagaggacaacgttcaagtgcttgggttctggactcagactgacgtggatttgaatccctgctcttccatttatcagctgtgtgatcattggacacattacttagttac

SEQ ID NO: 624969 - DNA, 602 bp, Homo sapiens
ccacactaatgattcaaacttttcccccatttttactgacttaagcatccctaaaactaaaagtgcttttctccaaggccctgcaagctgaaactagaaaatytgacatacactttgagagaaatgactatagcaagtttgatatgaacagctttcaggcttgttgaggtacagactcgtgaaaaggttcactggaacacctgatgcaaactccacaccaagaacaatctgtccaatcgtcactatctgctctcactttagccaaagatgcttcaagcagaacatctaataatctcaactgactgccctctaaacttgaaagctgagtttatactctgttctaaccattaacttgtgtttgttgttgttcccatagaaatgtctcctgataaatatctgattgcttgaatcatacataggactaactctggtagaagcccctctaaaaatttactgcctaaaatgagaaacaacagttagctgtctgactcgaccggcctattctcagtcctgagagactggttcaagccttgtataagacaatccaacaacccagtttctgcactgtgaaactactccttggggaagattcatactgagga

SEQ ID NO: 624970 - DNA, 510 bp, Homo sapiens
tctgttcctaatttcctaatgcaaaaccaaataccacatattctcacttacaagtgggagctaaacacatggacataaagacgggaacaatggacactggggcctacctgagggcagagggtggaaggagggtgaacattgagaaactacctatcgagtactatgttcactgcctgggtgaacatgaaataattkgcaactgaaaccccagccacatgcaatttaccaatgtaaccaacctgtacatgtgtcccctcaacctaaaataaaactttgaaggaaaaaaataagaaataagtaattttttttgcagagagagtctcactatgttgtccaggctgctgtccagaaaaaaaaaatctctcatactttagtagaaaacaactgtttgtctcttctgagatggaccctttcctgccctctcttcttatacctctcccattcctttccaacattatcttctttctctctctcacccttttctttttcttctctatcctctaactaccc

SEQ ID NO: 624971 - DNA, 510 bp, Homo sapiens
tctgttcctaatttcctaatgcaaaaccaaataccacatattctcacttacaagtgggagctaaacacatggacataaagacgggaacaatggacactggggcctacctgagggcagagggtggaaggagggtgaacattgagaaactacctatcgagtactatgttcactgcctgggtgaacatgaaataattggcaactgaaaccccagccacatgcaatttaccaatgtaaccaacctgtacatgtgtcccctcaacctaaaataaaactttgaaggaaaaaaataagaaataagtaattttttttgcagagagagtctcactatgttgtccaggctgctgtccagaaaaaaaaaawctctcatactttagtagaaaacaactgtttgtctcttctgagatggaccctttcctgccctctcttcttatacctctcccattcctttccaacattatcttctttctctctctcacccttttctttttcttctctatcctctaactaccc

SEQ ID NO: 624972 - DNA, 612 bp, Homo sapiens
aagggcaacaaaagaaaaaataaataaattggacttcatgaaaatgagaaatgtttgtgcttcaaagaacactatcagaaatgtaaaaagacaactcacagaataagggaaaatatttgcaaataatatacttgataaggaagttatctagaacatatttaaaaaaatcttacaactcaaagataaaaagataacccaatttaaaaatgagcaaagcatctgaatagacttttcttcgcagatgtacaaatgattaataagcacataaaaagatgctcagcatcattaattataagggaaatgcaaatcaaaaccacaatgagataccayctcacacttattaggatggctataaaaattagataataccaagtgttggtgaggatgtggaagaaatgaagagcataacattcatacactgctgatgggactgtaaaaatgctgcagccactttggaaaaggctggcagtgtcttaaaaaagataagcacagagttaccttaagatccagtaattccgcttccagttatatacccaagagaagtaaaaacatatatctacacaaaagcttttacatgattgtttattgcagcgtcattcataatggccaaaa

SEQ ID NO: 624973 - DNA, 557 bp, Homo sapiens
ttccttcctcgaccttccccactcctaaggagattcagcattgctctatttagccaaggtcttttaaggcctgtggcagaggtttttggactagggtctatgaatargatcaagtggttcataaaacctctaaaattctaaataataatttatgaatgtgtggatctctacatttttctagggaaaaattctacagctttcatcagattctcaaaggggttcatgaccagaaaaggttaagaatcactcactgaagggtccttctctgggatttaggccagccagcagtcctgaactgccctaattgaaatgtaactggataacttagttgaggcaactatttctttagaacttttcttggtgctatgaacagaccggcttgagactggctttggggcacctttttagtattatataatgtacctaaatcctacctagtcttgctctgctgccatgacttacgcggacctgatattgcccattactatgatggtcgtttcctgcctcatcctggatcctgactagatctgtggtagtatcactattatgttgatgtc

SEQ ID NO: 624974 - DNA, 557 bp, Homo sapiens
ttccttcctcgaccttccccactcctaaggagattcagcattgctctatttagccaaggtcttttaaggcctgtggcagaggtttttggactagggtctatgaataagatcaagtggttcataaaacctctaaaattctaaataataatttatgaatgtgtggatctctacatttttctagggaaaaattmtacagctttcatcagattctcaaaggggttcatgaccagaaaaggttaagaatcactcactgaagggtccttctctgggatttaggccagccagcagtcctgaactgccctaattgaaatgtaactggataacttagttgaggcaactatttctttagaacttttcttggtgctatgaacagaccggcttgagactggctttggggcacctttttagtattatataatgtacctaaatcctacctagtcttgctctgctgccatgacttacgcggacctgatattgcccattactatgatggtcgtttcctgcctcatcctggatcctgactagatctgtggtagtatcactattatgttgatgtc

SEQ ID NO: 624975 - DNA, 276 bp, Homo sapiens
tggcttccactgtgggcaccagcgtctggataaagggaatgtggtggtgcccaaaagctcagagacaccaggaactgcagagtccccaaataggtrttacagcatgtcacagccatggctcagggagcaccaaggtctgggcttccagaagggctgcagctcttctctacttcttgttatctacagtatggtgagtggggggacatgtttcagcccatttgtgttacagctctttcagtcccaccaccttgctctggcccgtggctcatgggctgg

SEQ ID NO: 624976 - DNA, 276 bp, Homo sapiens
tggcttccactgtgggcaccagcgtctggataaagggaatgtggtggtgcccaaaagctcagagacaccaggaactgcagagtccccaaataggtattacagcatgtcacagccatggctcagggagcaccaaggtctgggcttccagaagggctgcagctcttctctacttcttgttayctacagtatggtgagtggggggacatgtttcagcccatttgtgttacagctctttcagtcccaccaccttgctctggcccgtggctcatgggctgg

SEQ ID NO: 624977 - DNA, 276 bp, Homo sapiens
tggcttccactgtgggcaccagcgtctggataaagggaatgtggtggtgcccaaaagctcagagacaccaggaactgcagagtccccaaataggtattacagcatgtcacagccatggctcagggagcaccaaggtctgggcttccagaagggctgcagctcttctctacttcttgttatctacagtrtggtgagtggggggacatgtttcagcccatttgtgttacagctctttcagtcccaccaccttgctctggcccgtggctcatgggctgg

SEQ ID NO: 624978 - DNA, 359 bp, Homo sapiens
aaaaaacacctgggtttagagctgcttgtaggcaactaaggggactaacttgctccactaacttttactaaattctcaaatgtcatggtaaataaaaatgacatatatttgtgagaagagaaggtgcaggtaatgaagccagtgaagccacaatttaagaaatagtgasaactcctttccacatgcaagtctcctctgcatcagatgggacttcttcatcaaatatgttattagaaaaacaaaaacctaaaaccaaaagcattgagtacagattggaaagtctgaagatgaatgattagaaagccagccacttttttttcttttttcttttcctttttttttttttttgagatgggggt

SEQ ID NO: 624979 - DNA, 567 bp, Homo sapiens
cagtaataataaaagtctgtttagtcaaggagatcagcaccagaaacatacagwctggcacatgttttcataggcgttctgtccactctccccgtcccaccagtggaggtgcatatgacccagctagcttcttggaggaggcacctgaatggcatctttagtgatcagtcagatgcagccagttgagaaggaagagggaaggtgttccaggtagtatgcaacacgaggcctggagcctgctattttcagaaagttgataggaattacacatgctacagcatggcgcatgggcagggggccgtgggatgggagcctgcaccaaatgggccccgatgcgtgctgtgatcttgcactttagcctcagggctatcaccaaatatttatgctgtaaaaagtgtaccatgcatttaagaagggtgatggagtttagggcaaatcaaaaatagcaagagaggctgggcacagtggctcacgcctgtaatcccagcactttgggaggccgaggcgggtggatcacttgaggtcaggagttcaagatcagcctggccaacatagtaaaaccctgtc

SEQ ID NO: 624980 - DNA, 597 bp, Homo sapiens
ggggtgagggcttccaggtcatagatggagtcaaagattttcttattggaaattggctgaaagagttaaattactgtctgaagacttagaatcaataagaagggatgtctggttaagataagggrttgtggagaccagggtgttagtatgcaaatgaagcctccaggtagcaggcttcaggcttcagaaaactgattgtaaaggtttcttattagacttaaagagtctgttctatcagtcttaaggtctgtgttcatcttaatgctggtcagctgggtctgaattccaaaagggaggagggtatcatgaggcatgtctgattcgcccttcccatcagggcctgaactagttattcaggttaattttggaatggccttggccaagaggaggggttcattcagatggctgaggggcttagaattttatttttggtttacacaggcttattataatcaacttacagcaatcttctccctcccaacctagcaaaacacacacacttgctttgcacatactttgatcacatcttctccctcgggcagattttcattgtcatttaccctgattcacctgcactaagaggttccttaggatcca

SEQ ID NO: 624981 - DNA, 409 bp, Homo sapiens
ttgaaagagttaagttattgtctaaagacctggaataaacagaaaggagaggagtgtttgggttaatatgggggttgtggagrcaaaagttcttatgtagatgaagtctcatagtctcataggtggctgcccccaaacgcaatagatggtcaatgcttcctatgcagaccgttaaaaggtgctagactctcagccaatctcttcagtattaggaaaagacctggaaagggaaaggattctctatggaatgtaaatttctcccaaaagaaacagctttacaaagctatttcaaaatatgtcaaagggataaaatactgtgatttgttttcagtgcctgctatggaccatatgatgctacagtagagtcaggttggaatttggtatcttactgttctgtcagtcttaggac

SEQ ID NO: 624982 - DNA, 598 bp, Homo sapiens
gttttcagtgcctgctatggaccatatgatgctacagtagagtcaggttggaatttggtatcttactgttctgtcagtcttaggacctttatttttttttaacttttattttaggttcaggggtattacacgtgcaggtttattacgtaggtaaaactgtgtgtcacaggggtttggtgtacagatcatcacccaggtagkaagcgtagtacccaatgagtattttttctgatcttttctctcccccaagcctccactctcaagtaggccccagtatctgttgttcccctcctagtatccaggtgttcccattgtttagcttccacttatgcatgagtacatacggtatttggttttctgttcctgcattagtttgctaaggataatggcctccagctctatccatgttgctgcaaaggacatgatctcgttctttctcatgtctgtgtagtattccatagtgtatatgcaccacatgttctttatctagtctactaccattgatgggcatttaggttgattccatgtcttgctattgagaatggtgttgtgatgaacatatgtgtacatgtgcccttatggcagaacaatgtataca

SEQ ID NO: 624983 - DNA, 643 bp, Homo sapiens
ttttccccaccaattcacaaagcaaatgcaacacagcactggatcaaatgacagatttgatttcaattttgttggcagtaacttctgtgtttaattactcattgtgttaaaagctaaagctggttattcctcgcttgtcacctgcagtataaaaatggaactatctaaaacaaaaacacttaattactttccttctggagaaggtttgaatgaatcagaagtgtcacaaagcaaattttcactagggagcttgacagatgaagaaatcaaacaggctttcagctctgtgtactttcagtctttctgctcattcaagtatgtgtgttccattcattaatttcttcatttcacaaatatttattgctatatatcaagcattgggcagtaatggttagaagtcctaaatatcaggcataatatcaaatttaagtacaaaaatgttttccaaatcctgttcagatttgtttagagatayctgcctctttgaaatatactattttcagaataattcagagtttgccataaactcccacactgacttcctcacatttatttcagccaagcaaatttaaacagaagttgatgcttttcctacacaatttgcaatgacatggcatgataccccatatctaaataatatgct

SEQ ID NO: 624984 - DNA, 465 bp, Homo sapiens
tttagtaataaagagatttgtggaggaaagggaaaatgattttttttattgttggaacaaaaaacggtctgcttaaacccaataatttgtctgtgtttaccgcaaccatctctgtggcttacaagaatgagttcatgactgtctgaattccaccaggcagtggtgacaataatttattttttaaccttgtgggaacttcacatgggctgactcccctttgaccccgcacccatcacaagatgattttttcctagaagttgcctctggggctgggcttctggagatgaaccccattctctctatgcyggataaaccaggcttctgacatcctgcctgtggaatatttataaaaatgagcgccaaggaattcagctgtggtttcttgcaatgcctggtgtggtgccagctgttgcccagttcagagccctctgtgcttgagtgaattcttttctgactttttccggc

SEQ ID NO: 624985 - DNA, 465 bp, Homo sapiens
tttagtaataaagagatttgtggaggaaagggaaaatgattttttttattgttggaacaaaaaacggtctgcttaaacccaataatttgtctgtgtttaccgcaaccatctctgtggcttacaagaatgagttcatgactgtctgaattccaccaggcagtggtgacaataatttattttttaaccttgtgggaacttcacatgggctgactcccctttgaccccgcacccatcacaagatgattttttcctagaagttgcctctggggctgggcttctggagatgaaccccattctctctatgccggataaaccaggcttctgacatcctkcctgtggaatatttataaaaatgagcgccaaggaattcagctgtggtttcttgcaatgcctggtgtggtgccagctgttgcccagttcagagccctctgtgcttgagtgaattcttttctgactttttccggc

SEQ ID NO: 624986 - DNA, 609 bp, Homo sapiens
tcatctttcatacaaattgcacctcgtcaggcaaaccacaaggggaaatgcatgtttgccttaattctactctggtacattctagcataggtggggtttcccctcactctttgaggaaaataaatgcagagattgtctctgcctggaatgcttgacatagaccaagtcatagccaaatcactcaccctgatgccttcggtgagttattccagtctcctaactctccacccagcatgtctttttctgtggaattgggtctttgttagttccatccaacttcgtgatgaatttcaacccatttcttattttctyagttgtccctttgtggcaaggctgctgttcccaagcctccatatttgttcttttgtttttaatttttttaaagacagggtcttccttgttgcccaggctgaagtacagtgatccaaacatggctcactgcagccttaacctcctggactcaagtgatcctcctgccttggcctcccatgtagctgggagcacaggagcacacctccacgctcagctaatttgttcaattttttgtatagacagggtttcactttgttgcagactggtcttgaactcctggcctcaagcagtcctccc

SEQ ID NO: 624987 - DNA, 618 bp, Homo sapiens
tgttaagactcaataataaaaagataatttgattaaaaaagggcaaaggattggaatggatagtcctccaaagaagatatgctaataactattaagcacatgagaaggtttttactatcattagccattagggaaatgctaattataaccacaataaaaaacactttatacccacaaagacggataatgacagttgtttgtgaggatgtgaagaaattggaatgcccgtgtttccaaagcaactgttttggaaaacagtccagcagttcttcaaacaattaaacacagatttaccttttataacccaatatatccactcctaggcatatccccaagagaaataggatacatacctatacatatacctatacctgtagtcccagctgtacaaaaataataatatttctagcagcattattcataatacctaaagaatggaaacaacccaaatgtttgttaactgaagaagagacaaataaaatgtggtttatccatacagtaaaacactattcaggtttaaaaaggattgtagkgctgacatatgctaaaacatggatgaaccctgaaaacatgctaagtgaaagaagccagacaccaaagaacacaaactgtataatt

SEQ ID NO: 624988 - DNA, 514 bp, Homo sapiens
agtgacatgggccccctaaaatgtgacttgtgtgaggacagagacttttgtctggtttgtgaactgctgttcatcttcagtgcctaggatatattaagtgctcgataaatatttcttgaacgaataaggcaaataatgcgtatgctccagggaaaatgacaaggcaatgagttcttttccaaaggcaactttatccctcayagacacccccctgccctgcaatctgtgatcgtaatttctgctggctttgtgcaggctgttccacatgcctgaattggtttacctccttctcaaatacctctttgggaaagattttcctcattaagcagtgtctgatttcaatataggactcccttgcaaaatcttccgtgcattctgatctcctgggcttggcatcactttcacaaatccgctgcccagggaccatgtgttcacaaagacacggcttactggcccgtatggtaagctaattgatgtggtaagccctgaaggcaggattatttttcagccaggc

SEQ ID NO: 624989 - DNA, 557 bp, Homo sapiens
accagaagtcctacataacaaaaaatgctaaagtaaattattttaagtagaaaaaataatcaggtagaaatatggatatacacaaaggaataaagaacagtggaaatagttactacctgggtaaatacataagagctttctccttattayttaagcttttaaaagagaagtgacttctcaaacaataataacttatatggagttaatcacatatgtaaaagtaaactgtacaacaatacaaaggccaagatggaagtatcctattgtaatgttcttatatgatatgtgaagtgatataatatcacttaaaggtagactatgataacttaaagatgtatactctaaatagtttgttggtttgttttttgagacacagtcttgctctgtgcccaggctggagtgtagtggtgtgatctcgtctcactgcaacctctgcctcctggattcaggtgattctcatgcctcggcctcctgagtagctgggactacaggcatgtgccaccacaacccactaatttttgtatttttagaagagatggggtttttgccatgttggc

SEQ ID NO: 624990 - DNA, 557 bp, Homo sapiens
accagaagtcctacataacaaaaaatgctaaagtaaattattttaagtagaaaaaataatcaggtagaaatatggatatacacaaaggaataaagaacagtggaaatagttactacctgggtaaatacataagagctttctccttattatttaagcttttaaaagagaagtgacttctcaaacaataataacttatatggagttaatcacatatgtaaaagtaaactgtacaacaatacaaaggccaagatggaagtatcctattgtaatgttcttatatgatatgtgaagtgatataatatcacttaaaggtagactatgataacttaaagatgtatactctaaatagtttgttggtttgttttttgagacacagtcttgctctgtgcccaggctggagtgtagtggtgtgatctcgtctcactgcaacctctgcctcctggattyaggtgattctcatgcctcggcctcctgagtagctgggactacaggcatgtgccaccacaacccactaatttttgtatttttagaagagatggggtttttgccatgttggc

SEQ ID NO: 624991 - DNA, 586 bp, Homo sapiens
cacccggtctatcatatactttataatwaaccagtagatgtaagtgtttccttgagatctgtgagccatgctgccaaattatcaaacctagagagagggttttggaaatcccaattcatagctagaagtataggtgacaatgtggggcatgagattggtgctgaagttggggtcagtgttgtgtgactgagcccttaacctgcgggatctgatgctatctctaggtaaatagtgtcagaattgagttaaattttagcacactcggtgtctgctggagaattgcttggtataaggaaaaacattctcgtatctgatcacagaagtgtgtagtgtgttgagtatgagagtagagtaggagaaagcagtcagtttattttttcctcccatacacacaggtaaagggacctaaatggaagtagtgtttcagtatgtcactgagtgataaaatgtcaatataggatgctgcaataaaatatgtgtatatattttaacacctagagcaacaacttaaaaaaaactatacaaaatgatttatgcaaacacatataaataaaacaccaaggtgacaccctcaaaaatgttcaag

SEQ ID NO: 624992 - DNA, 597 bp, Homo sapiens
tgcctggctagtcactggctttttatccattaaatatatcctgaatgcagtgcaatactcaccacagtagcttgatgtgattcttcccttttaactctgttggaaacattttcacagtcgaagtttgtcttatgtgtacaaatgtgcacaatgttgtctccctgtggcctgctgttctagtaaccagatttttattcccttaactgtgacatttgactgcaatgctgcataaaaggcaccatttggggggagaaaagattttaatcaacatatacctcagctgctctatctcttcttaacatgatggtgggtttcctccaatacaaagggtctcagttcccctatagaatttttcttagcatgtctgtgattacttgaagtgttattcgttaatgacttccraatctttctaccaggttaaggtgatctttgcaatgccaaagatattgaactctacttgggccctaaaatctcattgtccttcttccttgatgtagacattgaagattttaatatctcatttccatctccatcacttgagattgttgagatggttcttgcccacctgggacagaacatcagccaggcagaggaagg

SEQ ID NO: 624993 - DNA, 574 bp, Homo sapiens
atgtctgtgattacttgaagtgttattcgttaatgacttccaaatctttctaccaggttaaggtgatctttgcaatgccaaagatattgaactctacttgggccctaaaatctcattgtccttcttccttgatgtagacattgaagattttaatatctcatttccatctccatcacttgagattgttgagatggttcttgcccacctgggacagaacatcagccaggcagaggaaggaatgtgagcattaaaagccaacaaggctgtttcaaatcagagttctgtcataaatagctgtgtcaccttgagcaaattgcttttttttttctttttttgagatggrgtttcactcttgttgcctagactgaagtgcaatggcacaatctcggctcactgcaacctctgcctcccaggttcaagtgattctcctgcttcagcctcccgagtagctgggattacagctgcctgccaccacactcagctattttttttttttttttttgtatttttagtagagacagggtttcaccatgttgaccaggctggtctcgaactcctgacctcaggttatcca

SEQ ID NO: 624994 - DNA, 535 bp, Homo sapiens
cccagagatgtaatttaatgtctgtcatttggaataggagggaaaatagataaattgttcatgaagagggtgctttaaaattaaacaatacaaccaaggattttattagacagttggtgggaaggatacttctcattaaaaggaaagtcaagtaattagagaacatgagaaacaggataataaatactagactttttggcaaaagtggggaaaaggaaatctgaagttttcagagtaggacacatagaattatccttgataattaactcactcttaaaaaatgtctgccttactttggatgaatgtgaaagaatataaaaakaagaaattgtttagaaattgttggaatccaggagaactttttcattcgtaaattttcattgcatatgtatgtgtgaacatgctttccactgaagccttcttttttttttttttttttttttttttttttgagacaagatcttactatgctgtccaagcttgaattcctgggcacaagagatcctcccacctcagtctcctgagtagctgagac

SEQ ID NO: 624995 - DNA, 590 bp, Homo sapiens
ttcagatgtgcaccattatgcrcatgagtccatccaatgagtgtaggcccagcgttagcatgagattggagatgttcacctgctgtttccacagtcaaccttctttcccttgtgaactgttatcatgattctagaagataaaggtgggcctatttcacacgacatgcccctcaactgaagttagctgctttgttttatggtcagctcaagaaatggtgtctatccaagtgccagaggacagactggcagggagacagggtggcactctccaaggtgtcacaaggaataaatgtggccacaaggaactggatgtatgagtaacagaaagagaaatgtaccgagccatagtgccaagtgctgcagtcagctaagggagagccatgtgtgctgtgcaaatcagtgaagaccaaccaaatgagaacaaactaaggctatttattcagagcttgctatagcaaggagtcagccaacatcatctgcattttggcagggactcaaaggcaggcagaggagtaggagtgctttagagaagaaaaaaagggaaggctttccctgcaccctgatggaagcagttggtatggggaagatgt

SEQ ID NO: 624996 - DNA, 583 bp, Homo sapiens
ggctttgttcagctcaaccaggcagacaagctggagactgaggatggagactgagattcaaaaccatgaggcaggaggtggtgaatctcccaggcactgggggtgctcagaaggaagctggaccaccacttagttggaatggagacaggaggagagaatattcctgagttaaggagagagttgactcattaaccattgacagccttgatattctaggagggcgcctcccaaggggagggaagtgaacatgtaggggcaacttaytggagaattggagaatcagaattgcaagttctttttgtcattgactttgtgccatttttataaaatgcctctggaactgaatgtgcttcctcactctcttttgcatatagcaacagagaggaatattattccatttacaggctttgtacctttgccaaattaagaggaagcttgcctttgtaatcagggtatggtagaaagcacaaagcatctactgcttatgatggtttcttctagatgaacttgtccatttcctgaacaattcagaaaactgaatttagagttgagatatattaagaggcctctgcctaagagtgct

SEQ ID NO: 624997 - DNA, 597 bp, Homo sapiens
cccctcttttgaaattcctctgtggaagctgccctgttgattccattaggtgggaaggggctttatgcagatgtctgctcgtggggttgcattgttgtaattgctgttctaccacccttgctgagtgccatgcttttctcttgtaggtgatgtgccttcaggacttttttggtgatgatgacatttttattgcatgtggaccggagaagttccgttaccaggatgatttcttgctagatgaaagtggtaaggaaaaaaaaagttcaaaaccaggggaaatytgaggcagctttcgaaaatgagctgcaccaggccaagattatgtcaactccaaagctaccaaatcagtttcagatcctcacccagcgtgtcttttccatatcttggatttctttgattttttttttaaatatggaaaacagatgaaatgagaattggaaaagttaaatcatttagaagaataagtaactaatgtctaatttataaccacttaataattaaattgatgttatgtagaaaatgatggtgtggaattctacatttttaatttttttttcacggtttttagctgagggatttgtcatcataaaataattt

SEQ ID NO: 624998 - DNA, 597 bp, Homo sapiens
cccctcttttgaaattcctctgtggaagctgccctgttgattccattaggtgggaaggggctttatgcagatgtctgctcgtggggttgcattgttgtaattgctgttctaccacccttgctgagtgccatgcttttctcttgtaggtgatgtgccttcaggacttttttggtgatgatgacatttttattgcatgtggaccggagaagttccgttaccaggatgatttcttgctagatgaaagtggtaaggaaaaaaaaagttcaaaaccaggggaaatttgaggcagctttcgaaaatgagctgcmccaggccaagattatgtcaactccaaagctaccaaatcagtttcagatcctcacccagcgtgtcttttccatatcttggatttctttgattttttttttaaatatggaaaacagatgaaatgagaattggaaaagttaaatcatttagaagaataagtaactaatgtctaatttataaccacttaataattaaattgatgttatgtagaaaatgatggtgtggaattctacatttttaatttttttttcacggtttttagctgagggatttgtcatcataaaataattt

SEQ ID NO: 624999 - DNA, 539 bp, Homo sapiens
aatttaaattagttccacgccamcttgtgccctcaaatccatcagaacactcatgcaacctttacctccaacaacaggccatccagtacagccaagcctccttcagttttctgccagaggctctcgggtgaaagtcaaacacataaataccagtctgttatttgcctctgtccacagaggacactgatcaagcacttacaatcttccagtgaaacccctattgaggtgaaggggagcatcgcccctcttttggaatgatggaattcacagcaaggctctctcttaaagaatccttctcatagatctgctttctgtctagtaacttaagccttttatgtcctcaaagtgagtaagaagactaaggtctagaactgtttatatctgctttgacatttctggaataggatctgtctcacaattcactttggtatctgatacacatctccttggagtctgggtgaaatgttcattttcaatcctattgcatttgcaactggcttctatgcctaacatatgtagtagttccactaagcaaggat

SEQ ID NO: 625000 - DNA, 562 bp, Homo sapiens
ctccaaaaaaaaaaaaaaaaaagaaagaaagaaagaaatgaggagagcagacatcttcatcgtgttcccaatcttagggggaaagctttcagtatttctgtattaagtatgatattctctgtggagtttttgtggatgctgttttatcagactgtgaaaagttcattctatttccagtttttcttactgtatttattatgaaaggtgttagagtttctcaratggtttttctacttatattgagatgctcaagtgggtttttttccttttttatcaatgtggtattacattgattgatatttggatattgtgatggccaactttccatgtcaacttggaggatgttttggataagattaacattttaattgggaaactttgaataagcagactgccctccataaagtgggcagtcctcattctattggcctaagacctgaaaagagcaaatgacccaccttcttgagcaagagggtctccaacagactgccttctgacttcatctgcactgttggctatactgggtctctttctgctggtctttggactggaactgcaccat

SEQ ID NO: 625001 - DNA, 619 bp, Homo sapiens
ttatcttgtggtaccacacagttcttcttttgtctccttcatcacttgcagggtgcacatcatattccatgccacacatcctttccatttaaaacacaaagtcaatgagatgtcttctggcagacaaggggtgtgatgttgagttccatgctaaaggagtcctagcatccttggaaggtcaggaagaaggggacctgaaaaggcatctggcttcagcctcctcttttatagaggaggagactgaggtccaggagagtgaaatgacctgcatgaggtcacacaaaccaggagacttctggaacccataggcagctggttctttccattaaactttrttactttgatgttgctgaaagaattattgtctgttcaaaaaggtagcattgttttttgctgttggatgtttctttcaaccttgtgttttgttactgctcctaaagaatcagttatgcggccaggcgcggtggctcacgcctataatcccagcactttgggaggccgaagtgggtggatcacctgagatcaggagatcaagaccagcctgaccaacatgtagaaaccccatctctactaaaattacaaaattagctgggcttggtggctcatgcctctaatccca

SEQ ID NO: 625002 - DNA, 516 bp, Homo sapiens
tgcagtcatatttatacccactttttatatgccaattaaaaggcagtttaggcagaaacttccaggttgtgaggttgtttccatggaaaggggtggtaacttatgggtgttatggcaatggtaaactgacatggcacactgatgggcatgtcttacggggaggtgcttccaccccagcctttattggtaggtgcttctgcctctgttttagctagtcctcaatttggtccagtgtccaagtcctgcctccagagtctagtccctcctcctagctcaatatccatggaaatattatctatttggataatgttgttatctttataactatcacagtgtggccaagaagagagataacagaggttaatctctctgataccttttttaagtagtatataattcaaattgccctaaaacttatgttgattataattgaccastgcttgtctaggaattgtaaggatacctaaaaaagtatgtacgtacttttgccagtgacaaaagtaacaacctgaattc

SEQ ID NO: 625003 - DNA, 629 bp, Homo sapiens
ccagagcctatactcaaaacctctattatatgctgttctatattgctgcattgtttaaagtgaattggaatagaaaaatatgtaaacatgagcacgttctcatccaaacaacaaaagcatcttcctgtgctaggtagatgttctgtacataaatggactggaccactagggacattcagagccaatcatgacatcgtaagagaaggccatcagtaatatgagacaagtttgtagaagaaaaaaagaatcatgtcaactcattcctgatttgtgagaaacccaataaataaaaatcaaccattagaaattatttgtggaaagctctgatttttttttggccaggcatggtggcttatgcctgtaatcccagcactttgagaggctgaggcaggaggactggcttgagtctaggggttcaagaccagcctgggcaacatagtgagaccccatgtctacaaattttaaaaattagccagctgtagtggtgaatgcctgtagtcccagctcctggggaggctgaggcagaggatcacttgarcccaggaggttgaggcagtccagcctgggcaacagagaccccatctttaaaataaagtaaacaaacaaatgaataaataaaacaataaata

SEQ ID NO: 625004 - DNA, 379 bp, Homo sapiens
ttttggcctttaacaaattataagacaattaattaaataggagcacttgtgttgttatagacattccccattttcaggatgctttcataaatccctttatttgagctgtgcaactatctgtgaggtagatacggccagtcatgattagtgcccatttttctttgccaataatgggcttaggaaggctaggcratttcctgggggttcactgctctgtcttcagtacctcgcacccagtagttgctcaacaaatgtttgttgaacagttgaatgatcgaacaaagaccataagagttggaatctaagccctttaaaatcagggctggttttatgatcccactctgtcttcaatgtggtgagagagtccagtccatggaag

SEQ ID NO: 625005 - DNA, 590 bp, Homo sapiens
gatcactcccccatgtgtaagctccagagcaagctgtggcctcttctttggacagacaatgtcctgagtggttaactctggaaaccagtgtgcctgggtatcaaaatgagagcctggacatcttatccatacatctcacactcctgctttgtaaaatcattgggaagggggttgttcccttcccacctccatctgcagctggggcatgacagagcatcccccagtcgtggtactcatgaggaagttcttatcactgtctccttcctattcagctgggggcagattcacttgctaggaggagcatctgtcaggaagcaggcaggaaccaggcggcacactcgacagtaaygtgctcatcacctgtcccacaggattacaaaggccatttctgggctcctggctgcctcgctcatttaccccaagacttctgatactctccaaatcttcttcaggtgtctcctccatgcagatgggaaggctggtaggaggtttctgagtcctatagccccatctcaggcccctccgggtgcaaactaggtcacatctctctttccttgaggccccagtggcttcccatattcctgagacta

SEQ ID NO: 625006 - DNA, 590 bp, Homo sapiens
gaattcactttgttacaaacagcaagttcactttgttacaaacagcagactctgggaagaccagagaagcaggcttggatgatccactaccaggaacaatacagccggggagccccacccaatctcaccacaggactgtcctaactacaacacagctaccgccacagccygcctcttggtagaggctccaccacagccaccccagtggaaacaggcacctgcaccgcgtcatacctgcttgccgggagatcactctcctccacgcccagctagctcaccttgcccacgtttacttgcttccaagtcttgtgcatctgatcggtggaagctaggtcatgtgcctgcaggggagtctgcaaagtgtgtttatcttcttttgggggaaggagggactcacaatgtagtcccgtgtctcaatgtggagagataagtgctgcaagggggccgagcatggtggctcatgccggtaattccagcactttgggaggtcaaggcaggaggatcacttgaggtcaggagttcaaggccagcctggccaacatggtgaaaccccatctctactaaaaatacaaaaattagccgggcgtggt

SEQ ID NO: 625007 - DNA, 604 bp, Homo sapiens
tacaaacagcagactctgggaagaccagagaagcaggcttggatgatccactaccaggaacaatacagccggggagccccacccaatctcaccacaggactgtcctaactacaacacagctaccgccacagcctgcctcttggtagaggctccaccacagccaccccagtggaaacaggcacctgcaccgcgtcatacctgcttgccgggagatcactctcctccacgcccagctagctcaccttgcccacgtttacttgcttccaagtcttgtgcatctgatcggtggaagctaggtcatgtgcctgcaggggagtctgcaaagtgtgtttatcttcttttgggggaaggagggactcacaatgtagtcccgtgtctcaatgtggagagataagtgctgcaagggggccgagcatggtggctcatgcckgtaattccagcactttgggaggtcaaggcaggaggatcacttgaggtcaggagttcaaggccagcctggccaacatggtgaaaccccatctctactaaaaatacaaaaattagccgggcgtggtagcaggcacctgtaatcccagctactcggaaggctgaggcaagagaattc

SEQ ID NO: 625008 - DNA, 604 bp, Homo sapiens
tacaaacagcagactctgggaagaccagagaagcaggcttggatgatccactaccaggaacaatacagccggggagccccacccaatctcaccacaggactgtcctaactacaacacagctaccgccacagcctgcctcttggtagaggctccaccacagccaccccagtggaaacaggcacctgcaccgcgtcatacctgcttgccgggagatcactctcctccacgcccagctagctcaccttgcccacgtttacttgcttccaagtcttgtgcatctgatcggtggaagctaggtcatgtgcctgcaggggagtctgcaaagtgtgtttatcttcttttgggggaaggagggactcacaatgtagtcccgtgtctcaatgtggagagataagtgctgcaagggggccgagcatggtggctcatgccggtaattccagcactttgggaggycaaggcaggaggatcacttgaggtcaggagttcaaggccagcctggccaacatggtgaaaccccatctctactaaaaatacaaaaattagccgggcgtggtagcaggcacctgtaatcccagctactcggaaggctgaggcaagagaattc

SEQ ID NO: 625009 - DNA, 464 bp, Homo sapiens
actccctttgtttctcaggtgtcttagttctcatcttgtgataaaaatatataaaatcttataagcctaagataaaaggcagtctttatcttttaatcatgttttaggaaaagtcttaataatatttggtcctttttggcaacagctaatgggatatttgaattctgtagcctttctacattttgtttttaaasgtctcttgtttgattaactaattttagactttttattgtaaaaaactttcaacatatagaaaagtagaaaaaatatttagtgaacatccacttattcacaacctagattaagcaatgtatgcatatctacatgatctttttgccaacgtattttaaagtaaattacaattaaataatttttattcaatgccataaagaagtgagaatttatgtaaatttcctatgtttcttgagacttgtcaagtgatggcttgggtaggaggacacctc

SEQ ID NO: 625010 - DNA, 584 bp, Homo sapiens
ggaggcaggaaatggggttgggggtggggctgttctcttattagtttcccagggtgagacaggcagctgagcttgacttaaagagtgtcacgggatcatttccttttagaactgggagaggagaagggcacacacactccccagtgcatggggtctaagtagtaaaataaaagtaggaatacaacattctaatatggctaataaacatatacttacgtgtctataagatcctagagggaaaggggtaaactagttctaatatggctaataaacatatatttacatgtttctaatatggctaataaacatatacttacatgtttataagatcctagagggaaaggggtaaactaggcctaaatgcaaatttagtttattcattctggcttaattatttgaaggaataattttatcttgatgctaattcagaaacgtggcagcccatggtctctttcatataacatcwtgagaacgcagagaaagaagccagattatttttcttttgcatgagttcatttttttccacctaattcaacaaacatttataaagaaaattctgcatgccaagcacctggtaaaagtaa

SEQ ID NO: 625011 - DNA, 571 bp, Homo sapiens
cattccatggtgtatatttaccacattttctttatccagtctatcactgatgggcatttaggttgattccatatctttgctattgtgaatagtgctgcaatgaatattcatgtgcatgtgtctttatggtagaatgatttatattcctttgggtatatacccagtactgggattgctgggtcaaatgttatttctgtctttaggtctttgaggaattgctatactgtcttccacaatggctgaactaatttacactcccaccaacagtgcataaacattccttcttctccattaccagctcctgattttttttttattttttccataatagccattctgactggcatgcaactctttttattagaaaggaaacctttccttgaagcctccagcagacttcctctaattgactagtaagtactatgtcagattcctgagcccaaggctgaaggggcattctgttagccacggagggagtggagggaatacatcgaggaggcagtcaatcatctttgcctcatctgttgtggccaawatcttgagagcagatctaattggaagtgagggtttg

SEQ ID NO: 625012 - DNA, 574 bp, Homo sapiens
gcagtcagaaatctgaaataagtcytatgagactaagagtgtcagcagagctgcattccttctggaggctctagggcagaacccatttcctttccttgtccaacacctaggggctgtctgcattccttggcttgtgaccacatcactctaacttctgcacattgtcttctctaattctgaccctccttcctcccctcttataaggacacttgtgattacattggtcctaccccaaaaatgtgggataagctccccatcagaagagccttaacctaatcacatctgaaaagccccttttgccgtgtaagataacatattcacaggtgccagagattagaatgtggacgtcttgagggggagattatcctccttaccacaccaggtatttctcctcctccatgttcaatgtcacctgggcccttggtctctggtaagtctcctcctttcttgtgcttatagcctaggggtggcagtggcttcctactattgccaacctctgggttgcctcactgttcccagttggctaatctgcttcttttgtcacccgtgtaacaaattccctgcatcacatttc

SEQ ID NO: 625013 - DNA, 486 bp, Homo sapiens
aggcttcaaaacccattaaatttgccaccaaatgaacaattatttttcccacttattgcctgtactttttcaatgaagtcttgacaaagtgcaagttatgaacattgggaatggcacactagtgatgggtgtgcttgggtgattgcagttgcctgcaamctaggttacaaccaacacatagatacgtggaaactgtggttgtcctgcttgaaacagtgaaaactccccatctttactaagattcctgatatattcctatgtcaagtacatgccgaagatcctatttataatgctggaatctgtgctgggccattctcactctccagagagtgagaaatgtatttcagatgctcttttttgctgactatcatttagaataatttctccatctacagttaaagaaattttctaggaactcgacaaaggagcaaagatcaaattcccaattatactgcttctgtctaattgaggccatcacccaactgg

SEQ ID NO: 625014 - DNA, 452 bp, Homo sapiens
tcggtatctctgtccaggttcccctcatctgtcttacccttgtggctgccctcctgacggttaaactagattcacaagatattgagatgcatgaactgcaatatatcatttgggatttttttgttgcaatcagtggaaactattcctggctaacttaacacaatgaaaaggagacagatggagggaaggagggaggaagagagagaaagagtgagaaacagaatcaaccccaacaatttcctattcttctgtcattctacccaatatttaatttttaggaaacagataggtctagcttgaaccgtgtgtccttgataggaaacttttgctgactatcccaccargactgcatgccacggggataggacatggcctaaaggagccattagaagaagggaaagtgagtgctacacagggaacaacaaacacccaccaaaggaaagcggaggttc

SEQ ID NO: 625015 - DNA, 587 bp, Homo sapiens
ttgttcatttaagatttcatcctgaattggtagtcagctgggaagaatttagatggttgattcttactaaatcttgttctctgcaaaaaaggcattgctttacacaataaatatacgtctatttgattctgaatgtctcaagaagggttgctatttaaaggtttcatcccataaaacactttaatgggtgtttatgaggcagttggcctataactaggaataaaaggtaataagttggctgacagaatcagtaccatattgttcgcaacaaactgaaaagataggacaaacagctgggatttctgctaactgatgtccagtcggtatttggatatctccaatgacatgaaactcactactgctcagcaaccataggaagacactggccagcccatccactcatgcggtgctggaaccctttttttattttaaaatatttaattgacaaaaattgcrtctgttcaaggtgcgatgtgatgcttcgatctagatatatacaggtatattgattaccacagtcaaattaactaacaaatctatcaccacccatgattaccatcatgttgaggggatgaggcagtgaagac

SEQ ID NO: 625016 - DNA, 524 bp, Homo sapiens
ttttcttttgtcttatcacttttctgtacaattattgattttttgttaaggtgctatatgagcccaagttctaaccactcctttgccttaatcgtcactgaatttcccatgtgtatgtgcaatgcacatattaataaacttctctttgtttttctcttgttacacatctgtctcttttcaatgtaatttgcgagactccagctgaagaaccaagaaagggaggkaaaaagaattattcaatatctcaatatcatgtcacctggaccattaccaatgtggaaagcaagtctctcagtattaaagggggaagtcaggttacaaaagggtaggtattttgtgagacacaaatataaagaaaggtggattcctgaatatcctcaatggttacctgagttttacaattttggtacttagcaaatactgatttctaacaattaaaaacacaaagaggtacaagtttcctaagtacccattttcaaaagatgctgtaacctatccttgtactataatgcagtacaaaagaa

SEQ ID NO: 625017 - DNA, 586 bp, Homo sapiens
tatatttcaaagagaggaaaaagtacttacactaattaccaattttctaaaagtaaatgttcgaagaaaaagggagggaaatctcatattttcaacaggaagtagtaaaccttattttaaatttgtatttgtcctgacagtccccaaacattacaaactcaacgtgtcggtaagacaaggctgagttaactgctggccacagtaagggacagcatgacctggcaaagctttaccaatggctgggagcaaaagscaaggtcagtttattgagaactggaagtctgactcaaggaaggtgtttcaaagcgggctttagttagtattgagcaagaattggtggaaacagcaagatttcgaggagtcagcgaatcttagggaatcaattgtgctttccccgaagagtggatgggtctctggggaagttctgtagtgaacaaagctttcgcccgaatgggaactcctggaaataaagccctgcagtaaagacggcagggtgcggtcccggctcctggcgcgccgagccccccagcagggcgggggcaccgcggaagaagcgccccagaggagagcgccgcgccgagccccg

SEQ ID NO: 625018 - DNA, 586 bp, Homo sapiens
tatatttcaaagagaggaaaaagtacttacactaattaccaattttctaaaagtaaatgttcgaagaaaaagggagggaaatctcatattttcaacaggaagtagtaaaccttattttaaatttgtatttgtcctgacagtccccaaacattacaaactcaacgtgtcggtaagacaaggctgagttaactgctggccacagtaagggacagcatgacctggcaaagctttaccaatggctgggagcaaaaggcaaggtcagtttattgagaactggaagtctgactcaaggaaggtgtttcaaagcgggctttagttagtattgagcaagaattggtggaaacagcaagatttcgaggagtcagcgaatcttagggaatcaattgtgctttccccgaagagtggatgggtctctggggaagttctgtagtgaacaaagcyttcgcccgaatgggaactcctggaaataaagccctgcagtaaagacggcagggtgcggtcccggctcctggcgcgccgagccccccagcagggcgggggcaccgcggaagaagcgccccagaggagagcgccgcgccgagccccg

SEQ ID NO: 625019 - DNA, 530 bp, Homo sapiens
acttgaagaaataactgctaaatgattctcaaatttgacaagaaacataaacctacagattctgtaagtttagggaaactcaaatagcttaaaaccaaatatatctatccaagccacattataattaaacttttgaaactaaaagaaaaaaattatgraagtgtctagagaataacaccttttttataggggaaaacaagttgaatgacagcagacttcttatcaaaaacaatggaggccgactaggcgttgtggctcatgcctgtaatcccagcactttgggaggctgaggtgggtggatcacttgatgtcagaagtttgtaaaaccatggaagccataaagtgcacatttttgaaactaaaggaaaagaacaatcaacttagaattatactcccaggaaaactatgtttcagaaatgaaggcaaaatcaaaacgtttccagataggggaaaactaagaaaatttgttgtcagcagacctaccctaaaaaaatgacaaaaggaggttctctaaatagaaaggaaacaat

SEQ ID NO: 625020 - DNA, 490 bp, Homo sapiens
aatttccttaaggtaacagtgtcgtggcaatgactttacttgaattccacaagactccatttcctttttggccacaaaggttcttatgataattccccattctttatgttagcccttgtgagggtaaaatgtgcaccacagaggaagaccatgcccaatcacaaagaagcccaggagtcactatggttagaacagtggagagattacagattggatcttgtgtgatattctttacaaccataagtcatcattttattcatctgagaacaaaaatcttacctgaaaggaaaaccttcctcacaaatgctaaaaattaatgataatgccaatagactccctttattgattaattcaaccaaacactgagtaactactgcattcaagacagaaagaaatttttttttwaaaaaaatgagcccttcttgtaaaggagaatatcttcacccaaagatggttttctaataaagtaatctgtacttcctaacatgga

SEQ ID NO: 625021 - DNA, 581 bp, Homo sapiens
aggctgcagtcagctataatcacgccactgcactctaacctgggtgacaaagtaagactgtatcttaaaaaaaaagggagggatgatatacatgtctgtttaggaataattattttaagcttaaacgggattgacttttagtttaagccagattaaaamagattcatttaatccctaagtaaacttcttacagtaaaaacaaacaagacttctccaaaatggagtctaacttaaaagacaggtttgagtagatgaccccttaccacccagctctaatagctacgggcaatggataaccaagttttcttccatctacagcctaactagctcctaactggcagaaacaaatttagaataggtctagggaaactcctataaccaactttagaagagggccaacttcaatagaggtcaaaacttaaattaacttttagagaaaaaaaaaactttatcagtctcaaccagctaaatactgtgatcaataacgaaaattcttaagtttgatggttggcaagaatttggcagctgttttgcctgtagtcatctcaaagaagtagcatcattgatatcaactgtctcat

SEQ ID NO: 625022 - DNA, 581 bp, Homo sapiens
aggctgcagtcagctataatcacgccactgcactctaacctgggtgacaaagtaagactgtatcttaaaaaaaaagggagggatgatatacatgtctgtttaggaataattattttaagcttaaacgggattgacttttagtttaagccagattaaaacagattcatttaatccctaagtaaacttcttacagtaaaaacaaacaagacttctccaaaatggagtctaacttaaaagacaggtttgagtagatgaccccttaccacccagctctaatagctacgggcaatggataaccaagttttcttccatctacarcctaactagctcctaactggcagaaacaaatttagaataggtctagggaaactcctataaccaactttagaagagggccaacttcaatagaggtcaaaacttaaattaacttttagagaaaaaaaaaactttatcagtctcaaccagctaaatactgtgatcaataacgaaaattcttaagtttgatggttggcaagaatttggcagctgttttgcctgtagtcatctcaaagaagtagcatcattgatatcaactgtctcat

SEQ ID NO: 625023 - DNA, 498 bp, Homo sapiens
ctcatttcaggtgtccactgagaccaagtatggaaactgaagtcctactcccattctgcagtaaaaaggcagcacytcccccccctccaccagaacaatgtcaaataaagccagccaaagcaaaaggtttaaatcagatccagagtctcataacatagtatgagaatatctaggtttcagtttaaaaattacaaagattttaaagcattcatgtaaaacaaattcatcaacaaacaattattaacacacttcaaacaaatgaaaaaacccgcctcagcacaaaaaaagagaagaaagaaagaaagaaagaaagaaagaaagaaagaaagaaagaaagaaagaaagaaagaaactaattaattattggtaaagaaacggaagttataaagaaccaagcaaaaattttagaatgaaaaatttgtaatagatgaaatgcaaaggttggtagaaggacccagtagtagaatagagggagagtacagaaataagaatcagtga

SEQ ID NO: 625024 - DNA, 648 bp, Homo sapiens
tcagtgtaaacaattataagtcgaatagaagttcagaaggttgggataagtcatggacaccactgaaaggcagcagcaaataacacatttgttgatactgtggcactttgtcacgtgtatactgttccttttctctttctttcctttatttctctttgtttcttcatttattacatctttaaatacttagtgaatgttactacataccagggactgtcctaagtactagagatacaaaaataaatgataaacaatcaattgtcctcaaggaatttacagtaaaggagaytgacacctaataaatcactgcagttcagtatggtaagtacatatttagaggcaaacaccatgaacagaatgatggttaccagagactgggaagggcagtgggcagtgggagttggaaatgtggggatggttaatgggtacaaaaatatagttagatacaataaacacgatctagtatttgatagtacaacagaaggataacagtcagcaataatttgttgtacattttagagtaactgagggagtacaattggaatgttcataacacaaagaaatggtgaatgatttaggtgatacaaacccaccccatttaccctgatgtaattattatacactgtatgcctgtatcaaaatatctca

SEQ ID NO: 625025 - DNA, 566 bp, Homo sapiens
cccatgcccataaaaatatattttagaaaaggtggtttgtatcattctcagcaaactatcacaagaacagaaaaccaaacaccgcatgttctctcataagcgggagttgaacaacgagaacacatggacacagggaggggaacatcatacaccggggcctgtcgggggtggggggctaggggagggatagcattaggagaaatacctaatgtagatgacgggttgatgggtgcaggaaaccaccatggcacgtgtatacctatgtaacaaacctgcacattctggtatcccagaacttaaagtataataaaaaaaattaaaaaaaagaaaagatggcttacttagcaattatacatatttactrctaaaaaatgaggataatatgttaatgcaaatacttacaaaaccaaaggaaaaactaaatctaccataaaaatgggaagttaccatacctctctcaattactgatagtataacagatgaaaaattagtaaatatgtagacaaggtgaacaacacaataagcttgatctaaaggacatatgtagaattccatatccaactaga

SEQ ID NO: 625026 - DNA, 493 bp, Homo sapiens
tcctctctgttttttttaatatgctttaagttctagggtacatgtgcacaacatgcaggtttgttacataggtatacctgtgccatgttggtttgctgcacccattaactcgtcatttacattaggtatttctcctaatgctatccctccccctgccccccaccccccaacaggccccagggtgtgatgttccccgcccggaacagggtatttcaaagcctaagtgaggttaaaagagtgtccatactggagcacaacccagcatgcaaagtcagtgctgagcagrgtgaggaaggcattcacacagagatgcaacctggcatgcagtatctgagcccaagtggaatgagaagggtgtctatgaaggcaggcagactcatacagggcaacagatcctgtgccaggtgaagagtacctcaatgaaatgaggtggcagcctaaagcagggtgtcagaacctgagcagggtgaggaaggcatacatgcaagggtaa

SEQ ID NO: 625027 - DNA, 441 bp, Homo sapiens
ctagctctatctgctgagatggcctgggattaatgacatcccagtagcaacaatcacacttagcacccagatctcagtttctaaataccattcttggctaaaagaagccagaggtccttgaagaaatgactgattacagagctgggacagaaattgataagatgagcctggaacacccttttgagctagaaagcaaggaagtgctcaagaatgactgaaggcatgtcaaaagaacatataaatcatcttaaagtgaatccctttggccaaattagtgacaatttgaggatcagattaatgatagtaacaagttattgawtaaaataaggaactatgagtccatactggtacagatactgctagacttcccatgggtttacaccccgataaacccattgtacactgaaaatatcatgggtcaaaaatacatttaatacactg

SEQ ID NO: 625028 - DNA, 603 bp, Homo sapiens
ggacagaaattgataagatgagcctggaacacccttttgagctagaaagcaaggaagtgctcaagaatgactgaaggcatgtcaaaagaacatataaatcatcttaaagtgaatccctttggccaaattagtgacaatttgaggatcagattaatgatagtaacaagttattgaataaaataaggaactatgagtccatactggtacagatactgctagacttcccatgggtttacaccccgataaacccattgtacactgaaaatatcatgggtcaaaaatacatttaatacactgaatctagcaaaatcatagcttagcctagcctactttaaatgtgctcagaacacttacactagcctatagttgggcaaaatcatgtaacacaaagcctattttataataaagcattgaatattgtacacaattgggcattttatagacaataagatgtgaaaacacaaaacacaatattcaygtaatgttttcaacgtagtccactgtaaaatattggttgcttaccctcgtgatctcatggctgactgggagctgccatagtccagcattgcagaagagtactatactgcatttcactagcctgga

SEQ ID NO: 625029 - DNA, 603 bp, Homo sapiens
ggacagaaattgataagatgagcctggaacacccttttgagctagaaagcaaggaagtgctcaagaatgactgaaggcatgtcaaaagaacatataaatcatcttaaagtgaatccctttggccaaattagtgacaatttgaggatcagattaatgatagtaacaagttattgaataaaataaggaactatgagtccatactggtacagatactgctagacttcccatgggtttacaccccgataaacccattgtacactgaaaatatcatgggtcaaaaatacatttaatacactgaatctagcaaaatcatagcttagcctagcctactttaaatgtgctcagaacacttacactagcctatagttgggcaaaatcatgtaacacaaagcctattttataataaagcattgaatattgtacacaattgggcattttatagacaataagatgtgaaaacacaaaacacaatattcatgtaatgttttcaacgyagtccactgtaaaatattggttgcttaccctcgtgatctcatggctgactgggagctgccatagtccagcattgcagaagagtactatactgcatttcactagcctgga

SEQ ID NO: 625030 - DNA, 617 bp, Homo sapiens
gtgggtcactacaggtaatggtaagtggtgtcattcccatgtccacctcttgattcctggacctgtgcatcataaccatgggagatacagtaccatatattagacactgattaagagcagaaagagccttccaaagaaccttgcccggccctgcaaagtactgtcatctacctgctactgtaactgtgtcttcaaaaggccattccatactacacagccattaaaaagaaaaaaattgtatggtttgcatcaacatggatgcagctggaggcacagayatcttcacagtttttgctagttcagatgtccatccacatacctcttccccatatttctttgtcatcaatttcccaatcatgttccttgcaagtccctgaccatgtagccaatccactggtcacattccatgaattggtctataattacatgtctggttctttctcctttcaagcaaagtgaaaagccaggtgtattacttcgtgttctgtgcacgaggaggatttcccttcaccatcgttctttagggacgtctcagaaaggggctgtagtgctgtagctgtccactttctggtggtgccttcatatcatgaagaactatctaaaccaggcccaagtgt

SEQ ID NO: 625031 - DNA, 591 bp, Homo sapiens
aaacttccttcttagtactgctttttctgtatcccataggtttggtatggtgggtttccattttcatttctttcaagaaattttaaaaattttcttcttaatttctccctttagccattggttgtccaaaggcatgtttaatttccatgtatttgtacagtttccaaagttcctcttgttattgattcctagttttattctactatggtcagaaaggataattgatatgatttcaatgttttaaattttttgagacttkttttatgacctagcccatatggtccaacctgaagaatattctatgtgctgatgacaagaatgtgtattttgaaattgtttgatgaaatgctctgtaaatgtcagttaggtccacctggtctagagtgtagtttagctctgatttttttgctgatgtttctgtctggacaatctgtccattgctgaaagtggtctgttaaaagtccgctagtattattatattgtagtctatctctacctttagatccatcaatatttgctatacatatttgggtgttcaggtgttaggtgcatatatatttacaattgttatatactcttgctgaattgacc

SEQ ID NO: 625032 - DNA, 591 bp, Homo sapiens
aaacttccttcttagtactgctttttctgtatcccataggtttggtatggtgggtttccattttcatttctttcaagaaattttaaaaattttcttcttaatttctccctttagccattggttgtccaaaggcatgtttaatttccatgtatttgtacagtttccaaagttcctcttgttattgattcctagttttattctactatggtcagaaaggataattgatatgatttcaatgttttaaattttttgagacttgttttatgacctagcccatatggtccaacctgaagaatattctatgtgctgatgacaagaatgtgtattttgaaattgtttgatgaartgctctgtaaatgtcagttaggtccacctggtctagagtgtagtttagctctgatttttttgctgatgtttctgtctggacaatctgtccattgctgaaagtggtctgttaaaagtccgctagtattattatattgtagtctatctctacctttagatccatcaatatttgctatacatatttgggtgttcaggtgttaggtgcatatatatttacaattgttatatactcttgctgaattgacc

SEQ ID NO: 625033 - DNA, 591 bp, Homo sapiens
aaacttccttcttagtactgctttttctgtatcccataggtttggtatggtgggtttccattttcatttctttcaagaaattttaaaaattttcttcttaatttctccctttagccattggttgtccaaaggcatgtttaatttccatgtatttgtacagtttccaaagttcctcttgttattgattcctagttttattctactatggtcagaaaggataattgatatgatttcaatgttttaaattttttgagacttgttttatgacctagcccatatggtccaacctgaagaatattctatgtgctgatgacaagaatgtgtattttgaaattgtttgatgaaatgctctgtaaatgtcagttaggtccacctggtctagagtgtagtttagctctgatttttttgctgatgtttctgtctggacaatctgtccattgctgaaagtggtctgttaaaagtccsctagtattattatattgtagtctatctctacctttagatccatcaatatttgctatacatatttgggtgttcaggtgttaggtgcatatatatttacaattgttatatactcttgctgaattgacc

SEQ ID NO: 625034 - DNA, 591 bp, Homo sapiens
aaacttccttcttagtactgctttttctgtatcccataggtttggtatggtgggtttccattttcatttctttcaagaaattttaaaaattttcttcttaatttctccctttagccattggttgtccaaaggcatgtttaatttccatgtatttgtacagtttccaaagttcctcttgttattgattcctagttttattctactatggtcagaaaggataattgatatgatttcaatgttttaaattttttgagacttgttttatgacctagcccatatggtccaacctgaagaatattctatgtgctgatgacaagaatgtgtattttgaaattgtttgatgaaatgctctgtaaatgtcagttaggtccacctggtctagagtgtagtttagctctgatttttttgctgatgtttctgtctggacaatctgtccattgctgaaagtggtctgttaaaagtccgctagtattattatattgtagtctatctctacctttagatccawcaatatttgctatacatatttgggtgttcaggtgttaggtgcatatatatttacaattgttatatactcttgctgaattgacc

SEQ ID NO: 625035 - DNA, 552 bp, Homo sapiens
tcttgttgtatattctatggattttgacaatgtacagtgttaggtctgattttgaagtctatatgcttggacaagtaatttacttttttgacacccccctgcccaagggtgctgctatactttatgaaaatacaaagacaattagggaaaaaggcagttaggcacaaaaatgtaagggcagttcaggtagggtttctgtattttctgctctttctgatgtttctccctgtgctagatgcccaggcatcacctccagatagtcrcacaagccactgagcttgccacttggttttctcttagagatgagatgccacgcactaccattcatcactagtggcacttacacctgcacaaatggagtgcttcttgactctcgctgtgactacagctgttccagtggctaccacctggaaggtgatcgcagccgaatctgcatggaagatgggagatggagtggaggcgagcctgtatgtgtaggtaaatgctggttgctcccagttgtcctggtgcaaagagccaccccagcattatatcgacaaaagatgtggaatt

SEQ ID NO: 625036 - DNA, 511 bp, Homo sapiens
gcctcccaagtagctgggattataggcaccttccaccacgccaggctaatttttttgtatttttagtaaaaaccgggttttaccatgttggccagtctggtctcgaactcctgacctcaggcaatctgcccacctcagcctcccaaagtgctgggattacaggtgtgagccaccgcacctggccaaggtagttcattcttgcaaataaacattgttgaaagtgtcagttatccatctttcctagaaagtattaatatttcatagtaaattaaatgagaccagcatkccagaagcccttcccagactgttcacaaattgaggctgtgataattaaaatgtgattccattttctgacatggacactgctactaattctttggtttctataaactagaactagctagcacaccatttaaattaaaatctagactaaaccttacataagcatgccaggttgtgcttttgccagtcatgtattgacctgggaaatgctttgataaagtactacctt

SEQ ID NO: 625037 - DNA, 327 bp, Homo sapiens
atggcttttatttccaacaatattaaacttgctgtctaagctttacagttttgatttcctcagcatgacagtatggctgcccatgggcgctgggagaatatgtctctttgtttacaccttgcaagggagacagaaggagagagtaagagagagagagagagagagagagagagagagagagaatatgaatcttctcttcagagaagatctgagcaaacctctcttstagttgcattagcccaaagagtctaggctgacccaaccaagctccagtccctggacagaggagagtagtatttgatagccatcaattgatagatgaattac

SEQ ID NO: 625038 - DNA, 537 bp, Homo sapiens
ttttaaagtctttggtcaaggtcaaagatctaattatatagtaatcaacacagataaatttataaactaaaagacaattaatatatatgtcatcaattacattctcctgtgaatttcaggtggaatttggcctgttgttgaaatgttcatattatagtgactaactgatcatagtttacctggagcattccttgatcatctcagtccttgataaactgcgatgattatttactatcagactattataaaaagatcaataaagtatctcagtgctaaaaaaaatgttttcacaaaaatcyaaactcttgctgatgttttaaaatattacagttcatttgttctttgttaatttcttatttgcagtttgtcataagcagcatcacagccagaggtgccaaaaatctttacaaaaggccatcctcatgtagctccaagccaggtccagtaacaaagagccagaaatttccaggccaactctgaagatttaaaaggttcagatagttcggataagctttggacaagcagccaaattatgga

SEQ ID NO: 625039 - DNA, 591 bp, Homo sapiens
gtggcatacccaattacttcctaatttttttctttttttgataaatctaaatttttgtgtattggatttatgaagaaagaaccatattttagatcagcttaagatatagatactcataggaaacaaaatcatctgttgtcatggcaaaagaaaaaaaggcattcatttaagaatttaggcttaaaaccacaaaataatattatttttgaataagaatatggaataatttagatacctgaaaggactctgtaacacatcaacaaaatcaattcatgaacctgtagaggagaacaggccatgagataataaacatcaatgttggaaggataattaatgtcagattaggctaacatacttcaatgactataayaattaaaaatgaaacatagttgcattttagtggtgttaaatgagcaattgctatgattagaaaattaggtttttttaacaaatataaatactcatgagtcgtaggttgcatgaactaactggtatgtttttaatattaatagcaattgtagctgggctacttccagtcgaaagtaatacgctttctctgagtggcagagggagcaagaaaggaagatctta

SEQ ID NO: 625040 - DNA, 621 bp, Homo sapiens
tagacctctgttcttgagtcacctgaaatcctatatataaactagagcaatggtttctcaaagtttatatctcaactggcaccactggcttcccttccagccacttccttccatctaggctttgtgaraaatactcttagaccactgtgcctgctcaagatctttcatttatctgctttcttctcgatgcctgagaactcttgactggtctttttatcactggaataataagattcaagattctagtgaattgataggggaagagaaatcaaggcttttgacttgctttaattttaggccatctaaaccaatttagcctacttaaaaggaatttcctctgcttatatcctggcttttgaaagttctcactaaaacctgggttaaaccccttatttggcattattctctgcattcatctctctttcagggacttagtggggaagaacaacgagatcagcatgcttgccattctctaattctttttccataagcatcaactggcaccccattttgacaaatactacatcttatgacagccagctccaacgtcactatggcataagaaagtaaaaacactggggaaaaaaagaaaattataaattaacagaaagatgatgaatt

SEQ ID NO: 625041 - DNA, 426 bp, Homo sapiens
gaattcctgtaacttcagctttcctcctccttttacttactttacacaaatataatactgtggcctgaaatatatccataaggttcattatgagagatcccagttaccaactgggaaaagaagaaaagtggaaggaaaatctggggaaccttgagggggatgaggatagcrttcctatgtatgcaggtatcatattttcattagggtttgaaaagattttaatatcttacaccccaaaatatgaaaaaggcattatttaagtaaatacattactaaattagaaggagaatatggaaaccagtgtgggctggatgtgctactgctgacttgactaatagaagcataatgtcttgggaatgttatttgctcaactttttaaacgaggaaaacaatttttgtaaacttgtgcagtgagcttcctggaaa

SEQ ID NO: 625042 - DNA, 473 bp, Homo sapiens
taattttatttgttctttacagggcaaagttaactcttcagggataaatggcctctgattacaagcttctcaaatccaaacaaatcaaatgttaagaaacaaaacatgctacaaatttagggcctcttttgctggctttaggttgcatgagggtcatagtcatcctaagttaacaagygttgtgctgcctacatcactatcagagtaccttaaatacagtggacactcagcaaatatttgaatgagtttaagtataaaaggaaatgtactattttgatttaattctatttgaggagcttgtttttttataatgatgacatcaatttccacatggcgaaagtatccctaaatgttgcatacagacccaaggccttctattcttatttgtgggtattattcaatgttttcctatctgtctaaatcctgtacccttatatattgacaacttttctatttacagttatactgactaa

SEQ ID NO: 625043 - DNA, 577 bp, Homo sapiens
acagttggtgtgaagtgggtgttagagagaagagaaagggaagttrccatcctggtgtgaggcagaaaagtagtgagaccattgagaagtgagagaaaataatgggaaataaggctggagaatttttatgaaaaacaggctaaagatttcataacattatcaataaaatccatttgtaacattggtgtgtggactttatctcgtgatctacatagaaatcatgtgagatgtcggccgaagagtactcaactaaaatattacaatgtatgcactggcattcagatcatacattgatatttatctagattatagaaaaagctcttttttgacaatgtaccactgactttcaatgaattatttagacattgcgttgttatcttaaaggtagtaacaggggtctagatagtaacagaggtggtaaagggaagggtcctgcagatttggccccatacagaaaagtataacatctatgttttcctgagttactatgtgcaaactttcaagacctctatctaaattatctcctgtactagtagggttctagtaggaaagagatggcatggaaaaagtggtaatt

SEQ ID NO: 625044 - DNA, 577 bp, Homo sapiens
acagttggtgtgaagtgggtgttagagagaagagaaagggaagttgccatcctggtgtgaggcagaaaagtagtgagaccattgagaagtgagagaaaataatgggaaataaggctggagaatttttatgaaaaacaggctaaagatttcataacattatcaataaaatccatttgtaacattggtgtgtggactttatctcrtgatctacatagaaatcatgtgagatgtcggccgaagagtactcaactaaaatattacaatgtatgcactggcattcagatcatacattgatatttatctagattatagaaaaagctcttttttgacaatgtaccactgactttcaatgaattatttagacattgcgttgttatcttaaaggtagtaacaggggtctagatagtaacagaggtggtaaagggaagggtcctgcagatttggccccatacagaaaagtataacatctatgttttcctgagttactatgtgcaaactttcaagacctctatctaaattatctcctgtactagtagggttctagtaggaaagagatggcatggaaaaagtggtaatt

SEQ ID NO: 625045 - DNA, 596 bp, Homo sapiens
acttagtgtcaaaactaaaagattacttctaaagtaagggggttattttgagttacatagcaacaaactatgggtgatttgaattgataaagacagtgtcacgtttactgtttcttgccaatgttttaattggctaatttactacttaatgttatatataagaggaaaaggtagaaaagtttttcaatgaggtaattatgtagtattagagacaatgtctcacaaaatttctctataggtaaaagaagatatagttattwgcctaaaaaatatatatatatatgaaatgtatgtatgaacagtagaaatgtttaatctgtaatatttccactctactgttactatgacatatgtagtcttcttactgcaaggattaaattttcccacgtatctaatttagaaaatgcaaaagtactttaggattttaagattgttgtattgttaggttttaatctttctctttctttctttctttccacaattctattttgcttctctcgacaggatttcacataaagccttaacataatataagttgaaacttacaaccaagaaaaaattgatattattaacatgtttactatgtaaacagagtt

SEQ ID NO: 625046 - DNA, 596 bp, Homo sapiens
acttagtgtcaaaactaaaagattacttctaaagtaagggggttattttgagttacatagcaacaaactatgggtgatttgaattgataaagacagtgtcacgtttactgtttcttgccaatgttttaattggctaatttactacttaatgttatatataagaggaaaaggtagaaaagtttttcaatgaggtaattatgtagtattagagacaatgtctcacaaaatttctctataggtaaaagaagatatagttatttgcctaaaaaawatatatatatatgaaatgtatgtatgaacagtagaaatgtttaatctgtaatatttccactctactgttactatgacatatgtagtcttcttactgcaaggattaaattttcccacgtatctaatttagaaaatgcaaaagtactttaggattttaagattgttgtattgttaggttttaatctttctctttctttctttctttccacaattctattttgcttctctcgacaggatttcacataaagccttaacataatataagttgaaacttacaaccaagaaaaaattgatattattaacatgtttactatgtaaacagagtt

SEQ ID NO: 625047 - DNA, 616 bp, Homo sapiens
ctatgtaaacagagttattatagtaaactttaagttttgctctgagcttcctttgatccctgaccaaaacaaatcatgataaacatttgtaatataagaggaatatcacttttcttggtgttagattttgaaaaaattaatgtggagtttattagaatggaatcaaactgatgcagtagtcagtgacttcaccactattttacagtaaagacaggaaccgacttcatacagctatttcttgtatygacctctcataaaagctgagggtataacattaaaatggagttcatggaaagctcttttatgaccgactatgataacgtggtccaagttatggagtcctcttgtggtttagcttcctctaaggaaaggactcgtttcatctcgttgcgcgaatgaatggctcattcttcaacagcagttcccaaacacctgcttgaacacattagagtcacccaggagagctaataatgtgaaaatttctgagcccaaatcccagctctgtaggtctgagctgggacccaaagaagtctttgctttaaaagcttctttagatatttctgatatatagccaggtttggaagccattcatagataatttgccctgaatttcatt

SEQ ID NO: 625048 - DNA, 425 bp, Homo sapiens
tatacttgtgggttaaggtgggggaatacaagagaaggacgcaaaggaggctttggattgggaagaagggcagcaatgagatgcggctatagtccaggaatagtcagggaagcagataatttggttaaaatatctcggcctaataagggaactgggcaggtggggataactaaaaaagrgtgcataaaagagtattgtctaagttggcaccagagttggggagttttaagaggtttagaagcctggctgtcaatacccacaacagttatggaggcaagggaaacaggtccttgaaaagaaggtaatgtggagtgggtagcctccgtattgattaagaaggggacggacttaccttccactgtgagagttatccaaagctcggcgtctgtgatggtctatggggcttccgaggtgatcaggcagcg

SEQ ID NO: 625049 - DNA, 425 bp, Homo sapiens
tcttatacttgtgggttaaggtgggggaatacaagagaaggacgcaaaggaggctttggattgggaagaagggcagcaatgagatgcggctatagtccaggaatagtcagggaagcagataatttggttaaaatatctcggcctaataagggaactgggcaggtggggataactaaaaaagggtgcataaaagagtattgtctaagttggcaccagagttggggagttttaagaggtttagaagcctggcygtcaatacccacaacagttatggaggcaagggaaacaggtccttgaaaagaaggtaatgtggagtgggtagcctccgtattgattaagaaggggacggacttaccttccactgtgagagttatccaaagctcggcgtctgtgatggtctatggggcttccgaggtgatcaggca

SEQ ID NO: 625050 - DNA, 425 bp, Homo sapiens
tatacttgtgggttaaggtgggggaatacaagagaaggacgcaaaggaggctttggattgggaagaagggcagcaatgagatgcggctatagtccaggaatagtcagggaagcagataatttggttaaaatatctcggcctaataagggaactgggcaggtggggataactaaaaaagggtgcataaaagagtattgtctaagttggcaccagagttggggagttttaagaggtttagaagcctggctgtcaatacccacaacagttatggaggcragggaaacaggtccttgaaaagaaggtaatgtggagtgggtagcctccgtattgattaagaaggggacggacttaccttccactgtgagagttatccaaagctcggcgtctgtgatggtctatggggcttccgaggtgatcaggcagcg

SEQ ID NO: 625051 - DNA, 425 bp, Homo sapiens
tatacttgtgggttaaggtgggggaatacaagagaaggacgcaaaggaggctttggattgggaagaagggcagcaatgagatgcggctatagtccaggaatagtcagggaagcagataatttggttaaaatatctcggcctaataagggaactgggcaggtggggataactaaaaaagggtgcataaaagagtattgtctaagttggcaccagagttggggagttttaagaggtttagaagcctggctgtcaatacccacaacagttatggaggcaagggaaacaggyccttgaaaagaaggtaatgtggagtgggtagcctccgtattgattaagaaggggacggacttaccttccactgtgagagttatccaaagctcggcgtctgtgatggtctatggggcttccgaggtgatcaggcagcg

SEQ ID NO: 625052 - DNA, 425 bp, Homo sapiens
tatacttgtgggttaaggtgggggaatacaagagaaggacgcaaaggaggctttggattgggaagaagggcagcaatgagatgcggctatagtccaggaatagtcagggaagcagataatttggttaaaatatctcggcctaataagggaactgggcaggtggggataactaaaaaagggtgcataaaagagtattgtctaagttggcaccagagttggggagttttaagaggtttagaagcctggctgtcaatacccacaacagttatggaggcaagggaaacaggtccttgaaaagaaggtaatgtggagtgggtagcctccgtattgattaagaaggggacggacttaccttccactgtgagagttatccaaagctcggcgtcygtgatggtctatggggcttccgaggtgatcaggcagcg

SEQ ID NO: 625053 - DNA, 572 bp, Homo sapiens
ctgtagtcccagctacctgggaggctgaggcaggagaattgtttgaacctgggaggcggaggctgcagtgagctgagatcacaacactgcactccagcctgtgcaacagagcaagactctgtctcagaaaaaaaaaaggaaaaaagaagaagaaaaaacattttgtaacttatatgcttatggaaagtgggggacttgatctcagattatttagagatttagagaaatggcatagaaacataattcacacttttcactgtagcattatccacaacaagaaaataatgaaagaggatggcattccatatatgccatatgtacatgtggagtggctsctgacatagtgttccatacgtgttagtttttatttattcttctctccctttctctctcttctcagatgaaaaatagaatttcagtacttctaaagctcttaatgtggctcaacagttgcagatctctgtactggacatgtgcacttctattgccattttataaccagtatgtgagaggcacaatgaagtggcagaaagagcactgatctactagtcagaatttctcagttactaact

SEQ ID NO: 625054 - DNA, 624 bp, Homo sapiens
aaattctgtcattattgcttcaaatatttcttctgttcgtttctttcctttttttctaatggtattaccattttgcatatgttacacctttcrtaattgtctcactgttcttagattttctgctccaccttttattttttactatttttctctttacattttagttttgaaaatttctatattcagatctttacattcaccaattatttccttgcccatgtttaagctactgatgaacccattgaagacattcttcatttttttttatagtgttgttgatttctagaatttatttttggttctttcttatggtttccatctctctgttcacattactcatgtgtttttcatgttgtccacatttcccattaatttcccattaattatgattaacattaatcaaaattatgtttaattcagttcataattccaaattttctgtcatagcttagtttaattctgatacctatgttgcctctttattctgtatttttgccttctaacatgccttgcagttttttgttgaaatccagttataatatattgagtaacacgaacaataatgtgaaatattatgtttatctgactgagacctagtctgtgtttattatttgctgtagctgt

SEQ ID NO: 625055 - DNA, 624 bp, Homo sapiens
aaattctgtcattattgcttcaaatatttcttctgttcgtttctttcctttttttctaatggtattaccattttgcatatgttacacctttcgtaattgtctcactgttcttagatwttctgctccaccttttattttttactatttttctctttacattttagttttgaaaatttctatattcagatctttacattcaccaattatttccttgcccatgtttaagctactgatgaacccattgaagacattcttcatttttttttatagtgttgttgatttctagaatttatttttggttctttcttatggtttccatctctctgttcacattactcatgtgtttttcatgttgtccacatttcccattaatttcccattaattatgattaacattaatcaaaattatgtttaattcagttcataattccaaattttctgtcatagcttagtttaattctgatacctatgttgcctctttattctgtatttttgccttctaacatgccttgcagttttttgttgaaatccagttataatatattgagtaacacgaacaataatgtgaaatattatgtttatctgactgagacctagtctgtgtttattatttgctgtagctgt

SEQ ID NO: 625056 - DNA, 629 bp, Homo sapiens
tgtaacatatattacttttgttgtactttttgattgctaaatattatattattttttggatacacagtttttcacccactcatcaattgatgaacattgtattgtttccatattttgactttatggataatgtcacacaatcatttgtgtacaactttttgttctgaacactttttttccattttttgctatatatgtaggagtgaaattactggatgatatggtaacgctatgcttaacagtttgagacatcaataaactgctttccacgatatctgcamcatttttatttgcataaatttaaatggtacaagtgccattttgttacatagctatattgtttagtggtgaaatctgagctattagtgtttcatcacctgaataaagacattgtacccattaagtaatttctcatcatctccctccctcccactctcccacccttccaaatcttcggtgtttatcattccacgctatgtccacatgttcacattatttcactcccatttatgagtgggaatatggggtatttttccttctgtttctgagttgtttcacttaagataatgtcttccagttccatccatattgctacaaaatacattatttcattatttttaaggttgaat

SEQ ID NO: 625057 - DNA, 625 bp, Homo sapiens
tttatttttgtataaagtgagagatgaggatctagtttctttcttctacatgtgggttgcaagtttttccagaaccatttactgaatagggtgttttctcccccactttatgtttttgttttctttgttgaagatcagttggctgtaagtatttagttttatttctgggttccctattctgttccattgggctgcatgtctatttttatatgagtaccaagctgttttggtaagtacagccttgtagtataatttgaagttgggtaatgtgatgccttcagttgtgttctttttgcttagtcttgttttggatatgtgggctctttcttgggtccatatgaattgttggattgttttttctagttctgtgaagaatgatgatgctattttgrtgggacttgcatcgagtctgtagattgctttgagcagtatgattattttcacagtattgattctaccatccatgagcatgggatgtgtttccatttctttgtgtaatctatgatttcttcaacagtgttttgtagtttttcttttagagatctttcacctgtttgggcaagtatattcctaattattttatttatttatttatttttgcagctgttgtaagggattatggtct

SEQ ID NO: 625058 - DNA, 574 bp, Homo sapiens
tatatggaagatatatatatggaagatatatatatggaagatatatatatggaagatatatatatggaagatatatatatggaagatatatatatggaagatatatatggaatatatatatggaacatatatatggaatatatatatatggaatatatatatatggaatttatatatggaatatatatatatggaatwtatatacacacatatataatatatatatggaatatatatatatacccatatataatatatatatggaatatatatatatacacacatatataatatatatatatatattccattagctctgtccctctagggaaccccaactaatacaaatcttggtacaaatagtgattcaagaggaacagaatattaaggatggagttctttcattggtttgggggtttctggagttgggtgcttaatataattagtccccaaaatgctaaggactttacttctaatagcgtggcgaacactggtagtccttggcatgaagtgtttagagagttatgcaaaataaatgcatttgaaactcctgattcatagcttgtgagagaca

SEQ ID NO: 625059 - DNA, 549 bp, Homo sapiens
ttagatcacacttataagtgagtacatgaggyatttggtgttcttttcctgctttagttcacttaagataatgacctctagcttcattgatgtagctacaaaaagcatgatcttgttccttttatggctgtgtagtattccatggtgtctatgtactacattttctttattcagtctactgttgatggggatttagatttattcaatgtattttatattgtgaatagtgatgtgatgaatatatatgtgtctttatagtagaataatttatattcatttggatatatataaaacaacgggattgctgggttgaatgataattcagttttaagttctttgtcaaagatcagatggttgtacatgtgcggcattatttctcaactctattctgttccatttgtctatgtgtctgtttttgtaccagtagcatgttgttttcattactgtagcattgcagtatagtttgaagttggataatatgttgcctcctgctttgttctttttgcttagaatttctttggctatttggactcttgtgattccatataa

SEQ ID NO: 625060 - DNA, 529 bp, Homo sapiens
ttctgctctaaaggatcacaactcctcaccagcaagggaacaaaactggacggagaatgagtttgacgaattgacagaagcaggcttcagaaggtgggtaataacacactcttccaagctaaaggagcatgttctaacgcaatgcaagaaagctaagaaccttgaaaaaaggttagagaaatttctaagtagaataataagtttagagaagaacataaatgacctgayggagctgaaaaacacagcatgagaacttcgtgaagcatatacaagtatcaatagccaaatcgatcatgcggaaaaaaggatatcagagattgaatatcaacttaatgaaataaagtgtgaaactaagattagagaaaaaagaatgaaaaggaacaagcaaagcctccaagaaatatgggactatgtgaaaagaccaaacctacatttgactggtgtacctgaaagtgatgggggagaatggagccaagttggaaaacactcttcaggatattatccaggagaactgccctggtagtttttt

SEQ ID NO: 625061 - DNA, 529 bp, Homo sapiens
ttctgctctaaaggatcacaactcctcaccagcaagggaacaaaactggacggagaatgagtttgacgaattgacagaagcaggcttcagaaggtgggtaataacacactcttccaagctaaaggagcatgttctaacgcaatgcaagaaagctaagaaccttgaaaaaaggttagagaaatttctaagtagaataataagtttagagaagaacataaatgacctgatggagctgaaaaacacagcatgagaacttcgtgaagcayatacaagtatcaatagccaaatcgatcatgcggaaaaaaggatatcagagattgaatatcaacttaatgaaataaagtgtgaaactaagattagagaaaaaagaatgaaaaggaacaagcaaagcctccaagaaatatgggactatgtgaaaagaccaaacctacatttgactggtgtacctgaaagtgatgggggagaatggagccaagttggaaaacactcttcaggatattatccaggagaactgccctggtagtttttt

SEQ ID NO: 625062 - DNA, 513 bp, Homo sapiens
gtgggcccataaccagagagagtggtgcacctctcaggtgagcagcatggataagaagctgtagaaagtgaagtctgcttatgcctcaatcttgcagcagcctcaagcagggtggcggagattgtccyaggggtgtgtgggagcattcagtttcccagatccttcctcagtccaatgttggcaatggcagcagccttgtcagtgctgccttggggcaggatctagatccttggtatctaggctctcagaatggttccaggttgaagctgctctgagattggatgcctgtgggattttgggtgggttccctgtctggagcaacacctctgcacaatcactagcaatgacctgtgttaggcccaaggcctgtggtgattgatgggttcttctataagccaagattgctaaagtctgttgcaggagtgtggagtcctgggagcttctccgttactttttccccatgtccaggagcttttcttggtccccagccagcccccatcctggtaagctgct

SEQ ID NO: 625063 - DNA, 513 bp, Homo sapiens
gtgggcccataaccagagagagtggtgcacctctcaggtgagcagcatggataagaagctgtagaaagtgaagtctgcttatgcctcaatcttgcagcagcctcaagcagggtggcggagattgtcccaggggtgtgtgggagcattcagtttcccagatccttcctcagtccaatgttggcaatggcagcagccttgtcwgtgctgccttggggcaggatctagatccttggtatctaggctctcagaatggttccaggttgaagctgctctgagattggatgcctgtgggattttgggtgggttccctgtctggagcaacacctctgcacaatcactagcaatgacctgtgttaggcccaaggcctgtggtgattgatgggttcttctataagccaagattgctaaagtctgttgcaggagtgtggagtcctgggagcttctccgttactttttccccatgtccaggagcttttcttggtccccagccagcccccatcctggtaagctgct

SEQ ID NO: 625064 - DNA, 570 bp, Homo sapiens
tcatgttgaaatctaatccacaatgttggagccagggcctggtggaaggtgtttggatcatgagggtggatcccccatgaatggcttrgggcatctctgtgctgaaaactgagctctcactctgagttgacacaagatctagttgtttaaaagggtgtggcacgtgccccatcacattctcttgctcctgctccggtcatgtgatgtgcctgcccccacttcaccagctgccataagtaaaatcttcctgaggcctccccaaagcagatgccagtgatatgcttcctgcacagcctgcagacccatgagccaattaaactttttttcttataggttaaccattgtcaggtatttgtttatagcgacgcaagaaaggcctaatacagaaaactggtactgagggataaaacattgttgtaaagatacctgaaaatgtgaagctgactttagaactgggtaatgggcagaggttggaagaatttggagggctcaaaataagacagaaaaatgaggaaaagtttggaacttgttagagactgattaaatggtagtgaccaaaatgctgatggt

SEQ ID NO: 625065 - DNA, 585 bp, Homo sapiens
ggggctacgggctctgagaccccagaatggtagatcccctggcagtttacaacttcagtatggaaaagccacagatgcacaacaacctgtgagagcagcacagggtctgaaccctgtaaagccacaggggcagagctgcccaaggcctcaggagtccaccacttgcattagtgttccctggagttaagggcacttgggacatggagtcaaaggagattattttcgagctttaagatttaatgactgccctgcagggttttgaacttgcgtgggacctttcttttggctgatttctctcttttggaacatgaatgtttacccaatgcctawacccctgttgtatcttggaagtaagtaatttgaattaattgattttaagtaaccaattagttttataggctcataggtggaaaggacatgctttgtctcacacgagactttggactttggacttttgagttaatgatgaaacaaaccaagacttttggggactgttggaaaggcatgattgtattttgcaatgtgaaaaggacatgagatttgggggtgtctaggggtggaatgatatagtttggatatttgttg

SEQ ID NO: 625066 - DNA, 568 bp, Homo sapiens
ttacaactgcagtaatgtgatgtgagagttgcagtgccttggatcagggtagcagcaatggaagtggtraaaagtggcctgattctggatatattttgaatgtagagacaaaacagtttactgagggatttgttagttcatgtgagaggaaaacagaagatgaggttggctccaaagttattttattctcagcatttcattgctagtaccaatatggaaagtttggctgctggcatgtatatgcaagcatgcatcccactgccactgccccaataaagcactttggctggcaccagccattaggttgttgctgctcatggactaggaacatctcatcctcccaagtgcagcagttttctaaccttgagaggccagaaaacaaagctgggagtctgatacccatcccccagggttagaccacacagcccagaagtgattaagctgagccctcaccccctgaaatcttccagaaatgaaaccagttgactgaaccctacttacgccacaatgaacttctcaagggcatcaaagaatataaataccaaaaaaaaaaaaaaaacccacccaa

SEQ ID NO: 625067 - DNA, 518 bp, Homo sapiens
tcaactttgcaagataattgatttggtttctttttgtttgaatttactaaatgttctacacccaaatgattcaacaataagggtcaatatagtcgtatgcatagacacagctcaagttgtatacagctatggctagtcttttttgaaagtacagcattcagtattaaattatatttgttgtatgtaataaagaacaagtacacaagagattagaatccacaaatttaaaattctgtttttctaaatattataacttaaatagwataaatccactttacattgtaaataccattgactcttgaacaatgcagaagttggggcagtaaccaccacctgcctccagtcaaaaattcacatataactctttgtttatttgtttgttttaagcaacagtgtcttgttctgttgcccaggctggagtacagtgatgcaatcatatctcactgccacctcaacctcctgggctcaaggaatcttccaccttagcctcccaagtagctgggactactgatgtgtac

SEQ ID NO: 625068 - DNA, 494 bp, Homo sapiens
ggttttatttatttcaaaggtctatcttgagtacatgctggagactcttccactcatatgcctccaccttacctaasagcacatttagtagccaactatagaaatattgtgtccttcttgagtgctggcagatgctcactgctgatccagccgctgtccgccgaatggtgggggagcttgacttcaggttcgctatgaaggcctttaacaaaacctacggaagcaaaagtccaagtagataaaagatgaagctcctatgaagcttatcatgtattacataaaacttaacgtgaattagaagtttccaattcttgcaaagtataaacagtttgaggcttttcctacagctgaactgaagtaccccaaatttgggacactcaagagcagtttacagacatgtgtagtctatttgcttctttataaccttcactcaggggactgctcagcatccatgtcctctccgcaatggtggaggcctcaattctagatacact

SEQ ID NO: 625069 - DNA, 494 bp, Homo sapiens
ggttttatttatttcaaaggtctatcttgagtacatgctggagactcttccactcatatgcctccaccttacctaagagcacatttagtagccaactatagaaatattgtgtccttcttgagtgctggcagatgctcactgctgatccagccgctgtccgccgaatggtgggggagcttgacttcaggttcgctrtgaaggcctttaacaaaacctacggaagcaaaagtccaagtagataaaagatgaagctcctatgaagcttatcatgtattacataaaacttaacgtgaattagaagtttccaattcttgcaaagtataaacagtttgaggcttttcctacagctgaactgaagtaccccaaatttgggacactcaagagcagtttacagacatgtgtagtctatttgcttctttataaccttcactcaggggactgctcagcatccatgtcctctccgcaatggtggaggcctcaattctagatacact

SEQ ID NO: 625070 - DNA, 479 bp, Homo sapiens
ccagttagttggaacagtatatctgaggacctgaacaagtcagagagagcttggttcacacgaagaacagatttctctcctagccgtgrcaataatatattgagcttatttgctaatacagcatccctgcctctccatatatacactatatcatgagaaacttgttttattcatttgaatgttgaatttcctaatctaggaatgggaactagggagctagggatgcaggatcctgggacaggatggggactttttaatctataccttttgttatttgctgattttaaaaaattctgtgaaagtattacataattaaaaattaaatatgtaatgaaccaaatggtagcaaatcccaaacattacaaaatgcacataaaatagggaaacatatcatctgtaatgccatcattcagagatgttcagtcaacaatttttgtgtgtttatatctctctaaacttctaactatgcatttgcatgt

SEQ ID NO: 625071 - DNA, 562 bp, Homo sapiens
aactatttttagaatttcacaaaaattcaaatgaacatttattcccacaagagtgtgctatactagaaataacctataaaacccttttcacagagaagacaatcctcttcaacccctccactcttctccacctccagtccttgaccaccaaccagataactttttaaaaaaaacagattctccaacctgtccctttgccatcctctgccctgtaaccttctgtactttttttttttcatgaatcacctatcattaccaatcatcactctaagggggacagccctcatccgtgcacacactattcagtgcccagggcctgagtattttgaggawcccaagaagcagtgttgtattttgcatgtagtagaaataattaggccattacacccagcatacagggaaacccaccttcttttcacgtcctgcacccctacttgccttacgaataaatttgggacccaattttcctaatagtccccttatcagtaacctgacaaccatgacattttgtttccagaaaaacaaacctccattttctggagaatcacctccattttccaga

SEQ ID NO: 625072 - DNA, 546 bp, Homo sapiens
aaacctgtactagcccaccactacacatgttccagctctagtattttctgtctactgactctgtgaccttgggtcagttgcttattctctgtgagcctcactttcgtaatatacaaaatcagtaattaattgcatatattgccactgttgttttgtggatttaacagtttgtactgccttggttgttgggtagtcagttcctcaaatataggtaacactgtataaatcatagctattatatattttaatattcttaagaaaaatctatcataaacaagagtttgagaaagacattgtgcattagttggtatggtatgctaaaaccctcaggaagagactttgtagaataagaacacttgaagcattcatttgccaaatatttgttagaaacactttataatgcatatcagcagtgtgccacttgctaatctcctcctttttgagttggtctagaaaaggccaagtaagtatcctttttcatgaaatattagaatgactccagggytttctgatggcttttgaattagaacaaaacaaaaaaatcaa

SEQ ID NO: 625073 - DNA, 506 bp, Homo sapiens
tcattgaattcattgtgaaggtgcagattttatcaaaatagttgcatggagtaatgacaaaatggactatcctcttttctgggttgctttatgaaattgtatgtatgctgctggaattgaggctccaaatgtttaagtagcttgtccaaggttacacagctattaactggtgggaatgtgactggaatgcagatatgtattaggataaagctcgagattactataycatgcagaagaagaataaaaaacacagcagactgggtgcagtggctcatgcctgtaatcccagcactttgggaggctgaggtaggtggatcacaaggtcaagagatcgagaccatcctggccaatatggtgaaaccttgtctctactaaaaaatacaaaaattagctgagcatggtggcatgcgcctgtagtcccagctattcgagacgctgaagcaggagaatcgcttgggcccaggaggcagaggttgctgtgagccgcaattacaccactgtactcc

SEQ ID NO: 625074 - DNA, 624 bp, Homo sapiens
ggtgagtacctgatctaagttgtaaatgctgtctaccactgaaaaatgccataacaaacaacagcactcartgaagtaattggttagacaaggcacagtggtagtgtgcgagcataggctcgggagccagaaaaacttgaattccaatcccaaatactatctaatctttggtttactcttatataattgacattaataccaatatgttatcagaattaaaggagatgaagtgtttaacacagggcctggcaaatagatcatgctcaaccaatgctggattacttcagcccttccctttccttttgactctaggcaatgttaagcattaactcatttgaccatagattaaatttccattacaaaaccaagttttgtggttgtttttgtttctctgctttttggtgaagctaaaagatgggggttaaagttcaaagcagttagcaaataatacttatgcaacattagtgaaatatttaataattattgcaaatccaggcatcagaatgccatccccttgaaaatgattgtactcttccttaaaaattaagcattctttcctagttattctaatacgtgaatattaacatggttatgtaaagctctacaaataaaattccattggca

SEQ ID NO: 625075 - DNA, 520 bp, Homo sapiens
agaatcctggaatgctgattgagtcacagagctagctggtgttggagactctaaagcctcaaagaatgtctatcatacgagttttctataataagttatttagtttaattcaaagccactgcctgccactcccctggctttgcttgtctgttgtggccccacaggagaatcctggaactgaaatctctgcctcatttaaagggcagggacagaaggggcagccccagcatctgagcccttcacactgagaatgacaccgtcttacctggaagtgtcctccattgttgctgtyacacttgaagctgcctgttctcacagctacattgtaatcagtcttccctacacaatatttagcattctcaccactgtgcgtttagctatacctactttaatttgcaccttagagctacgtaggttatggctgagccaaaaatgattcttcatcttctgcagtggtttagataacgcagtgcatcattttagccacaatagatttcatatagtaataacttaaatacct

SEQ ID NO: 625076 - DNA, 578 bp, Homo sapiens
aattattttccactcccattttctgaccataaaactatagatgagtaataatgcctaatctataccaatagctctgtgctaatctttgatgttcacataatgtaccagactaataatactctgattctactgtgtacaggagtcatttctcatcttcctggtaaccctgaaaggtggattttattatctctaayttacacaaaggcaaataagctcagaggagtgcaagatcatgtccagagtcacaaaaccagtaagtgatgatcaagggtatttatgaatctagattccattccctgcactgtagctcaaactgtcttgagttctaccagtgtaaaaggtcaaatcgcattgtcttcccaacaaggctatatgatcattgaaggcagagaatgatttagcattcccttgtacctctggtacccaatttaatgttaaccccataataagtatgcataaaatacctggtgactagttcatgaggactcagtttgtatttaaaattcaacataatttgacaaggctgaatctgtaatgatatcacagctagagaaagaatgtattactcagacgttctc

SEQ ID NO: 625077 - DNA, 578 bp, Homo sapiens
aattattttccactcccattttctgaccataaaactatagatgagtaataatgcctaatctataccaatagctctgtgctaatctttgatgttcacataatgtaccagactaataatactctgattctactgtgtacaggagtcatttctcatcttcctggtaaccctgaaaggtggattttattatctctaacttacacaaaggcaaataagctcagaggagtgcaagatcatgtccagagtcacaaaaccagtaagtgatgatcaagggtatttatgaatctrgattccattccctgcactgtagctcaaactgtcttgagttctaccagtgtaaaaggtcaaatcgcattgtcttcccaacaaggctatatgatcattgaaggcagagaatgatttagcattcccttgtacctctggtacccaatttaatgttaaccccataataagtatgcataaaatacctggtgactagttcatgaggactcagtttgtatttaaaattcaacataatttgacaaggctgaatctgtaatgatatcacagctagagaaagaatgtattactcagacgttctc

SEQ ID NO: 625078 - DNA, 519 bp, Homo sapiens
tatcttccaccagtcaagtgctttctttatgccaggtgttctgttttgcaccctacaggcattatttatttratgcccacaacaaccccatgggataggcagacctcatatggtataataatgggcactgaccaaacagaatggaggcagctggagcaaggtcctggagcttgctcttgtgccaggcgctgactttttagttgctagattgtcaggaggtcagggtaatcctagggagaggccaaggtggagaaatggggagaccactggggtgggggtgggggaggcttgaccaggtgttctcaaactttagtgtgcatcagaatcaccgaaaagcttgttacaacatagattatggatgatgaggaggcttgaatccactctctctgaccctgaagacccagctgtttccctcagtttcctgtctgctggcaccctcagggcaagtagagatcttggccagggctggaggtgaagctagcagcacgttggaagctctgcctactcctgctggggctc

SEQ ID NO: 625079 - DNA, 519 bp, Homo sapiens
tatcttccaccagtcaagtgctttctttatgccaggtgttctgttttgcaccctacaggcattatttatttgatgcccacaacaaccccatgggataggcagacctcatatggtataataatgggcactgaccaaacagaatggaggcagctggagcaaggtcctggagcttgctcttgtgccaggcgctgactttttagttgctagattgtcaggaggtcagggtaatcctagggagaggccaaggtggagaaatggggagaccactggggtgggggtgggggaggcttgaccaggtgttctcaaactttagtgtgcatcagaatcaccgaaaagcttgttacaacatagattatggatgatgaggaggcttgaatccactctctctgaccctgaagacccagctgtttccctcagtttccwgtctgctggcaccctcagggcaagtagagatcttggccagggctggaggtgaagctagcagcacgttggaagctctgcctactcctgctggggctc

SEQ ID NO: 625080 - DNA, 639 bp, Homo sapiens
tttgcagcaacatggatggaattggaggtcattatcctaagcgaaataactcagaaacaagaagtcaaataccacatgttctcacttaaaagtgggagctaaacaataagtacacatggacatacagagtagaatagcagacattggagactacagaaggtggaagggtgggagggagggtgtattagtccattttcacactgctataaagaacttcctgagattgagtaatttataaaggaaaaaggtttaattgacttacagttccacatggctgaggaggcctcaggaaacttacaatcatgacggaaggggaagtagggatgacttacatggtggcaggtgagagggagagsatgtgagtgaaggaggaacctgccgaacacttataaaactatcagatctcatgaggactcactattatgagaacagcatgggggaaactgcccccgtgatccaatcacctcccaccaggttcctccctgaatacgtggggattacaattcaagatgagatttgggtggcgacacagagccaaaccagatcaaagggtgaggtctgaaaaattccttattgggtacaatgtgataggtacactaaaagcccagactatttttactacgtaatatatgcatgtaa

SEQ ID NO: 625081 - DNA, 586 bp, Homo sapiens
actaaaaatacaaaaattaaccaggcatggtgacaggtgcctgtaatcccaggtacacaggaggctgaggcacgaggattgcttgaacccaggaggcagaggttgcagtgagccaagattgtgccactgcactccagcctgggcgacaaagtgagactctgtctcaaaaaaaaaaaaaaaggttatrgtcatgaagactacgttttattggaatagaaataaagaactatatcaccatatcaatcaaacagaatgaagagtccagaaacagtctctcaaatatgtgcttagtttattttttgacaaaggtgcaaatgcaattcaatggagaaagcgtaatcttttcaataaatggtactgaaacaactggatatctatatgcaaaaactaagctttgatccatacatcacaccatatacaaaaattaactgaagatatattttcgacctaaatgtaaaacctaaaaaaactgtaaaacttctagaagaaaatgtaacagaaaatctttgtaaccttgggttaggtaaagatttctcttaatataccaaaagcagccaggcccagtggcatgtgcctctaatcccag

SEQ ID NO: 625082 - DNA, 577 bp, Homo sapiens
ctgtaaaggaaaaggatctgtggaataacctcaagaagactccttgtcagagagcgattctcttaagtacattctaatatggggtcaaatataggaaaggtgaattcaaagtctatatttattatatcaaacactggactggaacatgggagacagaacatggtatttttcaatcaacttaatgattcagtcaggtgaactatatggattacaggtttaacagtataaataataaaaaaaccccaaaacagatattaagatttgaagaatgaagagatttaatgggggtgtgtaatgatgatctattcctgcataccaatcacccccaaagtaggcagcctaaataataaacattaaaaaaaaatctcacagttttggagggtcaggaatctgggaggggcttagctgggtggttctggctcagggtctcatgaggttgcaatcaaactgttggtcagggctgtagtcatctgaagccatgactgggactgrtggacccacttccatgcttacttactcacatgactgttggcgtaggccttggctccttacaagtgccagcttcccacacagcaag

SEQ ID NO: 625083 - DNA, 439 bp, Homo sapiens
gttatacatccactcccctctctgagttatttggtcctgcctaagacttgctgccaccaagatctgcattcctgtgttcacaaggcasacattccttgcatcctctgtactctccattgtttcaacttcactgcaaacaccattccccacaatataatgaggccaaggaaagaaaaaactcgcctcagctggcaagcatagggtggaaaaacctgccacacaaatttgcaattatttgacttccgcctggaaggcaggtcggctgggtttatgtcccccaaagttagtatcctcttctgtacaaaatgtggttgagagaagggtgatctccaggtgtttcatctttgcacccttgcttccagcaccacgcccacaggcgcttccagaaaaaagaaaaaaaaaagggagcaaggaagccaggtttttcaacaacgaattc

SEQ ID NO: 625084 - DNA, 439 bp, Homo sapiens
gttatacatccactcccctctctgagttatttggtcctgcctaagacttgctgccaccaagatctgcattcctgtgttcacaaggcagacattccttgcatcctstgtactctccattgtttcaacttcactgcaaacaccattccccacaatataatgaggccaaggaaagaaaaaactcgcctcagctggcaagcatagggtggaaaaacctgccacacaaatttgcaattatttgacttccgcctggaaggcaggtcggctgggtttatgtcccccaaagttagtatcctcttctgtacaaaatgtggttgagagaagggtgatctccaggtgtttcatctttgcacccttgcttccagcaccacgcccacaggcgcttccagaaaaaagaaaaaaaaaagggagcaaggaagccaggtttttcaacaacgaattc

SEQ ID NO: 625085 - DNA, 461 bp, Homo sapiens
aggaattcagaaactttgaccttaggtagggatacaactagttatacatccactcccctctctgagttatttggtcctgcctaagacttgctgccaccaagatctgcattcctgtgttcacaaggcagacattccttgcatcctctgtactctccattgtttcaacttcactgcaaacaccattccccacaatataatgaggccaaggaaagaaaaaastcgcctcagctggcaagcatagggtggaaaaacctgccacacaaatttgcaattatttgacttccgcctggaaggcaggtcggctgggtttatgtcccccaaagttagtatcctcttctgtacaaaatgtggttgagagaagggtgatctccaggtgtttcatctttgcacccttgcttccagcaccacgcccacaggcgcttccagaaaaaagaaaaaaaaaagggagcaaggaagccagg

SEQ ID NO: 625086 - DNA, 543 bp, Homo sapiens
tcttctttctgaattgtcagttgctccactctaagctctactatctttaagtagcatcatcctgaatgtcatataaatggttttgtagatactgtgattaccgtgcagagttataccttctgtgaaatttaagggacttttaatggtaattttgattaaaagtggtttttaccttacttttgaagacagcctcccccactgtcctcaaagtaaggagcgatgataggaacaaccaaaactggagtgagaagaaaacatggataggggagttgagtagaggtgggggaacatgaaaggcgggagtttgtgggttgaagaaaacaagactacaaagaggcattgaactagataatgcaatgcgctgtaatatggctcatctttgccagttatttccaaactctacatttcaggtacagagccagaacttccaatctaaatgtgtcawttgctgtttaatgaatcctttctgacttctggagccacaaagaatatagttctcaattgttactgaatttaaagaatgcaacccttaattgttactga

SEQ ID NO: 625087 - DNA, 498 bp, Homo sapiens
tgctagtgctaagtgtgatcaagttgaatagacagagtagttgttcagatgagttcagagtcttgtgagacagaagacagatatgtaaacagatgaattgatgtaatagaatgtgataactgctcttgaattacgaatgtagatacatatccattatgcatttaatttaatgtaaaaaaatagctgtgatattttcaggaaacccatttctcagtcatcacaagttaaagttgtgacttgattaaaacctgttaaaattcagtggaagcaaaggtatgcgtttacctgtatgctaaaggcacaaaaaactaatctaagyagaaggctggccttttcttttcccaagtattgtgcagatacaattggcttgaacatgtctctaaactgactttcccaggaactggccaggccatctctttctttttggtgcagatcaacctgccagaagtcagaagtaaacttgttttggtttgtaaattagacacgtgaatgatagac

SEQ ID NO: 625088 - DNA, 534 bp, Homo sapiens
tggcactgcttgtgattaagccaccgacctaggcccaggttctaaaggccaagccaagacttcaagatgcccacattgttctccatatcatctcgctgcaaggtactctgtgcctcaaggaaggactctgggtgcccttattgcctctaaattgtcacttaactcttcccacctcctcttgcacacaatctattcaaatgatccccataagttaatggctacctgccataaaaaaaaaatacaaaagaatgagtcaaaggatatttctttgaagtctcatattttctcctaaaaattcatgtaaattttgtactctactccataccataactgggttggttttaatattaaaataatattttaagcaacttagcactgaataaaattgatgctstagtgtgatgaacaacaattttcctgcagctgttagaaaccctggcacactgctacatgtccccatttgaaaagctcagaattacagatgcatatttcataacatgcaaagatgtccaaggcatatcattaagcaataaa

SEQ ID NO: 625089 - DNA, 551 bp, Homo sapiens
tgtcagccaggatggtctcgatctcctgacctcgtgatccacttgcctcggcctcccaaagtgctgggattataggcatgagccaccacacccagcaggatttactttttctgaagacttaattgctagatcaawataactatgttatcatgggttgtctgaggggtaattggaagttaacttatacaaaatgtttcgtaaatggatttttatgtaaaatcatgtcaactacagccactctcctcagtaggtgtcctgagattagtaaattcagtaaaagaaacaaaccctgaatttttttacccaaaagtaaaacggagaagcaatactatgtttacttattcttcaacaactgactctggagcagcattcagaatataggggatgtcacctataaacacaatcccctttaaaatcaatcttcttgtgctcccagattaacgagaaaaaatgccttcggaaaaatactaaaggaatggtacattttgatgtctatttcctaagtgagccactaaaaatcaatttaaatggtttaccataaaaggagcctt

SEQ ID NO: 625090 - DNA, 590 bp, Homo sapiens
agtgccactcagttgggggattttccagcctcaggccactgcccctccttcctctacaagaaaaaaggtacgaagtacaatttcccagtagctcaccagtcatgcttgtagagcataaccgaatggtctatagggaagtccaccctggccaccttccacacttaaagagaagggagatgttcttcctgtactcttggcctcccctcctgaacttgatgtggagctatgacaagcctcctccaggcraagtctggatcaggtggttgactcttgaagcccaccagctgagaggccatccttacctcaaggtcaacaagccagtacctcagctcctgccaaaaaagatccccagggaaagtgaatatcaaagttcaagaacccaacaggttcagggcaagagagtagtgttcccttggtaacccacctccttcaccaactggcatatccactctaccacacccccttttgggggactctcaaattcggctaagcctgaatccagagaagaaccgggaacactcccaaaggcttgccatccagaggccaagcagctttaattttccagctgtgctctcctgagccctgaagac

SEQ ID NO: 625091 - DNA, 590 bp, Homo sapiens
agtgccactcagttgggggattttccagcctcaggccactgcccctccttcctctacaagaaaaaaggtacgaagtacaatttcccagtagctcaccagtcatgcttgtagagcataaccgaatggtctatagggaagtccaccctggccaccttccacacttaaagagaagggagatgttcttcctgtactcttggcctcccctcctgaacttgatgtggagctatgacaagcctcctccaggcgaagtctggatcaggtggttgactcttgaagcccaccagctgagaggccatccttacctcaaggtcaacaagccagtacctcagctcctgccaaaaaagatccccagggaaagtgaatatcaaagttcaagaacccaacaggttcagggcaagagagtagtgttcccttggtaacccacctccttcaccaactggcatatccactctaccacacccccttttgggggactctcaaattcggctaagcctgaatccagagaagaaccrggaacactcccaaaggcttgccatccagaggccaagcagctttaattttccagctgtgctctcctgagccctgaagac

SEQ ID NO: 625092 - DNA, 566 bp, Homo sapiens
aagcccactgatggcccactaggaggccttgtggggcagagctgagaggcggtgctgctgcagcgggaggaggactgcatttctttattttctccccaaatctcaaaagagcaaggtgctgacaaaagagtggtctcaggrgctttgaagatcagaaattgtgaatttgggtttttctttgaaaagagaatgcctttaactttgctccttagtgccctgcctgattgcctgttagcagctctgttctttcttttattcttctccagcagggtcccttaatttggtggcaccaaatgttggatgggcttcgggaagtctgtgaacaccctgagagggcatgtaagagtgtgggcttatgtgtctatacgcattttaatggggatgggcctgtggctttgattagattctcagagaggccagtgggcccaaaggtgttgagaaatgctaatcatttgtctattggaacaaaaaactgttttgaggaagtttgcctggggagttccttatctaaggatggagcttttaatcaaggtgtggatgaatggaaatgaaagacaggagttggg

SEQ ID NO: 625093 - DNA, 522 bp, Homo sapiens
agagtgaaccctaatataaactatggactctgggtgataatgatgtgtcaatgtaggttgattgattaaaacaatagtgaggaaggctgtgcttgtgtggagacaagggaatacatgagaactctgtactttctgctcaattttgcagtgaacctaaaactgctctaaaaaacaatctattaaaaaaacaaccaggctgggcatggtggctcacacctgtaatctcagtactttggcaagccaaggcagatggattgcttgagcccaggatttcaagaccagcctgggcaacatggtgaaaccccatctctacaaaaaattagctgggtgtggtggtgtgcgcctgtagttccagctacctaggaggctgaggtgggaggatcacctgagcccrggtgatggaaatggaggctgcagggagccatgattgtgccactgtactccagccaaggcaacagagtgagaccctatctcaaaacaacaacaacaacaacaacaacaacaacaacaaaaatccaaaaa

SEQ ID NO: 625094 - DNA, 596 bp, Homo sapiens
  misc_feature 402, 403, 404, 467, 468, 566, 572, 595, 596: n = A,T,C or G
aaaacctacctgcctttcagaatcaattgtatcaatcctcatatggaaagcaaatttaaaaaagaaagcattttaaaagaatcagatgtagacaaaatcccaaactatggattcaaatcaattaggagacaaacctctatccatttttttctgggctatttaacagtttgaaaactgctgcaattaattccgtattaattattttgaatttagctatttctattacgtttgttttaggcaagtggtttatttctagttctctaaatctctcagccagttttcaatacccccctttcccctacttarttatttttgggaaaaaagttaaaaagctttatatttattttaccttttatttttaaagttgacaatcaaatgatataatgccaagttcaatatccnnncatttctcccatgtgcccacaaaaaaaagagcctcttgcaaaaaaaaaaaacagaaaatttcnnacttaagtaaaatgaacagaattctacaacaaatcaccatgtaaacattattaatcttcaataattaccagtattctgctactcctggctcttctatncctctncctgggttcttttacccaacccnn

SEQ ID NO: 625095 - DNA, 572 bp, Homo sapiens
aaggtgggcggatcacaaagtcaggagttcaagaccagcctggccaacatggtgaaaccccatctctactaaaaatacaaaaactagctgggcgtggtggcaggygcctgtaatcccagctattcaggaggccgaggcaagagaatcgcttgaacccgggagacggaggttgtagtgagtcaagatcgtgccattgcactccagcctgggcgacgagcaagattcatctcaaatatatgtttagagcattgattaaattacaatagctcatttgtcttgcagtgactctcatgacattcgtcggcttatggtttgaatattttcttcatgggtatttttgtttttgttttacttcccaaataataaaaatttggatttgcttttacttctcaaataatgaaaatttagattaatttcacttagactatttcacatagttgataagttgttttatgtttgttttttagcggagtttaagagagctgtgaaagtagcaacaggacaagaactctcaaacaatattttggacactgtctttaagatctttgatttggatggtgatgaatgtctta

SEQ ID NO: 625096 - DNA, 571 bp, Homo sapiens
tgcttagcacaaagaaggttatcagaacaggtttgtttctgggcgagcacaggaatgaaagagtgtttacagaaggctggaggagggcaggggtgtgtgggggtagcagaggggaggctgtgagctaatccaggtgagagttgagggcaggatgtacacggaggaaggttaaaggagtgagcaaactgggtttccagccacaggtaaygcctctgcttcctgaaccggctccacatcccttcttttcttcctcatcccgccctaaacctgctccctttccttctctcccttcccagagcatcactaaagagtgcagacttgcaattttccctaactcacttgttcctaaagcaagacgtggcccttctgaagttctcaattttgatagttggtagtgtaggggagaaaagatttctcacccagtgcacatttcatagctgaggcacctgtcataaaagacagattagcaagaggaaagcatacacatttatttaagttttatgtgacacaggagctttcagaaatgaaaacccaaaaaacaggacaaactgtgttttttatggacagtcat

SEQ ID NO: 625097 - DNA, 571 bp, Homo sapiens
tgcttagcacaaagaaggttatcagaacaggtttgtttctgggcgagcacaggaatgaaagagtgtttacagaaggctggaggagggcaggggtgtgtgggggtagcagaggggaggctgtgagctaatccaggtgagagttgagggcaggatgtacacggaggaaggttaaaggagtgagcaaactgggtttccagccacaggtaacgcctctgcttcctgaaccggctccacatcccttcttttcttcctcatcccgccctaaacctgctccctttccttctctcccttcccagagcatcactaaagagtgcrgacttgcaattttccctaactcacttgttcctaaagcaagacgtggcccttctgaagttctcaattttgatagttggtagtgtaggggagaaaagatttctcacccagtgcacatttcatagctgaggcacctgtcataaaagacagattagcaagaggaaagcatacacatttatttaagttttatgtgacacaggagctttcagaaatgaaaacccaaaaaacaggacaaactgtgttttttatggacagtcat

SEQ ID NO: 625098 - DNA, 681 bp, Homo sapiens
atctttttgtctatgggagttgataatttgactatatgtctcagtgtgtatctcttcaaagttttcctgcttggagttcattgagcttcttagatgtatatattcatgtttttaatcagatttgggaagttgtcagctattatttcttcaaatwttttgctgctcctttctctatgccttctcctctgggattcctatatggggatttggtatgcttgatgaggtcccataggttcctcaggctgtcttcatttttcttcactctttctttcttttccctagactgggtaattttcaatgtcttatcttcaattttgccagtcctctcttttccttgttcaaacttgctgttgaatccctctattgcatttttcatttcagttattgcagattttgtttggctcctttttataatttctatttatactttcattttgttcagacattgttttcttgatttctattagtgtttattcatggtttcctttagaaaacatattgaacatatttaaaacaatggatttaacatctttgactaataattccaaagtctggtcttctttaggtatggtttctgtgaaattctttatatcctgtgaatggatcatactttcctgttgctttacatgttttataattttttgttgagaactggttattctgagcattatgttgtagtaa

SEQ ID NO: 625099 - DNA, 588 bp, Homo sapiens
tgttgctgctactgaataacgcagagctccggctgctacgcctactgctagaccatctgtttacccagggttttttattaggttaatatttccctctagatactgacatctgtatcagttaaactgatacttgctgctgtaacaggtaaaccttaaaatctctgttgtttgtggagcaataagaatagaatttatttttcatttccataaaagccacgttgagggcggtcagggagggagtgggtgagtagactgtgctttgtgcagtcattgaggattccaggctggcagaagttctgagtcatcagcacatggctcccaagatcctcctgtggatctcggtccatctacgaaacaaagaagcgagagagcacggagaaccgtgtgggagattcttccaggccaggcgtggaagtggcataaacacttctgtccacattctgttgtccagatcacagtcagatggcccccctccccacaggggactgggaaatgtccctcattgggcygccacttcccagcagcagctctgttgtgactattaggagttcactatatattctgattactcatcccttatcaggtata

SEQ ID NO: 625100 - DNA, 602 bp, Homo sapiens
aggtgggcagcaggtgatcccactagtggcaacttggtgttctgcgatgtggcacatccacttcttaaatgcagattattgcactgtaataaaaatcctccatattcagtgctttcattgtgtataattatgtaaactgtagacaaaaaatattcctgaatttgtgtgtgtgtgtgtgtgtgtgtgtgtgtgtgtgcggatgcgcaatccgagatggttgttaaagctcgaaagcgagtttagcttctagagtcgcccctcctccgaggcccagccgaggtggactcgcaccgtcgcaagaccggccaggcggtggcaatgaataaaaagccagtcttggtgctagggacccaggtgttctccgtcccgcccctgcctggcagccccgcccctcccccgccccgggccacgccccaccctggcccagcccccaaaagtaccgtttgcatctcccgtgagcctcttcgactgtcactctttggaaaaaaaagtgacgtctgcactgaggtggccgctaaagtgcgaatcacgacgggcggtggccgttgggtcccggcgggaggcggggtttccgctcctkgggcgcacgtcagtcaggaggc

SEQ ID NO: 625101 - DNA, 573 bp, Homo sapiens
tgttttcttcccgccccctccccaactttactgaggtacgattgaccaatacaaatgttatatattaagttgtacagcatgatgatttgatacatgaatacattgtgaaatgattaccacaatcaagctaattaacatctctatcagctcacatagttaccctttttgtggtgagaactcataagatctactctcttagcaaatttcaagyacagaatacagtattattaactgtagtcaccatgctgtacattagatcttcagaacttaatcatcttataactgaaaatttataccctttgaccaacatctcctcatttttcccaccctccagcccctggttaccacccttctactttctgttcttatgagtttgacttttaaaagttccacatatgtgtgatattatgcagtatttttctttctgtgcatggcttactttatttagcataatgtcctctaggtacattcaagtcattgcaaatttccttctttttaaaggctgaataatatttcattgtatttgtatgtgtgcatatgtgtgtgtgtaccactttgttaaaatttcattcg

SEQ ID NO: 625102 - DNA, 573 bp, Homo sapiens
tgttttcttcccgccccctccccaactttactgaggtacgattgaccaatacaaatgttatatattaagttgtacagcatgatgatttgatacatgaatacattgtgaaatgattaccacaatcaagctaattaacatctctatcagctcacatagttaccctttttgtggtgagaactcataagatctactctcttagcaaatttcaagcacagaatacagtattattaactgtagtcaccatgctgtacattagatcttcagaacttaatcatcttataactgaaaatttataccctttgaccaacatctcctcatttttcccaccctccagcccctggttaccaccmttctactttctgttcttatgagtttgacttttaaaagttccacatatgtgtgatattatgcagtatttttctttctgtgcatggcttactttatttagcataatgtcctctaggtacattcaagtcattgcaaatttccttctttttaaaggctgaataatatttcattgtatttgtatgtgtgcatatgtgtgtgtgtaccactttgttaaaatttcattcg

SEQ ID NO: 625103 - DNA, 572 bp, Homo sapiens
ttggttccagacaaggagtccagacgagaatttcaactgaatgagaaaaataaaaataatagatgcccaaactgaatcgacacaggtattggaattatctgactaattttaaagcagccatcatgaaaatcattcaataaggaattacaaacrtgcttgaaacaaatgaaaagacagaaaatcttggcaaagaaatagaagatataaagaagaacaaaatggaattcttttcagtggaaaaatacagtgactgaaaagaaaactcaatgaattgggcttgaaagcaagggagaaaacagagaatctgtgaacttgaaaaaagcatagaaattatccagtctcaacaacataggcaaaatgcactgaaaataaaatgaagggagcctcaaggaacttgtgggactataaaaacaaatataacattcatatcattagaatccatgtccaggtggagctgtaaacttattcaaagaaattatggtcagaaattctgcaaattcagtaaaaaggataaacttacagattcgagaagctgacaaataccaaacaggataaacccaaagaaattctca

SEQ ID NO: 625104 - DNA, 525 bp, Homo sapiens
caaagaaatagaagatataaagaagaacaaaatggaattcttttcagtggaaaaatacagtgactgaaaagaaaactcaatgaattgggcttgaaagcaagggagaaaacagagaatctgtgaacttgaaaaaagcatagaaattatccagtctcaacaacataggcaaaatgcactgaaaataaaatgaagggagcctcaaggaacttgtgggactataaaaacaaatataacattcatatcattagaatccatgtccaggtggagctgtaaacttattcaaagaaattatggtcagaaattctgcaaattcagtaaaaaggataaacttacagattcgagaagctgacaaataccaaacaggataaacccaaagaaattctcaccaagacacatttaatcaaacttctgaaactaaagacaaaaaatactgaaagcrgcaagagagaaacaacaccttacttatgggggaaacaactcaaattacagaatatttctcatcagaagtaatagaagccagaagga

SEQ ID NO: 625105 - DNA, 525 bp, Homo sapiens
caaagaaatagaagatataaagaagaacaaaatggaattcttttcagtggaaaaatacagtgactgaaaagaaaactcaatgaattgggcttgaaagcaagggagaaaacagagaatctgtgaacttgaaaaaagcatagaaattatccagtctcaacaacataggcaaaatgcactgaaaataaaatgaagggagcctcaaggaacttgtgggactataaaaacaaatataacattcatatcattagaatccatgtccaggtggagctgtaaacttattcaaagaaattatggtcagaaattctgcaaattcagtaaaaaggataaacttacagattcgagaagctgacaaataccaaacaggataaacccaaagaaattctcaccaagacacatttaatcaaacttctgaaactaaagacaaaaaatactgaaagcagcaagagagaaacaacaccttacttatgrgggaaacaactcaaattacagaatatttctcatcagaagtaatagaagccagaagga

SEQ ID NO: 625106 - DNA, 433 bp, Homo sapiens
caggattgaacctctagtcagtctgatgcacatacctgtgttctttaccttattcctcactgcctaccctcaaggagtttaaagactactcgagaacaratgcacacactctggaaataaaaggcagccacaagaaaggacaaagagagtgctggtgggagaccaaggcagtagacatcaacaaagccttcctggagggggtgacatggggaagtcaaagaccttgaaggctcagtagaatttggacgtgcagagagagtggtggaaatggaattcaggtagaggaaaccccattagcagaaagaagtctggaggtgagcatagataaggcaagtccacatatttctttttgtatctgtttaacaaacactgatatggcacttgctttgtgccaagcactgttccaagggccttatgtacagcaactaatgta

SEQ ID NO: 625107 - DNA, 623 bp, Homo sapiens
tgggtaggaaatcacagcctagaataaaggtttctatgaacttggctcccaaaaatttggtatatatttgttaagagtgtactatttcaccataattcctggactaattagtaaccccaaagggtcaggaaaagatcccagtcactactttattctgatacatgtatataaattatcatctacaactgacctggcctataccaatgaatgttattttttcttggtgagctataacagttacatttctaaattgtatgtttgtctgtattaccaatataggatgtacacatacactgttctaactattttacaaagattaacatgtttaaaccccacagcaatcctgtgaggcagttatcattataatccccaatttacaggtaagggaattgaggcacaggttaagtaacctatttgttttccattcacctatttgaattctacctgccagggatccaattaagatagtcaaatccatcttcaaaagaaagagtgtttttttaaattayaaatgatttttgggattacaacaatccacaaataattggataacttgtcacctttgtgatctggaagaggttgtatagcatggtccttgatacacacttgatatacaagaattg

SEQ ID NO: 625108 - DNA, 525 bp, Homo sapiens
atagtgctatagcttctgctaattttctttttgggacttaaaaaaatctatcctcttcaagtgttagataaaacgagctagtgcacattaaaataataaaaaggaaccaatcacattcgtctttmatgtttctgtatctttttatcatcagaaacagctgacccttggctaacattacatgatttggagaaataattggaagtctaccacagggagactaaatgtaaaactccaatcagataaattacaacacggatgtggtaagtgatagaacacacacctaaatctaatttaacttccaagaattttaagtagtatttcccaattaaaatgtctttaagggaaaaatgcaaatatgaggcctttgttagcaagattccagaacaggaaaagcggaactcaaagcctctctagttaagcgacctgcgttccgacttacctctgagtgatgggcctactgcagagcccgcctcccaccacagtgctggcccagaattttttatacgaactagttcgtaactaaac

SEQ ID NO: 625109 - DNA, 494 bp, Homo sapiens
gaattcttagcaagtaccagttttcattaatgggaagcaaatccactaatggcattcaggaacagcgctcagagtgagaccaggggcctcactcttttctcttattctctatcccagggctctakaaaaaagatagcagggccccctgctgcatcccttggagccccatttcttcttcctctgctcagccctggctggtcatcagggtatcctggagcaggagggagagaagagctccatcatatcaacattcctcacccaggagggcagagagcaaagtgaagataatatacagactttggaattgcacaggcttgccagttggagatgtgtaacctctctaagactcagtttcctcatatataacatggttgtaataacagtaccagcctcataggattgttacaagatctttacatgtaaagttcttagtccagcgcttggcatgtacttactgctcaatataagttagctgctgccactgtgattattat

SEQ ID NO: 625110 - DNA, 552 bp, Homo sapiens
  misc_feature 1, 2, 3, 4, 5, 6, 7, 8, 9, 10, 11, 12, 13, 14, 15, 16, 17,18, 19, 20: n = A,T,C or G
nnnnnnnnnnnnnnnnnnnntcagaagtgccttctgccatgactgtaagtttcctgaggcctccccagtcatgtggaactgtgagtcaattaagcctcttttctttataaattacccagtctctggtatttcttcatggcagcctgaggttggattaatacragtaccaacaactcaccagtcactgtgcgaggcatatgaagcacagaaactgcttagcacagccccagtcacttagtaagtactttgtgagtgttagcttataaaggaggtcaggggcagagtccagagaaaaacttacccctaccattccacattgagtgtcctgttaggagcctcagtctgaatcctggcagaagagcattcacgaaattattgcagcatctcttaagatgtcaggggaggctgctctggggaggggcctctaaaggggctctaaatggagctggagaggcatccaagaagcaggaccaaatcaagagtggcatgcatgtgggaaagcaggcagggaggccaagctccacctttcaaagctgatgggttttcctgatc

SEQ ID NO: 625111 - DNA, 574 bp, Homo sapiens
ttgattaaatctgctgttgaagctctttattgaatttttcagttcagtcattgtgttcttcatctccagaatttctgtttgtttctttttaatgatgtctatcattttgatgaacttctaattttgttcaggcatttttttaatttcattttgttgtctatctttattwccttgcagctcaatgagcttccttaaggtgactattttgaattacttgttgggtagtttgtagatctctatttctttagggctgttttcagaactttattttgtttctttcatcatgtcatttttctctcattcttcataatccatgtggacttgcattgggatctgtttatttgaagaagtcatcatccttcccagtctttacagactaacttatttatggaaagctcttcaccagtcatcttagttaagggttttggacaagactgcctgctgccaagtggacctgataccaggattggtggctagcaggccaggtgccagtgtccacaattgaaagttgaatactcaattcactctcactttcctggctttgtgcctaggattgaagcaaagctgaacacta

SEQ ID NO: 625112 - DNA, 573 bp, Homo sapiens
tgattaaatctgctgttgaagctctttattgaatttttcagttcagtcattgtgttcttcatctccagaatttctgtttgtttctttttaatgatgtctatcattttgatgaacttctaattttgttcaggcatttttttaatttcattttgttgtctatctttatttccttgcagctcaatgagcttccttaaggtgactattttgaattacttgttgggtagtttgtagatctctatttctttagggctgttttcagaactttattttgtttctttygtcatgtcatttttctctcattcttcataatccatgtggacttgcattgggatctgtttatttgaagaagtcatcatccttcccagtctttacagactaacttatttatggaaagctcttcaccagtcatcttagttaagggttttggacaagactgcctgctgccaagtggacctgataccaggattggtggctagcaggccaggtgccagtgtccacaattgaaagttgaatactcaattcactctcactttcctggctttgtgcctaggattgaagcaaagctgaacacta

SEQ ID NO: 625113 - DNA, 542 bp, Homo sapiens
gcaaccaggttgtgccttaagctatgtctatggtgttcatacctccataagtgaagaagagcatgtcagctcaacaagaaatctctcttgaatttaacaaagcaaaacaaatatttattccaaatggtagtttaaacaacattgtatttttttaccaattttattcttttaggtttctgagccagctggtaaactaagataccaagaggttctgtggttcacacaaactttcaagccagcttaatttaaaacagcattgtttcttcaaagtagttcaaactaccatcttttcagttttgtcatttagcttggtcactggttttttcattagaagcttcctataaaagtgaattttggaatcaagataccaatttattttcttaaaacaaatgagaaatatttgctgagtctagcagtctgaatccaactctgtttctgagacctatacccaatttccmaatcactctgttcaactgtgctgttaagttcaaaaccaactggaatgccaggggaattttaattcacttcagacaaatgggact

SEQ ID NO: 625114 - DNA, 410 bp, Homo sapiens
aagtagaatggtggttatcagaggttggggtagggggatgagaaaaggggagagatcgacgaagggtacaaagtttcagttacgtaggaggaataaattttagtcatctagtgcacagcttggtggccatagttaataataatgtawatttttaaattgctataggagtgtattttaaacattctcactataaataaatgacaagtaggtgtgaacctaaaagtatctgagacaggtcttagtcaatttataaagcttttttgccaagattaaggatacacctgtgacatggcctcaggaggtcctgaggacatgtacccaaggtggtcatggtacagctggttttatacatttcaggaagacataaaatttcaatcaatacatgtaagatttacattggttcaatccag

SEQ ID NO: 625115 - DNA, 522 bp, Homo sapiens
tggcaggcccctgtgctgataatgaatgggggaaacgtggccagtaagacccacagaaagaaaaacacttaaacctcttgatgaaaggccatatgagaaggtaagtgttataattcaactgaaaataaaagcccgtggcaggttatccttccttccaggcagacagtctgtgggattgctttcctgcagctacagtggcagtgatggattatctgggaaggtgaagcagctgagctgatctaccccctcctcttccactcccaaattcccctcaggctacagggtttcagggcagctttaatccctcttagccttcactctcccacggattccaagacaagtcccaggagttayttaggcctggatagcatcctcccaagctgtttcctgaaacccaagtccgaaagacaggagttggtcctcaggtgcttgccagaagcctcccattcattaccctgctaggaaggattgtttcaggagtctggacctaagaaggagtgttttgatctggccttggttgtt

SEQ ID NO: 625116 - DNA, 541 bp, Homo sapiens
cttaaatggtcccttaagtttagggatgttagtcttctaggatcagactattctaaatgaaatgtctccatacaaaagagtacagccatgtctatacattgcaataaaattgttcattgaatagttgattccaaactcagaccacctcattgagagactggggttcagttgttgacatatgacaattcatgtgaccctccagacctctggaatgagtagattgtctaaaatgttaatctttgctgttgttatctagttgtaatctataaggatgargcaaaggtgtattgtgctttaagtaataattaaataaatacatgtatattttggcattaatgcaaactaaaccacgagaagaatacagtcttaaaactgcatttggtcactgggaacagtggctcacacctgtaatcccagcactttgggaggctgaggcaggccaatcacctgaggttgggagttcgagaccagcctgaccaacatggagaaaccccgcttctactaaaaatataaaattagccaggcatggtggcacgtgcct

SEQ ID NO: 625117 - DNA, 538 bp, Homo sapiens
actccatctctaaataaataaatagaaataaaaatatctacttaattcaaaaacaagcaggtataggagaataaatggacaaatggaaaaaaacccaaaatattatatttgaatagaasttttattattaattacataaagtgtaagtagaccaaatacctcaattaaaattcaaagattgtcagattggatttaaatattagaaggacaaagtttggctgattgtgaagaatggaaaaggatattactgtagttgatgttgctaggaaagacaaagatggacatttcataatgaaattaggattaatacaataggaagatataacaatcctaaatttatgtgcatctgataatacaccatcaaaaatatgtaaagcaaatattgacaaaactgaaaaaagagacagatccatagttatagttagaatttaatgcatctatctcaataattgacagaacaaacaagaaagaaaaaagttagtaaggatatagaatatttgaacaacaaaatcaagcaaattaacttaatttatgtata

SEQ ID NO: 625118 - DNA, 360 bp, Homo sapiens
ccctcaggacacagtgacgaaygcaagttgccttatttcaggctgggggtgaaagttgtaggaaggaagaaggaggaagaataatgaaaatgaataagcacaataataaataaacaaataaagaaataataaacaaagaaaatgaataaacacaactaagtaaataatgaatagaataacaattcagaaacaaacccagacctgttgacaaaacatgaccatgccttgggaaaagcatgccttttcagtaaatggttctggtcaattggatatgaataagggggagggggaaggaattttaacctgtctcacattatgctcctaaattagttatctaaatggattgctgatctaaatgtg

SEQ ID NO: 625119 - DNA, 445 bp, Homo sapiens
gctatgatgggaaataatagtgtctgtgagacagaataatatgggaggggaagagccagtttaagctaggaaggtaatcagcaagggcaacagaggaagtgctatctaagctgaragatgaagagaagactagagagaaaagccctccaagtagaagtaagcataaggcaggagcatgggcttagaatagcagaaaaaggggcagtgagggtatcaatggtgagtcaggtgaccgtgagaggagctgaagctctaatgtggagtgggggtgaggggtgagggagtcctacaggtctttgcagattatttatgactgaattttatgttaagtatactggaagccgttatagggttttaagcaggaaaataatatagcttggttttgatttttttttttttaatgatcctctggcttctgtgtggaggacaaatggaaaggagcaag

SEQ ID NO: 625120 - DNA, 658 bp, Homo sapiens
agcttacagggagaaccactctctacttagattaaggataaaccatgtcaactttggttcttcaactaaaaaccaatcagaatgaaaattagtataaaagaaatgatcaagagtgactctgtaaacattttgtagtcaaacaggaagaaaatgcttctgattttattccttcaccactgaaccttacatacgcaagygtttgtggtagaacattgggcaaggttgaggtatatagcttgctaataatacaagcatgtaagattttagaactgaataccattcagagtcttaagtttagactctatacttatatctaagccatctgtttcacttcatgtccaagaaaacctggtccagaaggaggagtaacatgctagattttacagcaggttaatggcagaagtagcacagaaaccagtggttgtattccccatttaagagattctgtcactatcttaacaagacatataaggctttggatgctagctctaccccagccactctgctctggcaattataaaagcaatctttcaagccagcatgtaaattgttcatcaaaatttctgcctgtgcacagctaaaatgccaagaattttttaacattgtccaggtgacatcaaaaagtgtagaaagttttgagagaagtatgaggatattt

SEQ ID NO: 625121 - DNA, 558 bp, Homo sapiens
atagaaggttaaaatataaacaaaggaggaagaagaaaataggtgtcatgtggaggaaaaaacaaggaaaaaagaaccttattggaagcaagtatgaacaccaatgctatttgagaatagaatacttagaatggwgtttggtttattttctttattgtgtgaccctttcttgtgacattatcactgtccaaacttttaaataatattttgtatgttcacagatattttgtgtgagttgtaattcctggtttttgattgtctatttgttgcagaaactaataaaagttgacattaatagaatagacagcaatgcagaaaaagaaacctgattctgcctgtgctgtgacattcattatacacttacccaacagtctcactgtagaaaaaggagtaaacaatacttccaactgattttatgaggccaacacaatgctgatattaaaacctgataaagacatagcaaaaattagcattacagaccaatagtacacatgaacacagattcacaaattcctgagaaagtgaacaaaataattaccaaaaggataacataccata

SEQ ID NO: 625122 - DNA, 484 bp, Homo sapiens
cataaaaattatgacagaagatgattaagaaaatctctcttttctcgtattatttttgtaaatacccactgacctctgaattgtcctctccaattcacagaaatttttatttactggaattttaaaaggtgagaatagagtagaatgttagattaacagctcccataatcaaacacagccaataacaataatagtactgtgaaagaaagcaaagctctctcttatactgtcaaagggtatcaaaatactttccagaccctctgacactcatctgggcttcaaggatagcgacacattattattcacattttacagatgagaaaatatgyaagtttatttttattaattataaaaatagataaattgccccaattttaattagaagaaatgaatgatgtttcttttcaatattgtttcaaactttaagttagtatgagacatcttaggttgtcagagttcttcactattttcttttttaagatta

SEQ ID NO: 625123 - DNA, 637 bp, Homo sapiens
ttttcagttttcatctggaagattaagattattcagacacagtatgattacatgctggatgataataaacaaatctttgacaatgtccacaggattgcaaacatctgggtgaaaaactcaacaatccagctaaccatccaaatgtttggcatcatttaaacaaagcattggacagcaggagatgggcaaaatccaaaaaaggaggcaggaggtatccaaagcaaacattgcttacataaaaaatyagtttacattcaatttaaaggggaaaatgagttaggaatggtaaacttattattatcacccacatcctacagctcttctcttctacaatggcctttccaaacctactgaagtcacagaacctccagaattttgtggccagggtctaatcttcttacctagtatggaaacttttaggcatcacacgagaatagcaaagtcttgttttttgtgtggtttcctggtccacctaaaaagacaaaaagtacatctggggcttaaggacttctcaacaaaaagaatgcaggtctcattgccaggggtagggagaggagggtgccttgggaatcaaagcaatagccctcaggtatgagaatgctggaagataaatgaaccatttcaggctgctgattca

SEQ ID NO: 625124 - DNA, 537 bp, Homo sapiens
tacctaacatactatatagcactcaattatcttatttattgcctctttcccacctctagaatgtatgctctataagggcaggattttttgtattctttactgctgtatccccagtttctagaatgatttaggtgattaataaatatttcttgcataaatgaattttttgtgagtgtagtgtgagtaatgtcctttgcacargacccggtacacagtaaacactccagacatgttctctctttatgttaccattttatcgcaactttccctcatctcagtggggcacatgtgttctctttcttctccagataacccaagattaacccaggattagtactttaacccagctaatgaatgtgaaggcttgattctgtgaagattagtctagaagcaagtggagttaatcattgtgagggaagtaagaggggatttgtgtggttgctaccttcaaatacctaaaggtgtgtcacatagatagcaattccaggaagaatacttctgctgcacaagaaaggatttcaacataattggatgtgt

SEQ ID NO: 625125 - DNA, 537 bp, Homo sapiens
tacctaacatactatatagcactcaattatcttatttattgcctctttcccacctctagaatgtatgctctataagggcaggattttttgtattctttactgctgtatccccagtttctagaatgatttaggtgattaataaatatttcttgcataaatgaattttttgtgagtgtagtgtgagtaatgtcctttgcacaagacccggtacacagtaaacactccagacatgttmtctctttatgttaccattttatcgcaactttccctcatctcagtggggcacatgtgttctctttcttctccagataacccaagattaacccaggattagtactttaacccagctaatgaatgtgaaggcttgattctgtgaagattagtctagaagcaagtggagttaatcattgtgagggaagtaagaggggatttgtgtggttgctaccttcaaatacctaaaggtgtgtcacatagatagcaattccaggaagaatacttctgctgcacaagaaaggatttcaacataattggatgtgt

SEQ ID NO: 625126 - DNA, 647 bp, Homo sapiens
acttgcctggccaacatggtgaaaccgcctgtctcctaaaaatataaaaattagccaggcatggtggtgcatgcctgtaatcccagctactcaggaggctgaggcaggagaatcacttgaacccagtagacagaggttgcagtgagctgagatcgcgccactgcactccaacttgggcattggaatgagaccttgtctcaaaaaaaaaaaagtagttcaagtgtttattcattattaaacatattatgctcaacttcattgaacataatgacatataataaactgtacatttgaagtgtacaatttggtaagttttgacatacatatacacaagtgatacacaagtgatcaccacaaccaagataatgaacatattcatcacatccaaaagtttgcttctttgtaatccattcttcctacctcttcttgcctcatcttctccccagccaaccactgatgggttttctctcactaaagttagcttgcattttcttgagttttatataagtggaatcctgcactatatactctttcttgtctggcttctttcactcaacctaattattttgagattcatccaatgttgtattttktctttgttttatttagagacataaacacttagagtgcttagtatgtattttatt

SEQ ID NO: 625127 - DNA, 467 bp, Homo sapiens
atcctgaattatccaggtattagatatgttggtataatttgtggaaataaacaaaggccacccaaatgagtaaaagcaaaggctatttattctgagcttgctatagcaagggagtcagtcaccatcacacacattagaaagagattcaaacttaggcaaacgagtggtaaagctttatagtggaagaaagggaggacttcaagtatgccctgactgtaggctgttgacctgggaaaattataatcacgttaactagaattaggacatcttatgtgattgaagaggggtgcatatttggctttgcagttgatcccaagttggaaatggaggcaaaaattaggaaagctgtctgttaatcgattaagtcctggccatgtggggccaattgctacaagctttattgtttggkttcttgtattggtttaccgcacatactaggtttatttcctggactagttactgcaaat

SEQ ID NO: 625128 - DNA, 601 bp, Homo sapiens
tattgcagtggtttatgtttctttagacagttttctttctcctcatattttttgttacaaacttaaatgaagaaggtgactagtgtttaaagtttcaagagaaatgtaactactctgaggtttccccatgatgataaagttgctgatgggactttctgagtcctttgtttgggatgctaagggggaaaggggacagatcatgtcggttatcatctctgtgcttatccagatcgagcagtcccctttctctgccaactctctcccacagcaggcctacctaggtcccacgtccaacagggctttcgtgactttggcttcagctaatttgggacctccaccaaaaaaactggagaatgtgtgatattttgatttactataaaaatatatgtttggtctttgtctctgttcctggcacagggctcctaaaactcttggaattgcgtargttgttaagtacaacaaaggtgagtggagcaacatttattattcatgataagcccctttcaccactcaaattatgttaataaggtgatttttgaaaagcctacaggatgggggctggtttccaggggaaccaactttgggataagagggttaaaac

SEQ ID NO: 625129 - DNA, 386 bp, Homo sapiens
tttcttagctgagttctaagacaattaagaaataaatgagtaaggtagaaaggagatgaacatattacctttattttctaagtggctaattgcaatggactgaacattttcaacraattcatatgttgaaatcctaactcccaatgtgatagtattaggagataaggcctttgggaggtaatcaggtcataagggtggagactttacaaatgagattaatgcctttataaaagggaccctagagagctcattcaccctctttctgccatgtaagtattcaagaagtcagcagtatgcaacctggtagagagctctcagtagaactaaccatgctgaaaccccgatctcagatttccagcctgcagaactgtgagaaataagatctg

SEQ ID NO: 625130 - DNA, 600 bp, Homo sapiens
tgaatccccaggctgggaatcagggatggaaccgccatccctggggaggtaacccagggcaatagtgcaaaaggaagtgaaatgtagccaaggcctgggagaaataggcaccaagaaccgtctagccacaagaaatggagctcatattagggctgagatatgggacaaagcagcccacccctagaaaccagactgatgaaagacaggcaccagcggtttacaaaagaagggtacaattagtcagtatagatattaaaatgtcagacctcaatattaatcaagtaaccgcgcgttaaaacaagataccatattttgcttattaaactagtagtaattttttaagctaaaaaaccattcatgttagttagggagtaagaaaatgggtacacactcaatgctgagcaccgatgggtgcaatctttcctaatttggaaaaaaagtaaaaaacttgaaagwtacgcacagattttggctcaatgttttcactctgagaaatatatacaaatgttttagaatgtgcacatacattaagctacaagaatgctaattgcagagaaatcagatgtccaataacaagcaacaggttaatgaattatacaa

SEQ ID NO: 625131 - DNA, 549 bp, Homo sapiens
tgattaataaataaatgtgtaccaaatgaatgaataaatagatgataaaatgaatggttaattgtttttaacaaaagggctaattttaaacattgaagccaacaactttttggtgtttaataactgtctctgaatgtgtrtgtttgtgtgtgtagatacagcccatgtgtccagataactaacagctcaagtggtgaggccatcttttcttagtaacttcagctattatacccctgtggatctcattagcagaagaggctgaagcttaactgttccctctcatctcagcttgtgtactgtcaggacttatcaagatctgccttgctcaattcatgggcaatcattattttagaacctgagataggaaggcagtagattttatgtgattagctgctgagataaacgttaattaattttcaatttccataaagcagctcactggcagaaagatttattaagtcagttaatggctacagatgattattccaaaattgggattggggataaagagctatgaagacaagggctggtgaagagtgaacatgaagc

SEQ ID NO: 625132 - DNA, 555 bp, Homo sapiens
gacttctgggtatgtgtgtgaggatgcttccagaagagattagaatttgaattggtggactgagtaaaacagttgtctctcccccgtgtggaaaagcatcattcaatctgttgagrgtctgaacagaacaaagggatgaaggaaggatgaacttgctgtctgcctgattgcttgagctgggacatccatcttctcctgcctttaggactcctggttctcaggctgctagacctgaactggaatctacagccactggctctctggctttcaggtcttcaaactacatcaccagctttcctgggcctgaaccttgccaatgacagattgtgggacttctcagcctccataaacatgtgagcccgtattttatcaccaatatttttatctatatctatatatttatatatctatctgtatctatatctcctattgggtttctttttctggagaactctgactaatacaaaaggatttacgaactttgttttagccaacagcaactgcccattggaagcacattggaatggcaatccaacatccaaaatggctgggaaa

SEQ ID NO: 625133 - DNA, 541 bp, Homo sapiens
atctacatttgatccagcaatctcaagtacttagtatctacccaaaggaaagtaagtcattatatcaaaaagatacctgcacacatatgtttataatggcacaattcacagtggcaaagatacggaaccaacctaaatgtccatcaactaataagtggataagaaaaatgtagtrtatatacaccacggaatactacacagccatgaaaaggaataaaataatgtcttttgcagccacctgaatggagctggaggctattatgctaagtaaagtaactcagggatggaaaaccaaataccccaaataccataggttctcttataagtgggagctaagctatgggtaggcagaggtatgcagagtggtataatggacattggagactctgaagggaggagggtgggaggaagaggttgggagaagggtgggaggagcatgagggataacaaattgcatattgggttcaatgttcactacgtaggtgatgggtgcactaacatctcggacttcaccactctacaattcatccatgtaaccaaa

SEQ ID NO: 625134 - DNA, 555 bp, Homo sapiens
cttgagctgggacatccatcttctcctgcctttaggactcctggttctcaggctgctagacctgaactggaatctacagccactggctctctggctttcaggtcttcaaactacatcaccagctttcctgggcctgaaccttgccaatgacagattgtgggacttctcagcctccataaayatgtgagcccgtattttatcaccaatatttttatctatatctatatatttatatatctatctgtatctatatctcctattgggtttctttttctggagaactctgactaatacaaaaggatttacgaactttgttttagccaacagcaactgcccattggaagcacattggaatggcaatccaacatccaaaatggctgggaaagtgaagtacttcagttattggaatatactagctagctgacaattgccatctgccaatatcacaagtcagaggactatttctaaacacttaacactaaattatacagaacaaaattccgtcttgtttggactatacaaatgtcattttgaaatggctgctgcatggccagc

SEQ ID NO: 625135 - DNA, 590 bp, Homo sapiens
atccaacatccaaaatggctgggaaagtgaagtacttcagttattggaatatactagctagctgacaattgccatctgccaatatcacaagtcagaggactatttctaaacacttaacactaaattatacagaacaaaattccgtcttgtttggactatacaaatgtcattttgaaatggctgctgcatggccagcagactgaggtgagagaaatttgtagctgtacagaatcctcattaatgcagtgaggccttccctttctaggcaattcctggatctaagagagattaactgagactgacacctttaaaggtctgaaaagatatttactgtctactctctcggagcactgctctctatgaggcttcatccatataacaargctacctttgctagatcggcgtcttcctttctccctctcataatctgtcttgccactaaacctgatttaccaacataaccagttttgggctacactctgagctcacatttttttctataacctcaggatggaatataagattctgtgccttattgttggcttgggtctttattctgaaggttcctttgtgtgcatgttaaataagtt

SEQ ID NO: 625136 - DNA, 586 bp, Homo sapiens
tttaccaacataaccagttttgggctacactctgagctcacatttttttctataacctcaggatggaatataagattctgtrccttattgttggcttgggtctttattctgaaggttcctttgtgtgcatgttaaataagtttgtatgccttttctcctattaaagcaaaaacaaaaacaaaagtcatttgcagtgattcagggtaatcattataacctaatttctcaatgcagagtttcaggtgatgttttgaaaagttctgcctgggcaacatggcgagaccccacatctacaaaaaatttaaaactcagctgggcatggtggcatgcacctgtagtcccagctacttgagaggctgaggtggaaggattgcttgaacccaggagttcaagactgtagtgaactgtgataatgccactgcactccagcctagatgacagagtgagaccctatctcagaaaaaaaaaaaagaaaggaaaagaagagctctaagtggcaaagaattatggaaatgtagaggtttattatttcagttttcaaatagggagaaactgtattgaccagattcatcaagaaatgacatat

SEQ ID NO: 625137 - DNA, 563 bp, Homo sapiens
gtgacactccttcaggtgtgctgtttctttctctttctcccactccctccatccctctcttcctccctctactgttcctcaactcttacctcttggcttatttgggagtgatgagggggagtagacagaggaaagcttgactgctctttcagcaactctggaggcccaggaaacatgtggtgggctgtccctttcttccccaacttcctttgtggcctgcttgctttgcgtctgctgcttgaggatataaggrgccactgtgggtgatgccctactcctccctccctgctttatagaaagcagaccatggtttctatcatctcctcctggtcttcagtttaacagggatatcatgcatttcccagcaatgtcaatccccaggacatagtccaagattagtaggtgacagggcccattctcagaaactcaaaccaggatcgttcttgtttccttgcctattgtttttcaatttgtcagctcagagattttatttttcatttccctctatatggtgggaaatgggctagacaattatttttctaaacctataatttatgccagga

SEQ ID NO: 625138 - DNA, 476 bp, Homo sapiens
gccactgcactccagcctagatgacagagtgagaccctatctcagaaaaaaaaaaaagaaaggaaaagaagagctctaagtggcaaagaattatggaaatrtagaggtttattatttcagttttcaaatagggagaaactgtattgaccagattcatcaagaaatgacatatcttaaaagcttcttttttgggtaagtttctaatagcaacttgtttacatgtcatttacctcttcctcataaaagcaaaataaagaatatgtaaaaattcctgtttcagcttttgatggtgttccagatgaatgtgtttaactataattttaatatctcaaaacactgtcagtcataaatttttttcagtatgtgtcaataataaaaataaggatgataataacagggaagcatcacaatgaaggaaaaaagtactttcttctaccctgtggatgcatgaagtgaggaatctataggcagaccca

SEQ ID NO: 625139 - DNA, 666 bp, Homo sapiens
ggccttccctgtattctatgcactgtgataagtgctcagtcactattgcaactactgcagtctcttatagtatcacctctgacaactgcaatgacaaccactgtgaactgagttcctacaggatgccaggcactgtgctgagtgctttgtctatgttattgcatccagtccttgggaagatattaattccatctctattttgctcttgagaaagtttatgagattaagggacatattcaaggttttccaactgggaataagtatcagtaagggttttgactccagcttttctgttcctgaaacaaatgaataaagaagattcactatcacaacatcatgtccttcgcagcaacatggatggagctggaggcacttattctaaacaaattaacacaggaacagaaaaccaagtaccgcatgttctcacttataagtgggcacgaaacactgagtactcatggacacaaagaaggaaacaacagacaccagggcctacttgagggtggaaggtgggargagggagaggatcaaaaaactacctatcgagtactatgcttattacttgcatggtgaaataatctgtacaccaagcccctgcaacatgcaattgacctatataacaaacctgcacatgtaccccaagcccaaaataaaacttaaaaaagt

SEQ ID NO: 625140 - DNA, 636 bp, Homo sapiens
tgggcacgaaacactgagtactcatggacacaaagaaggaaacaacagacaccagggcctacttgagggtggaaggtgggaggagggagaggatcaaaaaactacctatcgagtactatgcttattacttgcatggtgaaataatctgtacaccaagcccctgcaacatgcaattgacctatataacaaacctgcacatgtaccccaagcccaaaataaaacttaaaaaagtcactatcttccaatgtctcagagtcttgtttcttccgatttaaacatgctatgattctacatagatttgaatgcattatatgcgcatccaaacacgcacagagaatatttcatgaagtcatttatcgttgcagtttcagaaatgagtaaaatacttaggacagtggacacacaggtgtgtcctgtaagtaaagatgactctatgagtcctttgagccaatgtcttactctctgtagcgctccygaccccatttcagggctgtgttcccatagatgagcaaatatttggcccagcctttgttgcaactgcgcagctacctatagagaaggaggagttgccctctgttttctcctcccacaattgagtgtctttttcctgagctcatctggggcacagtaggaatg

SEQ ID NO: 625141 - DNA, 514 bp, Homo sapiens
aaactcatgaataatccaccccttgtttatcatataatcaagaaataaccataaaaatagccaaccatcagccctctgggctggctctgcctatggagtagccattattttatggctttactttcttaataaacttgctctcactttatggattcacctctaattctttcttgcacraaatccaagaaccctctcttggggtctggatctggactcctttccggtaacatctcctcattgtgaagagagaaattaaaagattctgctgaacatactcaaagaaagcagaacctgttcagcaaccatcaacccacatcaatgcccagcagtgaatataaaacaagtccagagattgaatgcgtgactgaagagttacactgaaaggttttagactagtagtggtatctcttcttcatttacctttttagggttgtccttccccaaatcaagtgatgaggattcatgagaaatacacatacaagttgagggtgcctgtgaaaagtgagagaaaggc

SEQ ID NO: 625142 - DNA, 505 bp, Homo sapiens
ctgttcagggcctcacaaagctgaagtcaaggtgttggccagcctgggctcttttcyagagtctctgaggaagactctgcttccaaactcattaaagttgttggcagaattcagtttcttgaggttgtgggactgtagtcttcatttccttgacacatgacctgccttaccttcaagccaatgatggtgcattaaatccttctctttccttggagtcttaacttcctcttctgctgcagctctctggtttccttttttgtcttcctcttctgctattaagggctcattgattacactgggaatacttggataacactggataatctctctaccttaaggtcagcggatcggtaactttaattatatcttcaatgtcccttttgacatgtaatataacaacgggcatgacttcagaaggcaagccatggggacaaaaattgtgcctatcatacaagcttaattaaggagataaaatcaacagttcttagaaatgggatgaagggat

SEQ ID NO: 625143 - DNA, 549 bp, Homo sapiens
agccatggggacaaaaattgtgcctatcatacaagcttaattaaggagataaaatcaacagttcttagaaatgggatgaagggatggtaattatattcttattccttgaattctaggtgcaagtgaagagaagttaaagcccgacatcaggtaacaggctactgctatgtatcagctattctcatcagatattttgtaggcctggtacatcatggtgactaataagcactgagtcagaggaggactggcytgagctctagtaccggcttccctggcacttaaacaaataagaccacctcttggagccttggttttccagtttgtaaaaggacaaaattgaaccagaaagtttctttcacctgcaaatttctaacactgagttaatcatattcatttgtcttttcttactgctacttgatcaggaacaggccaggtgtgaggaggagggactagagaactactggcaaatgctgaattcatcatgtcttttcccagagtgtaatgccaacagatgttctgagtcataataaaaggttaaatattttaata

SEQ ID NO: 625144 - DNA, 549 bp, Homo sapiens
agccatggggacaaaaattgtgcctatcatacaagcttaattaaggagataaaatcaacagttcttagaaatgggatgaagggatggtaattatattcttattccttgaattctaggtgcaagtgaagagaagttaaagcccgacatcaggtaacaggctactgctatgtatcagctattctcatcagatattttgtaggcctggtacatcatggtgactaataagcactgagtcagaggaggactggcctgagctctagtaccggcttccctggcacttaaacaaataagaccacctcttggagccttggttttccagtttgtaaaaggacaaaattgaaccagaaagtttctttcacctgcaaatttctaacactgagttaatcatattcatttgtcttttcttactgctacttgatcaggaacaggccaggtgtgaggaggagggactagagaactacyggcaaatgctgaattcatcatgtcttttcccagagtgtaatgccaacagatgttctgagtcataataaaaggttaaatattttaata

SEQ ID NO: 625145 - DNA, 557 bp, Homo sapiens
ggtttttttccatgtgattttatagctgaaaaaaacgggggcatgaactatgatcttttaaccaaatatctgctttgcctatcacatatcctaatagcgcgagattatttttctttcctaacacatttttttgtgcatgtgttttcttttctatggtcttcttcattttcacaaccataatattattctaaaatactaactccatagcaacaataaaaatcagtaaatgtcctttctttaatagatatatagaggaaggtttatgacaaagtagtaagaaaaatctgtccttaaaaaagtaatgttattttaaccatagaattgttactttcagtgaattccttcttcagatatacaaggaatttactgaacaaaaaatgaatattctttacttatttatatttgtgtaagatgtgtaaaaaaaaakctatacttttcagagaaattatttcataaaattgggtttgtggaaagctgtggcttttgaagatagacttgggttaaattcctggctcttctgcttattatctatctctgtgacctcaggcaaatcactt

SEQ ID NO: 625146 - DNA, 612 bp, Homo sapiens
gtaatgagtcacttttctcttgctgttttcagaaatattttttgtctttgacttttgacagcttaataatattgtatctcagcataaatctcttyaggttgtatttatttgagattctttgggcttcatgagtctcaatgtacatttcccctcccagatttggggagtgttcagccattatttctttaaataagctttctgtgtctttctctttcttctgtgcttttgtaaatctcacaatgtatattttggtttgctggtgttcaataggtctcataggcttttttcactctttttcattctttgttgttgatgttgttcctctgacttagtaatttcaaatgacctgtctttgagttaactgatcctttcttctgcttgatcaagactgctgttgaagtctctgctgaattttgtagttcagtcactgtgttcttcagctccagaatttctgtttggttcttttaatggcttgtagctgtttatttctttagggttagttactagagttttcttttgttcctttagtgattttggttccttttgttctttagtggtaccatgtttccctgatccttatagccctgagttggtgtctgtgcatttgaagaa

SEQ ID NO: 625147 - DNA, 612 bp, Homo sapiens
gtaatgagtcacttttctcttgctgttttcagaaatattttttgtctttgacttttgacagcttaataatattgtatctcagcataaatctctttaggttgtatttatttgagattctttgggcttcatgagtctcaatgtacatttcccctcccagatttggggagtgttcagccattatttctttaaataagctttctgtgtctttctctttcktctgtgcttttgtaaatctcacaatgtatattttggtttgctggtgttcaataggtctcataggcttttttcactctttttcattctttgttgttgatgttgttcctctgacttagtaatttcaaatgacctgtctttgagttaactgatcctttcttctgcttgatcaagactgctgttgaagtctctgctgaattttgtagttcagtcactgtgttcttcagctccagaatttctgtttggttcttttaatggcttgtagctgtttatttctttagggttagttactagagttttcttttgttcctttagtgattttggttccttttgttctttagtggtaccatgtttccctgatccttatagccctgagttggtgtctgtgcatttgaagaa

SEQ ID NO: 625148 - DNA, 499 bp, Homo sapiens
atataaagtataagggaaacattactctctagtattagacatcaggagagtggttgcacttggggcaaggtaataaatagaaaggaacagaggagatttttctgaggtgctagtaatgttctgtttgttgatctaggtgctggtaacatgatgtattcagtttataaaaacttatctagctctgttttatgtacactgttcattcagtggctctccctgtctacccttccctgacataaacattccatcctgaggccagtgtaccaatggcattactacaagtcttactcttatcctgcttctgctcagcctagacagcagacatttgtcctgtgtcgattctttcaaatcctgctcttggatataactaatctaacaaaytactatgagttgaagagttaagaactgataatgactaactatgaaatgtgtcttttttccccccagatgacaatgttactttaattttgaacttttctgtcttaaactttagaaaaga

SEQ ID NO: 625149 - DNA, 586 bp, Homo sapiens
tacatatcatatgtcagggccttcattgttgttttgccttaggtattaatttataacttatgcattacactttttattatcatgagaagtaacatgagttgtggaatcgaattttttttaaagtcttagaactagaagagaagtaatatataacagattatctaggccaatctatttagtgttgggcccgcttaatatgaattagatgtatgtatcagtcagggtccaaccagaagatagaaaccacacaataaagtgaacaaggaaatgtaatataaagaattaactataatagtagattgaagtaacaggggattggcgagtaagaggtaaagagagtctaaagaatatagggtagcagataaaaggagcagtcactacccccagaactcatataaagtgttcaaaaaagactcccttctctcttccttccaacctgagatccagatagggcatagctgtggctcactagataataaagaattaactaaggtgtcaaacaggtggactttgctargaattcatcctgtggagtgctaggggaagctgtcactagtcaggcactgcacctgagaacttgctgaac

SEQ ID NO: 625150 - DNA, 570 bp, Homo sapiens
caaaggaaccaggaaggaaaactccattgtctatcagtgtccttctagcatcctctactgacaaagtttgacattgtgcctgctggcaaaagaaatatttaaaggacccatctcyattttttacagagcaggcaataaaatttggatttaaaaccgaaaagcaatacattgatattggcacagtgcctatattatatggacacacattttgcatacattactaaatttattccctataatatatctaaaaagtaaatatcatcatgtacaagatagagaggttccagtgttaaaaaaaagagtcactgagctagtaagcagcagaatgaagattcaaattcagttttgggcaacaccgagcctatccattgtctttctgtactacgttttctccagtgatgcctagatgtcttggaaaagtggtggcctagcgggacaaacttagggagggcctgagtatgaggagtatgaaatggggatgggagggattctaaaaggctgggctgtggtgggaatgggattgtattgctgtgagttgtggagcctgggaaaatctgaaaggcagagtct

SEQ ID NO: 625151 - DNA, 597 bp, Homo sapiens
caggctaacaagtcaatggttaaactaggactatagcctgtctcccttgactcccatttccgtgctctagtcacacttgttttcaccacctattaactctagagttagatagcaacagacaaaagtgagtgaaccagctggactccacagcacttagcttgttgaagttatcagagggcacaaaagtggaagatattgatcatgcttacttcagcttaaacatttgatgttttcatagcactgtgcattctctccctttgtatcctatgagccttcatgagtgggtgtttggcaagtattcaggaaccaygttcacagacggagcttcacatcgtcattgatgtttgtcaggccttccaatcagggctacttggccttgactgaacactggaatcacctggaaaaaagaaaatactaatgcctggggctattttataccaataaccagagtatatttccaagttcctcagatgattctagtgtaaatccaaggttgagtatcactgtcttttcttgactgtagcagggtgacattgagagagacaaaaaaaaaaaaaaaaaaaaagaaaagaaaagaaaagaaagaaaaaaaaatag

SEQ ID NO: 625152 - DNA, 597 bp, Homo sapiens
caggctaacaagtcaatggttaaactaggactatagcctgtctcccttgactcccatttccgtgctctagtcacacttgttttcaccacctattaactctagagttagatagcaacagacaaaagtgagtgaaccagctggactccacagcacttagcttgttgaagttatcagagggcacaaaagtggaagatattgatcatgcttacttcagcttaaacatttgatgttttcatagcactgtgcattctctccctttgtatcctatgagccttcatgagtgggtgtttggcaagtattcaggaaccacgttcacagacggagcttcacatcgtcattgatgtttgtcaggycttccaatcagggctacttggccttgactgaacactggaatcacctggaaaaaagaaaatactaatgcctggggctattttataccaataaccagagtatatttccaagttcctcagatgattctagtgtaaatccaaggttgagtatcactgtcttttcttgactgtagcagggtgacattgagagagacaaaaaaaaaaaaaaaaaaaaagaaaagaaaagaaaagaaagaaaaaaaaatag

SEQ ID NO: 625153 - DNA, 597 bp, Homo sapiens
caggctaacaagtcaatggttaaactaggactatagcctgtctcccttgactcccatttccgtgctctagtcacacttgttttcaccacctattaactctagagttagatagcaacagacaaaagtgagtgaaccagctggactccacagcacttagcttgttgaagttatcagagggcacaaaagtggaagatattgatcatgcttacttcagcttaaacatttgatgttttcatagcactgtgcattctctccctttgtatcctatgagccttcatgagtgggtgtttggcaagtattcaggaaccacgttcacagacggagcttcacatcgtcattgatgtttgtcaggccttccaatcagggctacttggccttgactgaacactggaatcacctggaaaaaagaaaatactaatgcctggggctattttataccaataaccagagtatatttccaagttcctcagatgattctagtgtaaatccaaggttgagtatcactgtcttttcttgactgtagcagrgtgacattgagagagacaaaaaaaaaaaaaaaaaaaaagaaaagaaaagaaaagaaagaaaaaaaaatag

SEQ ID NO: 625154 - DNA, 573 bp, Homo sapiens
gattcatcagtgaatagaacaaaaatctctgcccttgaggagcttacaatctagagaaggaagttgtctgctgcatatccacaccagataaccagttcctcaaacacagaatggtacgtagagtagcagaggccctaccttcccattggttctcctgtccctcaagtggacactaggggacgttgataaaaactgatgctgtgggatattgaatagagagctcctcagactctatggggctctgcaagtccatccttcctccttccctccctccttctctttcttcccttctttcttccctccactgggtacatcattttcatattacaggtggaaacaagttcattccatcagtcactagtgtagctgaatttagaatatgmcttcaaatctgcttctgaaaaatatttgacaaatttctaggaacacttacagtgagagcagagagacagacaaggcaacaggatggagcagaggaaacttgataaatagaagaagcaggagattgttccccaggaaaaatcaacgtcccatggcattttaaagactttcagaactgcccaacagttataa

SEQ ID NO: 625155 - DNA, 573 bp, Homo sapiens
gattcatcagtgaatagaacaaaaatctctgcccttgaggagcttacaatctagagaaggaagttgtctgctgcatatccacaccagataaccagttcctcaaacacagaatggtacgtagagtagcagaggccctaccttcccattggttctcctgtccctcaagtggacactaggggacgttgataaaaactgatgctgtgggatattgaatagagagctcctcagactctatggggctctgcaagtccatccttcctccttccctccctccttctctttcttcccttctttcttccctccactgggtacatcattttcatattacaggtggaaacaagttcattccatcagtcactagtgtagctgaatttagaatatgccttcaaatctgcttctgaaaaatatttgacaaatttctargaacacttacagtgagagcagagagacagacaaggcaacaggatggagcagaggaaacttgataaatagaagaagcaggagattgttccccaggaaaaatcaacgtcccatggcattttaaagactttcagaactgcccaacagttataa

SEQ ID NO: 625156 - DNA, 515 bp, Homo sapiens
agcttatcttactacatgctctgaagcccttgtttaaagaattgagtctagactcttgcccaagaatattgctgagccttcttatttaacttatttggtagctgggagatggggggcaggggtaggggttggtggtgacaccttatttcaccaggcctctaaacacagcatcaaaggaaagccagagatatcctttttgatattctctcaaccaccgcacatgtcttttccagttaattatagatcaatctgctgtgaatttgcacaaagtattattgaacacattttaaaattctagcaagtgtgacctcaaactatagactttcatttacatatgtgactctcagagccagtgcccaatgacaaccttatacataagccttacaataacagcttwaaaaaaaattacaggagtaaatacatttttactggcttttaatttcaaaaatcctaataaagttttgtagtagtttattttgtggagatacatttgacccaagattactgaggaattc

SEQ ID NO: 625157 - DNA, 399 bp, Homo sapiens
cctggctaacacggtaaaatcccgtctgtactaaaaatacaaaaaaattagccagacgtggtggagggtgcttgtagtcccagctatttgggcggctgaggcaggagaatggcgtgcatctgggaggtggagcttgcagtgagtggagatcgggccactgcactccagcctgggctacagagtgagactccrtctcaaaaaaaaaaaaaaaaaaaagagaaggtaggctgagtttgaataccatccctgccactcactagctgtgtgatcttaggtgacttaaccaatttgagcctgtttcctcatctgtaaaaaatggggataataatagtatatgtatatcaggactcttgtgaggattatgtgtaataatgaaagtaatatgcttagcactgtccc

SEQ ID NO: 625158 - DNA, 643 bp, Homo sapiens
acagattaaaagtacgtgctaggcagtacaratgtggaataaatggggagaaccccaggtggtgcgttatctcacatggctctaatcccagctcagccattaacagctgtgtaaacttggacaggttgcttctattctgcagaccttgccaatccaggcacccaagctttcatgtctgtcaaatcaaggggctgataaagaatttctaaagacttccaaaaaaaaggttcagaggtgggagatatctaaagggctggactgaaaaggccagtgtaaactcaatatcttctggtagttcccaccctcaacttctctcttggaggtagggctgccctctccaatttgcaactcctgattcctttgccaccaggaactgaagggcctcaggtggaggaatcctcttgcgaatatctgctcctatgcgcttctctccataccacaccttgcccattctgtttcagaatggaagcaaattttctggtctctgaattcctgaatatacttttttccaccattttgaatactgaggcatctgcccatccccaattttgaagcacttaatattccataattacatctgcaattgcatccggcccctgggacgcaatttatctgctttgggaattgcaattcattgaaagac

SEQ ID NO: 625159 - DNA, 511 bp, Homo sapiens
cccacagaaactataaaggattattaatgattgttgttgttttcggccactaaactttgggattatttgttatgcagcaatggacaattgaaacatatgcctaaacaatatggtttaaaactcttatgcctggacctttgaggagcttcatttttttaatgctgctkctatgaatattcttgcacatttcccctggtacacatgttaagagtgtcctttggctatgtacttaagagtagaactgctgtttatgagatattcaatttacaaaataatgccaattgattttcaaagaggttgtactaagttacattcccttcaacaaggtgtaagaaatcctgttgatctctcaccttagggctctcacactgggtggcccttctgcctggaatgttcttcccctaggcatttgcacaagccacttcctcatgctcttcaagtctttctcaagtgtcacactctaaataaggtacatcctgaatgctccatttaattggaaaattatcccatc

SEQ ID NO: 625160 - DNA, 545 bp, Homo sapiens
agcaactggaacattggcaaaagttgcatttctcaattatttccataactctggaaattaatcaaaagcttgtaaaaattcaagaagtgtttattaaaaaaaattgggttaatcttggcaagaaaaagcaagatttgtgatatttttgtgtgctcaattctcattccccttgccccagctctgtggtaaccttcaaaatcaacagccttggagccctgatacctgtgaaaattagcagtcttgccacaactaactggagaggggcaggatgggcttggagtgccccctaaaagctccatctccagagaattgtcactctctgacctccctggaaaagcctcattcacaggacttatctttatttgcctgactcagagttcactcagaaaagccctactcctagggwatttttcaaaaaacagctgcaacggtttcacagtaagctgcttgagtcagtgataccacctggggcaaagggctggccaagaaacttaaaaaaaatctaaggaatgaaatatccacagggatctttgtaaaagtttaac

SEQ ID NO: 625161 - DNA, 517 bp, Homo sapiens
ctggtttttcctctgaaagtacagggctgggagccagaaatccaggcctgccaactatggcttgaggtaagtcttcctacccttcagtttcgttagctgcaatatggaaatgattgtctattccaacttcttataaaaatgcyctggagaaattgtctcaacaatgtaagctacaacacctctctggtatacagctaccatggatgtcaggtacaagtgaaaaccaagtaaaaaaatatgaccagcgtgagtcagagtttttaacaagccaagccacccccttggtgttcggcactggaatgctttccttatacataacatccagccacaatcagagccaggcttggagactctgagttccacagggagagacagctgcagtcaggctgcgatcctggagagccgagtggctcctgcgtgtgtgggcaaccccttcttggagtaaacctgttaatatcctctgctcacagacatgacttcatgcaccaagcacacagtctctccagttttccaaggg

SEQ ID NO: 625162 - DNA, 517 bp, Homo sapiens
ctggtttttcctctgaaagtacagggctgggagccagaaatccaggcctgccaactatggcttgaggtaagtcttcctacccttcagtttcgttagctgcaatatggaaatgattgtctattccaacttcttataaaaatgccctggagaaattgtctcaacaatgtaagctacaacacctctctggtatacagctaccatggatgtcaggtacaagtgaaaaccaagtaaaaaaatatgaccagcgtgagtcagagtttttaacaagccaagccacccccttggtgttcggcactggaatgctttccttatacataacatccagccacaatcagagccaggcttggagactctgagttccacagggagagacagctgcagtcaggctgcgatcctggagagccgagtggctcctgcgtgtgtgggcaaccccttcttggagwaaacctgttaatatcctctgctcacagacatgacttcatgcaccaagcacacagtctctccagttttccaaggg

SEQ ID NO: 625163 - DNA, 616 bp, Homo sapiens
catggctctgtccttcccaacccctttacctacctcagaccaggctcctgttgcagatacccagtgcagattaatgagtgcctggccttggtggcagagtccacagcagactgtccccacaggatcctggagctcaccactggaatctggaacctgatgtagcctcaggccaaatctcagttcttgccagtctaggcacccagagagctgcctctgttccaaaccaacccataggcctgcaccccagggagcaaggctcagtgggaaagaatgtgttcctaatatccatgtcatcagtttcgtttctttctctgaatttcctgactgggctgtggatgcttccatgctgcctcagagagaaggcccaaagatgcaatgctttccatgccataacttcctctcattcctgcaggcagctttgggtgcagtccagcctcagagccagtgcaaggggtcctggtgtgattcattggcctctctgttcccagcttacgatatatcctggctccaaagtgaatttttaatcttcwttaaatctttgaagaggagcccaggagaattgagtggcatgaggaaaaaaaaagagagagagagaaggaaaggaaggagaaagcaa

SEQ ID NO: 625164 - DNA, 555 bp, Homo sapiens
caatattttaaaatgtaattaatataaaagcatgtaaaactccatcactacatccttaattgtgggggaaagggtggtacaatccatgactacacaacttactgtcagtcagagaagtacctgtgaaattcataaaagcatagagggcagttcttttcttcaagttcggtccaatattccatcccacatagattccacaggagtgtagtgagtagctcctctatgccagctgacccatcctggctccccatctgtcatragatcctttttctaggccagggatggcaaaccacactctgcacactaaatctagcctgctgcctatttttgtatatgatatgagaataatttttacatttttaaatggtttttaaaaatgtaaaaagaatagtattttgcagtgtgaacattttatgaaattaaagtctcattgtccataaagttttactgaaagagggatgctcatttctttatgtattatgtgtgactgcttttctccacaatggtagagctgtgtagttgaggcagagtgaattcacacaaagccctttacag

SEQ ID NO: 625165 - DNA, 434 bp, Homo sapiens
ctgacccctgctttaacccttggggaagccctatgatatccaggttgtaaggaaatctctcgcttttggacactgtctttccctccccaggggcccacccttcccgattgtgctgcttcttcttggcacacttctcagccagtcacccctgacagcccrtggatgacagggagtggggctggaggcgaggatgagaaaggagcagaggaaaagggctctatccttgtctggtcgcagcctgaagtcaccatacaaccactagcccttccatgccactgggggcaactctgtcatatcttttctggatttataatctagaagaatttctgaatctttctctaccttgagcttattttagtctctctttatgcctagcctcaggaaacgaggggatttaggggagaaaatgtaatctatcctgccacaaatgctct

SEQ ID NO: 625166 - DNA, 619 bp, Homo sapiens
tgttcctgctctgtttttatctctgtcacttccttttctttctttcctttttttctctctattattgtttcttttactgtggtgcactttccactcattttgacccaaacaatagttatccttcttaatgtgttgtggtctagtggaaagcttcttgagcrtcagtgatgagctcagattgaaggacatggagaaaaagacatttggctgtggatgcatgccacccaggtaatcaagatcctggatccagctctgtggcacttcccatggaactactcaaaattgacttgtctttactagcattagacaattagacttaatccccaaatttcatctttttggaacaattgttttgatttccattagctacagttttagtgtttgctcatggatatggttgtcaaatagagaggaaagtctcttctttaatgatcattcatggagctcccatctccacatgataccaaacatttgtgtatttagaaatatctggatgattggccacatttttctgcttctttctccttctcctctttctccaagcacattctcttctccttctcttccatcctctcctcctcctcctcctgtttcttcacctctagataaatggcttgct

SEQ ID NO: 625167 - DNA, 619 bp, Homo sapiens
tgttcctgctctgtttttatctctgtcacttccttttctttctttcctttttttctctctattattgtttcttttactgtggtgcactttccactcattttgacccaaacaatagttatccttcttaatgtgttgtggtctagtggaaagcttcttgagcgtcagtgatgagctcagattgaaggacatggagaaaaagacatttggctgtggatgcatgccacccaggtaatcaagatcctgsatccagctctgtggcacttcccatggaactactcaaaattgacttgtctttactagcattagacaattagacttaatccccaaatttcatctttttggaacaattgttttgatttccattagctacagttttagtgtttgctcatggatatggttgtcaaatagagaggaaagtctcttctttaatgatcattcatggagctcccatctccacatgataccaaacatttgtgtatttagaaatatctggatgattggccacatttttctgcttctttctccttctcctctttctccaagcacattctcttctccttctcttccatcctctcctcctcctcctcctgtttcttcacctctagataaatggcttgct

SEQ ID NO: 625168 - DNA, 563 bp, Homo sapiens
tctagaccaataaaattaagtatcatatacttaatcactgagattcagcaaaactatgacagcgtgaagtgtctcttgggttgtcacccagtggcagctccttttatgttgttacaccaaatttgatgttcataactgagggaaaatacctttcactgatcaatggagaaatacacagaatcagtcccataactaaccatttactttatttctaaaccttaagtaccagcccaacacacaaagggcctcttgaacctctctctaaccacagcattctcacatgcaagccttcaccttcctccagccattcttctgagccttggagccatcaatatattttcgtaagcataaagattttgccaattctcaaktatttcaaatccataaaacatgaagttatttcatagatttctagagacagtaggaaacttaataattcaggttggatacttcatattacatgtaaaagggaaggaggatgaaaagagcattgaaaaccaaggttttgtagaaacagataaatatacctctttcattgcagttagggaggaagaaatagtgaa

SEQ ID NO: 625169 - DNA, 596 bp, Homo sapiens
ccgatttcttagttaattccatgtaacctgttagagactgggctgtgagccacatgagtgcagggaaaataccttaatccatttgtattgaatgtgcctggtgataggaggtatccaataaatatttgttgaaggagcaaacaattaatggatgagtgtgcattactacctctttctttacccctcaagttaaaatttttttgcaaatagcatattggaagtgctacattgaaaggtagsaggaacaacaaaaatatgttacacgaaaatttttagtagaaatgatagctcttaactcctttcaaagaaaaacttagaagactttgcattagccaagaaacaaggtcaaacaactttatgaacaataatatatctgaaaaaagaacaattcctttatccttgaaatatctgaaagagcttatagaaaacattgatctaagagcttgtcaaatatggtattttgccaaatgcttgccatcttcagccatcaccgtattgtcttgcaaagtggggattctcttcccagtccttgcaaacttggcaatttagttcaaatgggactgatctacttatgcttaactgctgacaagcaagct

SEQ ID NO: 625170 - DNA, 516 bp, Homo sapiens
tttatagtcctttatctgggcttctcatagccaccagatgaaccaatcagcatgcacttcctcccctctgaagcccataaaaccccgaacacaggagactggagagackccatgacaacctgccagcagagaggagctacccactccagggtctcctctctgctgaaagctgaacactcctcaagacaccttggtggggcgaaagagctgtaacacaaacagggctgaaacacactccttgcttgccacgatgcaaatggatgagagggagggaacagctacggccctttggggaacccagacctaggagctcaccaagccagggctgtgacaccctctttggggctctgtggttcctggtgtctccaacctgccatgcaccattgtgttccccagtgccagccgtggaagatgcttatggtgcgcctggtccagctgcaaccttgcagggagccagtgtccatgctggcacctggagctgcctgtcctgctgcagccagtgtgcctgggtgtgca

SEQ ID NO: 625171 - DNA, 631 bp, Homo sapiens
aaaccacagagatagcaaatttctttatcagttgtgtttctgactgtaactgccctagacattttgttattcacagaaaattgttgtcttgttttgatcctcttccaaagatgatatataatcagctatagaattttgatagacgttctcaaatgcaggtttctgatagctttggagattgtgacattggtataaaggaaaaacatacaggactcatgaaaagcagaaatgtttatgaatatcaagcaaaagaagagttaaatgaatggattgaactaatagaaaacaagtaattattttgacttttgcttagaacattgctgatctttgttttgtttttcagagtcagtgaaacttattttaagctacttatggcctttrttaattgagatatacttctgtgaacaaaattttgagcatattcatccctctctctttctctgcttggcttccccagaatttggaaactagttgtgagtatccttaactgatggcaatatagttgtttgcatcagtgcaataagaatccattttattttgcaacatgattcaattgaagaaactggttgttttatcaaggctttgactggctgggtatacttcccttaaaggagtcaagctcaacttgcag

SEQ ID NO: 625172 - DNA, 563 bp, Homo sapiens
ttccttggatccctgcagagctgccatctgagcaagcttggactagcctgctggatgatctgagacacatggcccagtcaccactgtcactccagccgacagccagaaaaataccagaagctgactgacagctgggtaaaaatagcatgtgtaagtccaactgagtcctgaaaaatcacacagctgtctggcctaaattactaccccacagaattgtgagtaatcaaaattgttgttgtgttaaagca[315 bp omitted]

SEQ ID NO: 625173 - DNA, 488 bp, Homo sapiens
gattttctcaggcattttcctctactctttcccgtgattcaacagctcactttttataactctctattttcttggagttagccaacttttcaggtagaggaaacacaatctacacaagacactcatttctgacacaaactgcaagttctagggggtccaatttcaataattctccagaagaactctcagagctcactgaaagctgtaatgtaaccattggtaagtatggtttattgcaagaaaaagattcagattaaaattacgcaaggaaagaagggtatagggtagagtccagcaaagtactaaacatagaggttctggtgatgtctcctcatggagtcagggcatgttgctttcctggcattaatatgtgacaatatgcacggagtatcaccagctcaagaagttcccctgagctatggcatccagagttttcaatggagtcccataakgtaagcatgattgattgattaatttcttttatggtg

SEQ ID NO: 625174 - DNA, 419 bp, Homo sapiens
tgccagcacaaggcatctgtaaagcaacttgaaacttgcccattttggcctgggatctaggtagaaagaatgtctactcagagatttttacctgaacatttaccttctttatggtctggaatttaagtttaggctatgtctgggagtctagaaatcttcaaacttaaaaaaaaagtcatacaaaattattttcagactggtgacacttctgtagcatytgtaatacacacattcaagtcatttcaaccatgcaacacgggactcccacagataaagtccagctgaatataacctcacaattcaacattataaacatataagaaaataatccattatgagaagagtcagcaggcatagcagacattagtatcaaacccctatgaatttcagatttagaactaagaaattttaacgtaagt

SEQ ID NO: 625175 - DNA, 683 bp, Homo sapiens
gaaaaataaaaaccacatttataatagcaaaagacataaaatatctatggaaaacaactagaactgtagacagctataggaagagaactgtaaaattcacatgatgtacacacaatgtagacttgaacaaacagaaaaatttaccatgttctagggtaggaagaccctacattattaagaaaagtctatttttgagttaattgatatatttaatgcaatctcaataaaactacaaaaatttttttttggtggaactttaccagctgaatctgaagttgatatggaaaaacaagctacaataatcaaattaaaaatgggcaaaagcatgaattgttaattcacagaaaaagtgaatatataaattggatgctgaaccatactcataataaaaaattcaaataaaacctacattgaaatgtcagattttaccaattgaaatagaaaaaagtcaaaactttggtgacacattttattgtaaaggctgtgggaaaaaaagactctcttacacctggctaacaatatttataaaaattttaaaatgcattacacattggtccatctgtttagcttctgggaatttttacatacatartcattcctcacaaaatattgggaacactccaaatgtccatctatggggtactggttaaataatctttgatatagccacatgttggaatatt

SEQ ID NO: 625176 - DNA, 595 bp, Homo sapiens
tgatgagtcactgtatataaatgtgttccaagtgtattgacaaaagaggaggaggcttgacataaagtgcttgctatcttagaaataaaacatttgttatattgggaaatttgttcattttttattattgcaattactaacaagttttgcctcattggttgcctcagaaggtaattcacaggcaagagcaatgagccaaatttgaagaattaaaaatggagagatagaaactcctttcccttggatcttcccgagtgggcaacttttacagttgagtctgctgaagcttccatatacaatattgctgtcttcaataagcactacatttttttcctgctctttgtgcatgaggtgggcaggatttcatayatcatgttcaactgaattggagattctgcaaggacagacgtctttagaaagttaatgaatgagaaacttgccagtggatcattttctgtagggagaggtggtagaattattgaaggtttgactccaatgtttgagtctagctacgctgagcagctttgcacacagttaccaccactgatttccttttcattgcatggcactgacaggttatgatagcaaagccatt

SEQ ID NO: 625177 - DNA, 593 bp, Homo sapiens
caggtttctccctccttggtctctgctaaattctgtttctccttttccaatattcattatgtccctcccagtcagtatgatytggtaccttggttccttaaaggcagactgtaacataaagtactttgtagtttttattttacttttaaaaataaaatccattcccaacctatcaaacagatatattaattatagctattctggcatattatttccaaactttttttgtatgtttatgtgtccacatatgcactaattttggtagaagaggaaataacttattttttttctgttgtttctgtattatttcccaccccctgctataacaacactacatttcttttaaaagaaaacaacctatatatccccaaaggacataggtaaataatggcacatgtctaccatggaataccaagccactattaaaattatttataggaatatttaaaggtacaggaaaaatttctcaatatgtcacttagtaaacaaatttgcctgaaattacataactagaataagcttcttctttttttgttaaaaataggcatttatctaaaagtgtatttatgattccagagaagcagatctggtca

SEQ ID NO: 625178 - DNA, 604 bp, Homo sapiens
accaataccacagaaatacaaaagatcattcaaggttactatgaacacctttatgcacacaaactagaaaacctagagaagatggataaattcctggaaatatacaaccctcctagattaaaccaggaaggaatagaaactatgaacagacaaataacaagtaacaagattgaaactaataaaaaaattgccaacaaaaaagtccaggaccagatggattcacaactgaattctattagacattcaaagaagacttggtaccaatccarctgaaactattccaaaagatagagagagaatcctccctaaatcattctatgaaaccagtatcacccctaatacccatacccggaaagaacatcacacaaaaaaagaaaactggagaccaatatctttgatgaacatagatgcaaaaattctccacaaaatacaatactgctatacaccaacaacgaacaaactgagaatcaaatcaacagctgcagaaaaacaaaaaacaaaaacaaacaaaaaaacttaggaatatacctaatcaaagaagtgaaagacttctacaaggaaaactgcaaaacactactgaaagaaataacagaggacacaaaca

SEQ ID NO: 625179 - DNA, 530 bp, Homo sapiens
tacctgttgtccagtgcctgaaggcaattgcatcatggtttattccatttatattgacttttggtgaggttattgtatttgcttttttcagacaaggattagtctggtgccagttcctccctcctggccacaagcagaagttgatktatttattaatctttttttttttttttttttgagatggagtcttgctctgtcaacaggctggagttctgtggtgcaatcttggctcactgcaacctccgcctcccaggttcaagcgattctcctgcctcagcctactgagtagctgggactacaggcatgcaccagcacacccagttaatttttatatttacagtagagacagggtttcaccatattggccaggatggtcttgatctcttgacctcgtgatctgcccacctcagcctcccaaagtgctgggattacaggcgtgagccaccatgcccagccaaattaatctttttttaattagaaatactatttaatgctgctaaatttctttttgctggcatttgaattttgat

SEQ ID NO: 625180 - DNA, 530 bp, Homo sapiens
tacctgttgtccagtgcctgaaggcaattgcatcatggtttattccatttatattgacttttggtgaggttattgtatttgcttttttcagacaaggattagtctggtgccagttcctccctcctggccacaagcagaagttgatgtatttattaatctttttttttttttttttttgagatggagtcttgctctgtcaacaggctggagttctgtggtgcaatcttggctcactgcaacctccgcctcccaggttcaagcgattctcctgcctcagcctactgagtagctgggactacaggcatgcaccagcacacccagttaatttttatatttacagtagagacagggtttcaccatrttggccaggatggtcttgatctcttgacctcgtgatctgcccacctcagcctcccaaagtgctgggattacaggcgtgagccaccatgcccagccaaattaatctttttttaattagaaatactatttaatgctgctaaatttctttttgctggcatttgaattttgat

SEQ ID NO: 625181 - DNA, 409 bp, Homo sapiens
cagctgttgtaaaatatgaggcaaatgaaattgaatgcagcttcattaatgaattcagactcatctagcatgaactctggtgatttggaaattaaataaaagaatcttagttatttgataccttttccacatatttcattaaaaactctgtctaaaatgataaaattatatatttggattataaactacctattgccaacaaaatktattccaagatgtggcaattttcttctttcatcaggctgctggctgagaaagtcaggctttgatttctcccttctctttcatagacattaacaaattaaaaataagattaataatttatcaaaaatgagctgaatattttcttctatttcccagctagacagcagtgctgtcttactttaaaaccaatctttattttatattg

SEQ ID NO: 625182 - DNA, 519 bp, Homo sapiens
cctttaattatcctttaggataaaataaggtcaaactcttttagatatttaaattttgaaactccttattttttaatggtataactaactctggctttaccacataaattctgatatctaagggaaaatttgacctgtggatactgtgaaccctgaaaatctgagataggtctcagttaattattttttttttttgagrcagagtttcactcttttgcccaggctggattgaagaggcacaatcttggttcactacaacctccaatctccaggttcaaggattctcctgcctcagactcctgagtagctgggattacaggcatccaccaacatgcctggctaatttttttatttttagcagagacggggttttgccatattggccatgctggtctcaaactcctgacctcatgtgatccacccgccttggcctcccaaagtgctgggattacaggcatgagccaccgtgagcagccaaatctcagttaatttagaaagtttattttgccaaagttgagg

SEQ ID NO: 625183 - DNA, 577 bp, Homo sapiens
gaatgggaggcaggtttgccttcagcagttcccagcttggctttttcctttagcttagtgattttggggccccaagatattttcatttcatatttcctcccttttctttttaaaaatattttggagaaagcattttataaaaaaatgagtctctcatctcaggtctcatttgatctctcatggctaggatggtttattcctagacaggtaggtcccaagttattaggaaagctcatatttagaagatygtaaagtctcatgtcctatgaagagaaaatagggggatgaagggaataaaacaacaacaaacaaaagaacaatcctggaaaatcaatataggccacattactctgaagtccatacatcagtaggtagatatgaaagtggcttatatatataaataagttgctgttattttcttttgaagtttaagttgtctagcttaagtttgcagggatttatgaaagcacagcctagttttcagtgactccaaattaggaaaaatgggaaaaaaggaaaataattgaaaacattattttgaagacttgcagccaagaaaaattagaattcagttcaa

SEQ ID NO: 625184 - DNA, 577 bp, Homo sapiens
gaatgggaggcaggtttgccttcagcagttcccagcttggctttttcctttagcttagtgattttggggccccaagatattttcatttcatatttcctcccttttctttttaaaaatattttggagaaagcattttataaaaaaatgagtctctcatctcaggtctcatttgatctctcatggctaggatggtttattcctagacaggtaggtcccaagttattaggaaagctcatatttagaagatcgtaaagtctcatgtcctatgaagagaaaatagggggatgaagggaataaaacaacaacaaacaaaagaacaatcctggaaaatcaatataggccacattactctgaagtccatacatcagtaggtagatatgaaagtggcttatatatataaataagttgctgttattttcttttgaagtttaagttgtctagcttmagtttgcagggatttatgaaagcacagcctagttttcagtgactccaaattaggaaaaatgggaaaaaaggaaaataattgaaaacattattttgaagacttgcagccaagaaaaattagaattcagttcaa

SEQ ID NO: 625185 - DNA, 577 bp, Homo sapiens
gaatgggaggcaggtttgccttcagcagttcccagcttggctttttcctttagcttagtgattttggggccccaagatattttcatttcatatttcctcccttttctttttaaaaatattttggagaaagcattttataaaaaaatgagtctctcatctcaggtctcatttgatctctcatggctaggatggtttattcctagacaggtaggtcccaagttattaggaaagctcatatttagaagatcgtaaagtctcatgtcctatgaagagaaaatagggggatgaagggaataaaacaacaacaaacaaaagaacaatcctggaaaatcaatataggccacattactctgaagtccatacatcagtaggtagatatgaaagtggcttatatatataaataagttgctgttattttcttttgaagtttaagttgtctagcttaagtttgcagggatttatgaaagcacagcctagttttcagtgactccaaattaggaaaaatkggaaaaaaggaaaataattgaaaacattattttgaagacttgcagccaagaaaaattagaattcagttcaa

SEQ ID NO: 625186 - DNA, 574 bp, Homo sapiens
agcatcatctaccatgcctgaagatgaggttttaattgctgtcaatgtttaagatttagcaagacttgctgtttttttagacctaggagtcaaagccctgtaactcaatgtcacagagactttaaaagcacatacaggaagacacaaggatgtaataaccttcattaatttttttaaatctcagtttttcctaagcaaaccaaacttaaaaataatggcatataaattattttgataaaacataaaatcttttaggccagttaccaaaacgcaaactaaaaggacttctgcagtgcacagaatatgtcagaagaaaaaatttttttagacctttaagaaaacattgttagcrttaggccacaaaaatcagaacccaagaaggaaaaaaaacttatatgagctgaaaatgtgttgaaggggcatgttgctattttgtgcctttgaacaggggagagaaaaccaaaactggcaagatgaaataaaagttgaaccttgggataaaataaaaaaaattaaatctcttaaaatttatttaatcaacccctaagaaaattttattgttctaaccaattct

SEQ ID NO: 625187 - DNA, 574 bp, Homo sapiens
agcatcatctaccatgcctgaagatgaggttttaattgctgtcaatgtttaagatttagcaagacttgctgtttttttagacctaggagtcaaagccctgtaactcaatgtcacagagactttaaaagcacatacaggaagacacaaggatgtaataaccttcattaatttttttaaatctcagtttttcctaagcaaaccaaacttaaaaataatggcatataaattattttgataaaacataaaatcttttaggccagttaccaaaacgcaaactaaaaggacttctgcagtgcacagaatatgtcagaagaaaaaatttttttagacctttaagaaaacattgttagcattaggccacaaaaatcagaacccaagaaggaaaaaaaacttatatgagctgaaaatgtgttgaaggggcatgttgctattttgtgcctttgaacaggggagagaaaaccaaaactggcaagatgaaataaaagttgaamcttgggataaaataaaaaaaattaaatctcttaaaatttatttaatcaacccctaagaaaattttattgttctaaccaattct

SEQ ID NO: 625188 - DNA, 360 bp, Homo sapiens
aagattcttgataacctgttttacaagcctagacccttgtcagctaagtagccataaatttggatagtaaaggaaacaactcaggtgaaaatcaaatagcaaaatttacctcataatgtacagagaggaaaaaatctggcagtattagagggagattaaagatggatgccaaatcaaacataaaattacagaaatctgtcacaggattgtataaggagaccagttttgtttagataaggaccacctatcttttaactggatctctgttctgtgggcagaacccacrgtgaatcctgaatctccaaaaagggagaattattatgaggttagaccaccttatgcttctacagtgcacttaaa

SEQ ID NO: 625189 - DNA, 612 bp, Homo sapiens
gtgtctaacatttttgaacttatttagaggaagataacttttttaccatagggttttcttgaaaatttaaggtgcattgcaaagctgtatttaggatgatgccaagaaagaaaacagcagctatcttccagccaatctctgagaatcactaatataatctaccagaaatgatatttaagcagacaggtaaataaaaccagaactcaaagccataatttaaataaatggctaatattgctttaatgatgttctttaggtcctcatgctatgttggagagagccaagaatgagaagtagtgcttctaggcctgtstgtcttacccacaacccaccttgacagctataaatgggaaaggtgatacctgactcaaaggtggggcctcagtgttgctgcccttagtcttattttggtcttggttttagcacttatttcaaaatagagcaggaggctgggctataattatctaacacctagaaactcccaagctccgtctctttccaacatttacatctaaaataatataggtagtagttaagatcttgggctctgaggacggaggacttaggtgccaatgtcacctctgcttcttactggtggtgtgacattgaaca

SEQ ID NO: 625190 - DNA, 490 bp, Homo sapiens
tccttactgtataattcatcctagtcccaatctctccagtctctgaaagaattcacattatgtgctaagagagtattaactcacagacagctttcctgggaggttcccttttcagctctcctggaagctctcacaagagtcagcactttgtgaaatttggcccctgagtgtgtaggatctgggctgtatcacatactgatctttgggtctctccatgtccatcagccttaaatcagacaattacccacatgctgaccaacccacatatccactggagcaatgcaaaatgctgtatgaaaarcagcatgcagataatcatcaaacagctaattttaagagttgaggaaatccaggaagagagttttgtaacaggccttagaaaaatatggcctgatttctccctacactggggagtgggacaccagccagcatattttctgcaagtcttggcaggaggagggctgggtaacaagtctcatgtgaccaggta

SEQ ID NO: 625191 - DNA, 509 bp, Homo sapiens
tctgacacaataatagtgggagactttgacccccactggctatattagacagatcatcatgacagaaaggtaacaaagttattcaggacctgcactcagctctggatgaagtggaactgatagatatctatagaactctccacctaaaaacagaagaatatacatttttctcattgccacatggcacttactctaaaattgatcacataatccraagcaaaacactcctcagcaaaggcaaaataactgaaatcataaaaaacagtctctcagaccacagcacaatccaattagaactcaagattaagaaattcactcaaagctacacaactacacaaaaattgaacaacctgctcctgaacaactcttaggtaaaaagtgaaattcaggcagaaatcaagaagttctttgaaactaatgaaaacaaagatataatgtaccagaatctccagaacacagctaaagcagagggaaatttatagcactaaatgcccacattaaacagctag

SEQ ID NO: 625192 - DNA, 640 bp, Homo sapiens
agactgtcaggttcaaaacccagcagctccactcactagccagtgaccttgaggaagttgcttaatctctgtgtctgtgtttcttcatgtgtaaaatagtaatggtaataataacacctctttctcggattgctatgaggattcattgactgttccatgtagggtactaaaaacaatgcccagcacacagtagcactcgagaagtgacaccttggtattatcaagagcagaaagtgtattattccccttaaaatmtcactgggtacatgatatagtaccaggtacacaaaaagtactcagttaacaaaatgaatgattgtgacaacaaccagtcagctctaatcagctgcaaaattgtgtttcttatttccatcaatgaccaaaagggctgtacattctccaagtcccacccaagtttcatgtccttgagagtttttggtaagtgtttgttttggagaaacttccagttattacatttcagatatcactttctgtagaaggaagacaaagacaacagcaacaagaaagccaaggtccatttaattcctgcccttgggagccacatttttaaacttttttgtggacacgtgagtctagcagcagttgaacaaagcccattcaaacctctagttctttaata

SEQ ID NO: 625193 - DNA, 541 bp, Homo sapiens
aatgaaaacaacttgatacgtttggagataagtatacactcatgaaaccatcactacagtttatgctgtaaacttatgcatcacctcccaaaattccttcctgctgtctttgcttattattattattattcttttgtgataaaaacacaacataagatctaccttcttggcacagttttaacacacaatatggtattgttaactatagacaccatgcagtataggagatctctaagacttacttatcttgtgtaagcaaaattttgtatcctttgactaatgcctccttgtttcctcatcttcccagcccttgacaaccaccattccactctccacttctatgagtttgtttcagattcataatataagtattattgtcaccactaggtattgttctcatgaaagcaggaccagggatctcttgcttgccycatgtcccagtctccagcagaggccctggcccaggtgggtggtcaggaaaaagctgttgtaaagttgaataaatgaataaaccgacaaaaaagtggttgaataaaaggat

SEQ ID NO: 625194 - DNA, 586 bp, Homo sapiens
tcattttgcattttatacataaataatcagattatttctggagtatttcccctaatttattaaaggtatcactcrgttctgcaaaaacatattacaatgaccaattgggaagcaatctcaaaccaagcaaggctaacatttagatgctacctattaaacaaagaaaattttaattgtcctcattgcaatgatctttcatgatttaatattactaatgctactattattctcaatttttacattgtgagtatagcactttccagtttaaaagagggtatgtgtaaagtatttaattatttcagattcatacaaccgcactatctatagattagatcaggagttaactttttttccgtaaagggccaaatagtaaatatttcagtcttgccagtcatataatctttatgttaatttactcagctctgcttttgtagcataaaagcagccaaagacaataagtaaacgaatgagtttgcccttaaaactttattttcaaaaacaggtgcacactggattgggcttctgggctgtagtagtttacccaactctgaattaaattatgtatgatttatcatccctccttttg

SEQ ID NO: 625195 - DNA, 586 bp, Homo sapiens
tcattttgcattttatacataaataatcagattatttctggagtatttcccctaatttattaaaggtatcactcagttctgcaaaaacatattacaatgaccaattgggaagcaatctcaaaccaagcaaggctaacatttagatgctacctattaaacaaagaaaattttaattgtcctcattgcaatgatctttcatgatttaatattactaatgctactattattctcaatttttacattgtgagtatagcactttccagtttaaaagagggtatgtgtaaagtatttaattatttcagattcatacaaccgcactatctatagattagatcaggagttaaytttttttccgtaaagggccaaatagtaaatatttcagtcttgccagtcatataatctttatgttaatttactcagctctgcttttgtagcataaaagcagccaaagacaataagtaaacgaatgagtttgcccttaaaactttattttcaaaaacaggtgcacactggattgggcttctgggctgtagtagtttacccaactctgaattaaattatgtatgatttatcatccctccttttg

SEQ ID NO: 625196 - DNA, 586 bp, Homo sapiens
tcattttgcattttatacataaataatcagattatttctggagtatttcccctaatttattaaaggtatcactcagttctgcaaaaacatattacaatgaccaattgggaagcaatctcaaaccaagcaaggctaacatttagatgctacctattaaacaaagaaaattttaattgtcctcattgcaatgatctttcatgatttaatattactaatgctactattattctcaatttttacattgtgagtatagcactttccagtttaaaagagggtatgtgtaaagtatttaattatttcagattcatacaaccgcactatctatagattagatcaggagttaactttttttccgtaaagggccaaatagtaaatatttcagtcttgccagtcatataatctttatgttaatttactcagctctrcttttgtagcataaaagcagccaaagacaataagtaaacgaatgagtttgcccttaaaactttattttcaaaaacaggtgcacactggattgggcttctgggctgtagtagtttacccaactctgaattaaattatgtatgatttatcatccctccttttg

SEQ ID NO: 625197 - DNA, 586 bp, Homo sapiens
tcattttgcattttatacataaataatcagattatttctggagtatttcccctaatttattaaaggtatcactcagttctgcaaaaacatattacaatgaccaattgggaagcaatctcaaaccaagcaaggctaacatttagatgctacctattaaacaaagaaaattttaattgtcctcattgcaatgatctttcatgatttaatattactaatgctactattattctcaatttttacattgtgagtatagcactttccagtttaaaagagggtatgtgtaaagtatttaattatttcagattcatacaaccgcactatctatagattagatcaggagttaactttttttccgtaaagggccaaatagtaaatatttcagtcttgccagtcatataatctttatgttaatttactcagctctgcttttgtagcataaaagcagccaaagacaataagtaaacgaatgagtwtgcccttaaaactttattttcaaaaacaggtgcacactggattgggcttctgggctgtagtagtttacccaactctgaattaaattatgtatgatttatcatccctccttttg

SEQ ID NO: 625198 - DNA, 578 bp, Homo sapiens
gcaggtcctatatggttggggtcctaaaggcagaaagcttctaccagagcccagtgaatctttctacttgcaaaggctctgtgtatgctgagatgaattgagaaggatgcacccctggtggaatcaagaaaaatttaaccttcagaaaatagtcaaaattaaacactctttaatgcactgagacatatttcagtagagagttaaaaaatcaggtaatgrgagcagcatggtttatggacaagttgttgatgtctataatcctcatttgcctcatatgcaaaatgagaatacagagatctatctcagtttttggtgaggatcaaatgagaaaatgcttgccgcagggcccattggcaggtatgtaattggtagatgttgctaggaagcagtaaaatgtagtggttgtagcagctatgactcatactagctgtatgaccttagtcaagttactctgtgcctcagcgttcacatctgtaaaatgagggataaggatattacccgtggtatgtggtactttaggaaattaagctagctaacatgtgtaaggcaccaaggacagcacctgctgcctggtgagc

SEQ ID NO: 625199 - DNA, 578 bp, Homo sapiens
gcaggtcctatatggttggggtcctaaaggcagaaagcttctaccagagcccagtgaatctttctacttgcaaaggctctgtgtatgctgagatgaattgagaaggatgcacccctggtggaatcaagaaaaatttaaccttcagaaaatagtcaaaattaaacactctttaatgcactgagacatatttcagtagagagttaaaaaatcaggtaatgggagcagcatggtttatggacaagttgttgatgtctataatcctcatttgcctcatatgcaaaatgagaatacagagatctatctcagtttttggtgaggatcaaatgagaaaatgcttgccgcagggcccattggcaggtatgtaattggtagatgttgctaggaagcagtaaaatgtagtggttgtagcagctatgactcatactagctgtatgaccttagtcaagttactctgtgcctcagcgttcacatctgtaaaatgagggataaggatattamccgtggtatgtggtactttaggaaattaagctagctaacatgtgtaaggcaccaaggacagcacctgctgcctggtgagc

SEQ ID NO: 625200 - DNA, 491 bp, Homo sapiens
gtagactggataaagaaaatgtagtacatacacaccacggaacacaatgcagccataaaaagggataaaatcacatcctttgaaggacatggatggagttggaagccattatcctcagcaaactaatgcaggcacagaaaaccaaaygctgcatgttctcatttataagtgggagctgaatgatgacacatggacacatactggggaacaacacacactgggggcctactggagggaggtgcggggcaagaaagagcatcaggaagaatagctaatggatgctgggcttagtacctttgttatgggatgatctgagcaacaaaccatcatggcacacatttacctgtgtaacaaaactgcacgtcctgcacatgtaccactgaacttaaaatgaacattgaagaaaaaataaaaagataaaagaagagtcattcacacattaaactctcaaatattagctaatatttaaagtagatggtatgatatattac

SEQ ID NO: 625201 - DNA, 491 bp, Homo sapiens
gtagactggataaagaaaatgtagtacatacacaccacggaacacaatgcagccataaaaagggataaaatcacatcctttgaaggacatggatggagttggaagccattatcctcagcaaactaatgcaggcacagaaaaccaaatgctgcatgttctcatttataagtgggagctgaatgatgacacatggacacatactggggaacaacacacactgggggcctactggagggaggtgcggggcaagaaagagcatcaggaagaatagctartggatgctgggcttagtacctttgttatgggatgatctgagcaacaaaccatcatggcacacatttacctgtgtaacaaaactgcacgtcctgcacatgtaccactgaacttaaaatgaacattgaagaaaaaataaaaagataaaagaagagtcattcacacattaaactctcaaatattagctaatatttaaagtagatggtatgatatattac

SEQ ID NO: 625202 - DNA, 616 bp, Homo sapiens
ctgtctagcttgctccctgctctatccaacactgccacagtgaagaacactcaattatattcattgaatgaacaaaataaggttcgataaatccattaatgccaaacacctygggcattgtcttgacccacttatccccaaggttgcaattttttgaatttttgcacccagaccttggtgatgacctttagcagtaggatgtaaataacgcccacatgcttaacattccaataatggaacactaagcataaatgtataatgctgcaagtgctctgccctaattttgcctcccttggctactagcattccaccagtcagggcacagcctttcaaatcagttcaggagctatcactgctgagggcagcttgaatcttttcctagtatgtgccacaatacaggacacgaatggtgccaggcagtctctctctgtctccccccatatcttttatccctatctctatttttataaatttttcaataaattttacacaaaaattcactgaatacattttctatattttatagtttttaaataaattgtaatgtggaatttcagcatctaagatcacataccccactagtttgtcagccccaggcacctgattacaattggtt

SEQ ID NO: 625203 - DNA, 500 bp, Homo sapiens
ttaatagactggatttcatgcaaataaaaaatgtctgcctttgaatgatactgttaatggaattaaatgacaagccactgactgggagaacatacctgtaaatcatatatctcataaggcatttgtatctggaatatattaaaaactctcaaaacccaacaataagaaaacaaacaacccaattaaaaagtgggcaaaatatttgaatagacacatcaccaaataagacgtatggatgagaaataagraagtgaaaaaatgcccaacatcattattcatgtgaaaatgtgaattaaaactgcagtgaaatatattagaattgctaaaacaaaacaaaacaaaaccctgatcacatcaagcattgctgaggatataagggaatgggaagactcaggcactgctgttggcaatgtaaaatggtacacatattttggaaagtaggttggtgatttcttcagtttacatacttaaacatactaatatacatctatcatagaatt

SEQ ID NO: 625204 - DNA, 500 bp, Homo sapiens
ttaatagactggatttcatgcaaataaaaaatgtctgcctttgaatgatactgttaatggaattaaatgacaagccactgactgggagaacatacctgtaaatcatatatctcataaggcatttgtatctggaatatattaaaaactctcaaaacccaacaataagaaaacaaacaacccaattaaaaagtgggcaaaatatttgaatagacacatcaccaaataagacgtatggatgagaaataaggaagtgaaaaaatgcccaacatcattattcatgtgaaaatgtgaattaaaactgcagtgaaatatattagaattgctaaaacaaaacaaaacaaaaccctgatcacatcaagcattgctgaggatataagggaaygggaagactcaggcactgctgttggcaatgtaaaatggtacacatattttggaaagtaggttggtgatttcttcagtttacatacttaaacatactaatatacatctatcatagaatt

SEQ ID NO: 625205 - DNA, 500 bp, Homo sapiens
ttaatagactggatttcatgcaaataaaaaatgtctgcctttgaatgatactgttaatggaattaaatgacaagccactgactgggagaacatacctgtaaatcatatatctcataaggcatttgtatctggaatatattaaaaactctcaaaacccaacaataagaaaacaaacaacccaattaaaaagtgggcaaaatatttgaatagacacatcaccaaataagacgtatggatgagaaataaggaagtgaaaaaatgcccaacatcattattcatgtgaaaatgtgaattaaaactgcagtgaaatatattagaattgctaaaacaaaacaaaacaaaaccctgatcacatcaagcattgctgaggatataagggaatgggaagactcaggcactgctgttggcaatgtaaaatggtacacatattttggaaagtaggttggtgatttcttcagtttacatacttaaacatamtaatatacatctatcatagaatt

SEQ ID NO: 625206 - DNA, 535 bp, Homo sapiens
tcacctcagtaaagctgcataatgaaaaaataagttgttagacagtaggtcacaagccattctccagtcctgttttacaagtgataaagctggcataaaaatcggtatcatgtttatttggcttttgtttttaactgtctgctatcagtggttagagctgagagcggagggtggatgtgtggttagcacagctaaaacttcaagaaggttaactgtatttttcaagtgaatattgcttgtggcataaaatgttttcstattcttgaaataaaagcatgggccagctcttaaaattgctggctctgtcactagaggttttcaaacaacaattcaggcaatcacttgtcagtgaggccagtgaaatggtagcattaattcttcagaggagtagagaattcacctaaatcaacctcctcattttatggacgtgaaactagagaaagttattttacctttctggtcctgagtcacacagttcatatatagccatgtgtagaaaaaaatcccaactctctttattctcgtgtagtctgtg

SEQ ID NO: 625207 - DNA, 535 bp, Homo sapiens
tcacctcagtaaagctgcataatgaaaaaataagttgttagacagtaggtcacaagccattctccagtcctgttttacaagtgataaagctggcataaaaatcggtatcatgtttatttggcttttgtttttaactgtctgctatcagtggttagagctgagagcggagggtggatgtgtggttagcacagctaaaacttcaagaaggttaactgtatttttcaagtgaatattgcttgtggcataaaatgttttcgtattcttgaaataaaagcatgggccagctcttaaaattgctggctctrtcactagaggttttcaaacaacaattcaggcaatcacttgtcagtgaggccagtgaaatggtagcattaattcttcagaggagtagagaattcacctaaatcaacctcctcattttatggacgtgaaactagagaaagttattttacctttctggtcctgagtcacacagttcatatatagccatgtgtagaaaaaaatcccaactctctttattctcgtgtagtctgtg

SEQ ID NO: 625208 - DNA, 568 bp, Homo sapiens
ttttgtctttttgataataggcattcttacaggtatgaggtggtattttatggttcaaatttgcacttccctgatgattagtgatgttcagcattttttagtacacaggcatggcttgctttattgcacttcaccttattgtactttgcagataagctttttacaaattgaagatttgtggcaaccctgtattgagcaagtctattggtgccacttttccaatagcatgtcctcgctttgtgtctctgtgtcacattttggtaattactgcaatattgcaaatttttcttcattgttatatctgttatggtgaacagtgatctttgatgttactattatagttgtcttggggcacaccaaatcccacccaaataagactgaatttaattgataaatgttgtatgtgttctgactgcttcactgactagctaatccctcgtctctctccatcttctcaggctttcctattccctgagacacaacaacattgaaattaggtcaaycaaaaactacaaatgattaagcttagtgaggaagccatgtcgaaagccaagatatgctgaaagct

SEQ ID NO: 625209 - DNA, 463 bp, Homo sapiens
accagccacaatgttcccttaagcaaaagcctaatccagagaaaggccctaactttcttaarttgtatgaaggctgagagaggtgaggaagctgcagaagaaaagtttgaagctagcagaggtgggttcatgcggtttaagaaaaaaagccatctgtttaacataaaactgcaaggtgaagcagcaactgttgatataaaacctgcaggaagttattcataagatctagctaagatcatttatgaaggtggttacactaaaaaaacagatttttaatagagacaaaatagccttccattggaagaagatgccatctaggcttttcatagctagagagaagtcgatgcttagctttgaagcttcaaatgacagcctgactattttgataggggctaatgcagctggtgattttaagttggagccaatgctaatttaccattctgaaaattctagggtgcttaag

SEQ ID NO: 625210 - DNA, 463 bp, Homo sapiens
accagccacaatgttcccttaagcaaaagcctaatccagagaaaggccctaactttcttaaattgtatgaaggctgagagaggtgaggaagctgcagaagaaaagtttgaagctagcagaggtgggttcatgcggtttaagaaaaaaagccatctgtttaacataaaactgcaaggtgaagcagcaactgttgatataaaacctgcaggaagttattcataagatctagctaagatcatttatgaaggtggttacactaaaaaaacagatttttaatagagacaaaatagccttccattggaagaagatgccatctaggcttttcatagctagagagaagtcratgcttagctttgaagcttcaaatgacagcctgactattttgataggggctaatgcagctggtgattttaagttggagccaatgctaatttaccattctgaaaattctagggtgcttaag

SEQ ID NO: 625211 - DNA, 507 bp, Homo sapiens
ctgtctgtgtccttcaatgctgaacttagcttatgctgtaatttttttctaattttttttctcctactgcctgcagatattcaagtaaataaggcactctggattttaaactcattcatctgataatgtttttacatgatctgaagtcatttcatcattaattttctcattaaactatggatacaacaacagatagatatttgtatttttagtagagacrgggtttcactgtgttggccagactgatctcgaactcagatattcaactaaataaggcactctggattttaaacacattcatctgataatgattttacatgatctgaagccatttcatcattaatgttctcattaagctgcatgcaacaacagatagcgactgaggagctgcacctgtggacgtgggtcggcgggagtggtaaggcaatgatggaggcacaaccttgatgttaaagacctcgctgtctagaaggaaacacacataagtaaataggcaatcaccataca

SEQ ID NO: 625212 - DNA, 641 bp, Homo sapiens
gtctcaaaaacaaaaccccaaagtaccccaggtgattcytgtgtgcagtgaagtgtgagaaccactgatttaaattaattggttagttcaatatttgttctttcttcaacatgatcttaaaaccagaaatccacatcagaatataacagcaagagagatgtcataaagataatcttgactcaaatgtaaatgactgacatcgttagtcataaatttaaaaaagcattgttagtcacaaagtactcgcagccccgctccctaattgatcaacaaataggttgtatattgttgtctttaaagttcagactctggggcaggggctgtgttttgtctgtgcctcagtttctcacgtgtaaaacaggatgaaaatattcctattgtacaggactattgtgatggctaaatgaggtcacgtgtagcaggtatttagaaaagtccctggcacgccctctctaggcctaagctggacttagccatcatgctaggtcagttgccatcagttaatctgtcttccttgcagataactacctccttgtcttttaagaggagacaaacctgaatcatgaattttgtcctgaagtacattagctggagggaacttgtgaactcaggcacagtggctgacacacagcagcacagga

SEQ ID NO: 625213 - DNA, 641 bp, Homo sapiens
gtctcaaaaacaaaaccccaaagtaccccaggtgattcttgtgtgcagtgaagtgtgagaaccactgatttaaattaattggttagttcaatatttgttctttcttcaacatgatcttaaaaccagaaatccacatcagaatataacagcaagagagatgtcataaagataatcttgactcaaatgtaaatgactgacatcgttagtcataaatttaaaaaagcattgttagtcacaaagtactcgcagccccgctccctaattgatcaacaaataggttgtatattgttgtctttaaagttcagaytctggggcaggggctgtgttttgtctgtgcctcagtttctcacgtgtaaaacaggatgaaaatattcctattgtacaggactattgtgatggctaaatgaggtcacgtgtagcaggtatttagaaaagtccctggcacgccctctctaggcctaagctggacttagccatcatgctaggtcagttgccatcagttaatctgtcttccttgcagataactacctccttgtcttttaagaggagacaaacctgaatcatgaattttgtcctgaagtacattagctggagggaacttgtgaactcaggcacagtggctgacacacagcagcacagga

SEQ ID NO: 625214 - DNA, 358 bp, Homo sapiens
aagtctgatatttcatttcagcagatcatctatccttcagtgtgcggtgtgtaaatcagaattataccttctgtttttcacatcttactcccgacttctttgtatttgattgtatttacctctgtttttttttacctttagaagtttgtatctacagagttttcatcagttgtcatttttaaagattgcttgttaaactaatgtttcacagattcttctaatcatgtgcrcagaaatagggccaaaataattggtaatcacatcatatgccccaccactttaaaactccataaaattatagtgtaactaaatgaacctaaaagaaataatgcaagtgaaatatttaaaaaccctgact

SEQ ID NO: 625215 - DNA, 580 bp, Homo sapiens
ccttcccttttaagttccatttctaggggtatagccctttctacatttgccactctgtgatacttgactttttttctgattgtttaattacctacagctttatgcctaattagaagttatttgatttctctgttcaaataattggtatggcttttgtctctgaacatttaacatttacyctaagctgatgatgggctgtttcagcacatacctgattaaggactagttgtgtttaatttcattttttattttattttaaaagttagagctatatggaacttttacataatccagtccaattccctcattataaagatgcggaaatttaagtttcagaaatggtggtggaggtgacatatggccttcttgtgacttggaattggaattacaactcaagatatcagactaagatagcaaagctttaggagggaaataacagaaaagaaattgacctttaaggcaacagcccagtcctgggggaggtctcaacaaagcactatgtctctacagacaccaggtcttctctggcctcctttggttgggaaattaattataagtttagtttgttggtaggagaggg

SEQ ID NO: 625216 - DNA, 631 bp, Homo sapiens
gtaatggtgaactcagtgagggaggaggtagrggagcctcaaggatgatggttgaagttaagctcagcagagccttgctgtccattgacattggctccttgtgtttgtttacacataagccagaattcaatcatttgttacacctagacaatatttcctttatgggaataaaggtaaatgaaatgcttcacctgcagatgtgccaacaacaaacggggaaagcctggtgagggaccagtctacagggtcctcaaggattatgttctctgcttatcaagatccctgtgaccctctgcacaatgccactaatgctcagaactaaggagatttactttctttgcccctgaaaagaaatacatctctagaaagagtggagatgacagtaactgtactgaaaatggtgaatgcattgattgtgcttccaaggagatccagcctgcaatgcagcaggaatttttgcttttgtaaatatagcaagagaggcaccagccgtgtttggatgtacaaattgcctgaagtactaaaagtgctgcttaataaagagatggaatagactcaaccatctccatcggttttactttgtttttatactcttgggctggacaatttaagttactttcaacagtttgtc

SEQ ID NO: 625217 - DNA, 570 bp, Homo sapiens
gtatgacagcgtctatctttgtatctcctcgtgtttagtacctgttttaacgttacaaagataatayatgtgccataagaagatctttaaaattactgattatatatttttacttaaacatatctctgtatttgaaagtgtgggttgaaaatatctttgtgcttaaagattctcccatatgtaggactgttttttagtatagactccttaattagcatactatcaagtcaaaggttttgaacattttcagaatttgatccaaatcatcaaagagcttacctgaagagggcacactctcatcagcactgtttgagcaccaactgcattcaacactggtcattttcatcttttaaaaaatcttagccattttgactgatgggtatagtatctcctggttgctttcattaacatttctaaaaaatagaacattcttccacatatttattttacaattttatgccctttttaaaaattataaatcatattttatgtccttttatttatcaaggtcttagttgtttatccatttgtacaaactcttgtaagaaaagtttaaaaaccttttgacat

SEQ ID NO: 625218 - DNA, 570 bp, Homo sapiens
gtatgacagcgtctatctttgtatctcctcgtgtttagtacctgttttaacgttacaaagataatatatgtgccataagaagatctttaaaattactgattatatatttttacttaaacatatctctgtatttgaaagtgtgggttgaaaatatctttgtgcttaaagattctcccatatgtaggactgttttttagtatagactccttaattagcatactatcaagtcaaaggttttgaacattttcagaatttgatccaaatcatcaaagagcttacctgaagagggcacactctcatcagcactgtttgagcaccaactgcattcaacactggtcattttcatcttttaaaaaatcttagccattttgactgatgggtatagtatctcctggttgctttcattaacatttctaaaaaatagaacattcttccacatatttattttacaattttatgccctttttaaaaattataaatcatattttrtgtccttttatttatcaaggtcttagttgtttatccatttgtacaaactcttgtaagaaaagtttaaaaaccttttgacat

SEQ ID NO: 625219 - DNA, 540 bp, Homo sapiens
aggactgggttaatggagcactttccccagtgggtaagaagtaaacttatctttagttttactgagcataaggaagcggatggtccaagggtggttggattttggtgtcagaccatcctgagccaaaattccaactcccccacttccccactatttgacccattatatgatctctgaattccattacatgatctctgaattttaatattcccctctattaaacagaaataacaggtatcttgaggctgttgcactgctagtcattatgctcagtcaggagaaatgaggcataaactggaagtggaatggataatagaaggtagccggggaaaagcacttaacaacttcacactyctcttgactttggcaggaaaagagtcaagtgatggcatgtaggtccagaaggaaaacaacttcacactcctcttgactttggcagaaaagattcaagtgatggcatgtaggtccaggagaaaaatatcatctcagctgctagctcccaaatcagatgctatgtaacctgccttgactttttgaagg

SEQ ID NO: 625220 - DNA, 542 bp, Homo sapiens
ccttcctgctttagtcccttcctctatgcaatttctttcctgaactatgtcaatattatgagactgagtttctagaataaagatggccaataggctacatctcatgagctgactctagttaacagtgctgtcctgactttgtatcaagaagaattctgaaagcttgtctgagcttagtgggagaaagtactgggaccgattggtgatgactgtcattggcataggaaaaaagatgtattagcacatgtgccagatacttcctaccctggcatctttcaaaagagatcatgaggaaaataaaagyttataactcataatatggatcaaatatcatggaacccagcatctgagagagggttgttgctgctgtactgacattaaaatatggggaatatagtttaaccttgacattcttgagtaatattatgagagagttttgcaaacccacaatcttaaaaacaatctttagcatctattaaacatttagtgtgagccaggcactattccaagtatttttctttttaattttcacaatagtcctg

SEQ ID NO: 625221 - DNA, 577 bp, Homo sapiens
gattgaatgtgtgatgtgaactgactttaagtaatcaagattgaattccattagcatctgctaccaagtaggaaaaaaaatgtacatggcagtgttttagttggcaatataatctttgaatktctggatttttcagggtattagccatattatccatttttttactgttaattaattgaaaccatagaccaagaagcatcatattataactgaacgcaacgtgtattcatagtatactgatttaatttctaagtgtacatgaattagtcatctggattttttattcttttcagatgggcttaacaaatggagctttctgtatataaacgtggagattagagttaatctccccaatcacataatttgttttgtgtgaaaaacgaataaattgttccacgctggtggaaagatagagattgctcttagaggttggttattgtgtttaggattctgtccattttcttctttttttcttttttttatgattattacactttaagttttagggtatgtgtgcacaacgtgcaggtttgttacatatgtatacgtgtgtcatgttgttgtgctgcacccatta

SEQ ID NO: 625222 - DNA, 592 bp, Homo sapiens
attaaataaataaactctcttggtttaaagattggcatttgcatgagacttaaatgagatgaacacatacaaaatatctgcagccgcgtctagcacacaataaatgctcgttgaatatttgcttttatgttttttgtgattaatggatatgtctgtttaaaataaaatcatcttcaattctagaattctggacaacattgtcttgactgagggattgtcccaaatgaaataaaatatacaatagttgagttgggttgtgtccaagtggctctccctaatggaggtctctggacagcatgaaaaaacagatttaagaccttcagaagttcaccagggaaaatgaagagggcaatggagggaggaggggtaaaagttaaaagaaaactgtctccacttttgttttgtagcactacaggaatgcaacacttcggagacgagartagggttcctcagggcacggccttggaatgtggttcttagaagtaaagaaaggaagatgcagatgctgttaaaactaagttgtggctgtcattatttctgaccctgaagttccactactctgaaccccacagaactatatcagtctccataa

SEQ ID NO: 625223 - DNA, 592 bp, Homo sapiens
attaaataaataaactctcttggtttaaagattggcatttgcatgagacttaaatgagatgaacacatacaaaatatctgcagccgcgtctagcacacaataaatgctcgttgaatatttgcttttatgttttttgtgattaatggatatgtctgtttaaaataaaatcatcttcaattctagaattctggacaacattgtcttgactgagggattgtcccaaatgaaataaaatatacaatagttgagttgggttgtgtccaagtggctctccctaatggaggtctctggacagcatgaaaaaacagatttaagaccttcagaagttcaccagggaaaatgaagagggcaatggagggaggaggggtaaaagttaaaagaaaactgtctccacttttgttttgtagcactacaggaatgcaacacttcggagacgagagtagggttcctcagggcacggccttggaatgtggttcttagaagtaaagaaaggaagatgcagatgcygttaaaactaagttgtggctgtcattatttctgaccctgaagttccactactctgaaccccacagaactatatcagtctccataa

SEQ ID NO: 625224 - DNA, 571 bp, Homo sapiens
ttgggttgtgtccaagtggctctccctaatggaggtctctggacagcatgaaaaaacagatttaagaccttcagaagttcaccagggaaaatgaagagggcaatggagggaggaggggtaaaagttaaaagaaaactgtctccacttttgttttgtagcactacaggaatgcaacacttcggagacgagagtagggttcctcagggcacggccttggaatgtggttcttagaagtaaagaaaggaagatgcagatgctgttaaaactaagttgtggctgtcattatttctgaccctgaagttccactactctgamccccacagaactatatcagtctccataaggtgatgtgcttaggggaggccaaaaccaaaatgatttggagatcatgagacttattggtcccacctactgcaaagtttatttttaagcagggctgtctaaagatataacaggtagggagtggtcaaatcctcttcatgttcacatttctttttactgcacttcgtgtcaccagctcacctccagccaccattattggttcttgggcatcactatggtttcctgatga

SEQ ID NO: 625225 - DNA, 605 bp, Homo sapiens
ttcttttaacaataaggctttctacttatatatgcagtgtctcaagtcagggtcttccagacctgttttattgatctgcaaaggcttcttcttcttcttcttttttttttttaacaacaacaacaaaaaaacacacagagaaatattttaaaagtcaaaatactttacataaagctatggatttatggcttctcttgaaacattagaaattttgccattctttgcctgcattgctacatagcaacaatgggctaaagcttggtggagcctgttgcctttagatagggarggctcacactctccacatcacctacctggcctctatagacacttacttttgccatgacacacttggtattatgtactttttaagtacttacgcatctatgcttttacttgaacctttaggtcaatccagtgctgtgggtggagctggtgtaatcctatgtataccccctagatgtgtgtagaagggatacccaagttccctaacatgccttaggcaggggagtgtcgtgcagtgctttctggatctttacagtcatatcctctggcttcaaatcccaattttgtaacttaaacttgtatatcatcaggtaagaagt

SEQ ID NO: 625226 - DNA, 656 bp, Homo sapiens
ttgtcaacacttaacacattgttggttttaaaaatacatttaagtctatgatgaactctcttattaatagtttccattttatcccaatattgtagagatttatttttatttgtattttatagacactactgaaataatatgtaataggagaaacaataatctactttattatgcctatggtaattcctgataagacaaaaatcacacacaggtttcatctctgagctggtattattcagaggcaaaggttgaaatagacaataacctctggaaccaattaaacatgattgtaccaatttcccccgacaagttgtaattatctcaacatgagatagcacatgtcattgcaaagaaaagctgaattgttttcattttcaagaatttttattttaactctttcctgctyaggaaactttagcatttatttccttcatccagaacaatatttgcagcactttgagaggagaaatgacatctttaaacaatgtctttattggccatgctttaaaaattatacaataaatctacttttactgttaaaaatgttatagattttaaaaaatcactacactcactatgtagagatgcacatcactgacactgttgtttttccttccagaattttgaaatatgcattgcacatttaaaccaatgca

SEQ ID NO: 625227 - DNA, 482 bp, Homo sapiens
tagaggcagagaagagcaagagctctaaacccaaatttagagctacaytttacttaaacaaatacaacccaagttaatactgtggaagttaaataatagttcagtcccatctgcccatctccattagaggtcaggatagattccactgtggagcttcctacataacacaagaaaaataaaacaagataaatgtgtagacaaggtcccgttttctactttaaaaaacggttccacaaagccccaagccagagtgtctgccggttctctgaaatgtttatgaaatacatagcagctcaaaggagttcaaactctcttaaagaagcatttttgtcgtgcacatacatgtctctcccaagatctttctctgcttctatatttaacaatctattcagagcacacatataaaaaaaatcatcatgttaagatggtaatttggaaggagttccacagaacagcttctgctgtataattgaagaggtgct

SEQ ID NO: 625228 - DNA, 556 bp, Homo sapiens
tttcttcttaaatgatggctgagtatgaggcttctaaagaaaattcaccatggaaattgggtcatagtcagtagaatcatgttgttaaatgttccttgtgcatttctcctgggtgccatctgagtgctagatgttgctgtgattacatgtgcgtgtgctgctcctcacatgaatcaggtgagtcagsagatagcaatgaaagcagtgccctcagtgcctgctgggctcccagatcttcctctttgagagacaaaatcacaccatttggaatttcttctttttcaaaatactttggtgttggacgacatacccagaacggccacctagcattgtctttctccctgagagttgctgttttaaaacaacacttgctagtttcttaatttacctggaagtaatggtgtgtcattttgttgtgtttacctgctcacttcatctcctatctacatgctgattggcagtattgcaatattaagtgtttttatttattcttaatttaaaattttgtgggctttggggagcagacagaaataacaatttggaggaaacagtgaat

SEQ ID NO: 625229 - DNA, 556 bp, Homo sapiens
tttcttcttaaatgatggctgagtatgaggcttctaaagaaaattcaccatggaaattgggtcatagtcagtagaatcatgttgttaaatgttccttgtgcatttctcctgggtgccatctgagtgctagatgttgctgtgattacatgtgcgtgtgctgctcctcacatgaatcaggtgagtcaggagatagcaatgaaagcagtgccctcagtgcctgctgggctcccagatcttcctctttgagagacaaaatcacaccatttggaatttcttctttttcaaaatactttggtgttggamgacatacccagaacggccacctagcattgtctttctccctgagagttgctgttttaaaacaacacttgctagtttcttaatttacctggaagtaatggtgtgtcattttgttgtgtttacctgctcacttcatctcctatctacatgctgattggcagtattgcaatattaagtgtttttatttattcttaatttaaaattttgtgggctttggggagcagacagaaataacaatttggaggaaacagtgaat

SEQ ID NO: 625230 - DNA, 612 bp, Homo sapiens
ccctcacctgagaatcatttcccagtctcctaacttcatgtagtttatggcaccagttggagctattaaaattgaggtattttgtaaatgcatttgaaggtcattcacaaaatgaatgaggaatgtctttagatgactgacatgcttatgctcttaatctaaaatatctagaaagtaaacctaggatgtggattaaaagttctctgttgctgaagatttgggccagagcaggcctttgacaagatttctgaaattatttctttcccatatttttggtaacttttggtaatgaatatttacggagtttgttttaaaggaaatggtggtattgagaatccaggtgttgagtagttagcagtccagtctctggtaccatattcctgggctcaaagcctagccctaccacccaccagccaggttagatcaaagcaggcaatgtgcttagcctttgtgagcttctctgttttattatgtgtaaaacaggaatgttaatagtacctatatcgtaagtgttgtatagattgactataaggagtcatgcatagatggcgattagaagcagctgcagtccacrgcactcacagagaggaatgaaaaggggtgagtgaattc

SEQ ID NO: 625231 - DNA, 464 bp, Homo sapiens
ggactgactaagcaaccaactcaaaccatggagaatgaagaaaagtggcgagggggctggggagggtggtgacagcccacagggagtggcacagagctaaagggaccctcacccccagccaagggaagtggtgaatgattgtgtgaccccacccgagaaaccatacttctcccatggatctttgcaacctgcagaccaggagatcccttagtgagcccacgccaccagggcctggggtctgatacacagagctgtgtggactctgagaagagcagccgctcagacacacacagagacccargagttgtacatactccagctctgggatacccggcaaggtgggatgtccattcgtacatatccctagaaagagggctgaatccagggagtcaagcagcagcaccattctctgggctccgcttccatggccacttctctagttaagacccactggcatggaattc

SEQ ID NO: 625232 - DNA, 535 bp, Homo sapiens
caactttatgtactctgttacttctcagtgagaactgcttgtttctctgacaaccttctcgtatattatcaaagggaaacattcttccaagatccaatttttaaatttatttggcttcagtgtgatggttgagataatgttttactttctactcatggcaggctgtacactgctaagttttcatgattgcacagtgcatctaacagtcatcctaataatgtgtgcagttgttgcaaaaataaattacacacattgattctactttggttgcacatctgggaaatatgcttcagcacctttgctggaaactactgtggactayacattggtgcaaatgaatgttactttgttctaattggctcaatatgcaagtaatgagcttattgtcactggacatattaaagcaaagaaaaaaagtgaaggaagggaaaataactaatatttattgatcatctgttatgtgctcactaggctaggactttatatatgttatctcattttatccctcaaatgaccttatttgcaaagagctatt

SEQ ID NO: 625233 - DNA, 617 bp, Homo sapiens
cattttttaggaagaaagtaagggaagagaacaagagtctcagcttggcattccagcgaaattcttctgtatcttatccaagactatcaaggtggtaactcggagtttgcaagacccacagcattactgggcttggggtgaccccctaaagcagatataccttagataacaacacccaactcatttcatatatctcgaaaggcttcccaggaaagacaggcacaaacaaactcagattgcaatgagtacaataaatacctaactcttcaatgcccacacacagatgaatatccacaagcatcaagtccatccaggaaaacatctaataaaaaatgggcaaaagatctgaayagacatttctcaaaagaaaacatacaaatggcaaacaggcaagtgaaaaagtgctcaacatcattgatcgtcaaagaaatgcaaatcaaaactacaatgagataccatctcaccctgttagaatcaatcttatccaaagtcagtcagtaacaaatgctggtaagaatgtggagaaaagggaaccctcatacactgttggtgggaatgtaaattagtacaaccactatggagaacagtttggagctttctcaaaaaactaataataa

SEQ ID NO: 625234 - DNA, 617 bp, Homo sapiens
caaatcaaaactacaatgagataccatctcaccctgttagaatcaatcttatccaaagtcagtcagtaacaaatgctggtaagaatgtggagaaaagggaaccctcatacactgttggtgggaatgtaaattagtacaaccactatggagaacagtttggagctttctcaaaaaactaataataaagctaccatatgatctagcaatctcactcctaggtatatacccaaaggaaaggaagtaagtatatcagagatacctgcatttcgatgtgcattgtagcactatttacagtagccaagaagcaacctaaatgtccagcaacagatgaatggatacagacaatgtggtacctatacacaatggagtactattcagtcataaaaaaaaatgagatcctgtcacttgtaactacatggatggartggaaggttactacattaaataaaataaaccaaacatagaaagacaaacttcatatattctcacttatttgtgggagctaaaaattaaaataattgaactaatggagatacagagcagaaggatgattaccagaggatgggaagggtagtggaggtgttggggtgaagtggggatggttaatatgtacacaa

SEQ ID NO: 625235 - DNA, 506 bp, Homo sapiens
ttctgtataagatgtttaacagcatttctgttctctactctctagatgtcagtagtgactcctctctccagcagaaaaccaaatatatttcacaacattgacattatttgtgtctatgtgcatttacatatttttcttggataggaggatttttaatttgtagtaaaatacaaataacataaagtttatcattttaataatttctaaatataatggacaaaccttttattagattctttatgaggcctcttgtccaaaaaatgttaaaaaattattgttaatagagagcaccaaaatgtaggrtaattgaacaatgttgttgaatgccaaaacctactcctaatcatgtaggtcccagtttacttgcctccacctctggaaaaccttttctgattttccatattgagatatttggttcctcttatatgctgcttttgcagtctttctcccatataccatgtgggctgtgatgctaaaggcctacaaatgagtttttaagagaattc

SEQ ID NO: 625236 - DNA, 504 bp, Homo sapiens
gaattctttgttgtggaggcttattctgtataagatgtttaacagcatttctgttctctactctctagatgtcagtagtgactcctctctccagcagaaaaccaaatatatttcacaacattgacattatttgtgtctatgtgcatttacatatttttcttggataggaggatttttaatttgtagtaaaatacaaataacataaagtttatcattttaataatttctaaatataatggacaaaccttttattagattctttatgaggcctcttgtccaaaaaatgttaaaaaattattgttaatagagagcaccaaaatgtaggataattgaacaatgttgttgaatgccaaaacctactcctaatcatgtaggtcccagtttacttgcctccacctctggaaaaccytttctgattttccatattgagatatttggttcctcttatatgctgcttttgcagtctttctcccatataccatgtgggctgtgatgctaaaggcc

SEQ ID NO: 625237 - DNA, 557 bp, Homo sapiens
taactccccagtgtcgaggcacctaattcttcctagttgtgagacaagaactcggatctagctgatctaaggagcagaaaaaccacaacattttggtggcttgtacagggatacctggagggttagtaaatacggacccaaactctctttcactttcattttcaaggcttctcatcctcagacttttttctgaaggcagatgaagcaccaaacctcgggtgagccaattaagaacaaatggcgcagttacagaagacaggatgcaaccctgccacctatctctctctttcaggtaaaakggatgtcggttttgtttcccttcagggaggtctagctgttgcgtgggaccagaatacagtcttggggcaactgaaagcatctggctgagtccacttctcagtgttgccacaaggcccttagacttggcttccttcctgatcactcattagggcattgaccaagactcccagacttttctaaggtattttttcttccttctttcatggtttgaaatggcttctatctcttcttttataatgttaagggtgttgctgcaa

SEQ ID NO: 625238 - DNA, 506 bp, Homo sapiens
ttctcagtttggtgtattcccatctgtctggcttttttttttttttttttttttttttttcagttttttcacctgtgctttggggatcctatccaaagagtccttgtccagaccaatgtcatggagctttcctcatatgttttattctactaattttgtagtttctgattctacacttatgtctttttttcattttaagttagtttgtgtacatatatgagataagggcctaatttcattcttctgtatatgtatatctagttcttccaataccatttatttatgaggctctcctttctccattgtgtgtttttggcagtggtactgccatcttttgattgcctttaaaaaattcaggttgaratcttcctggttcttggtataatgaatgatttcttttgttgaaatttggacattttcatattataagatgatggatcttatttaaaacttcttagctttctctgataccaatgcagaaggagaaagttggggctattttatta

SEQ ID NO: 625239 - DNA, 549 bp, Homo sapiens
tcttctttaacacccctggcgaacactcacccaaagcctcataaattcttctatgaacgagtggttacttctcatggaaagcatgccctattattgagatgccatagcaataagaaactctttttgagttaaatattaaaataaactgttggctgggcacggtggctcatgcctgtaatcccagcactttgggaggccraggcgagcagatcatgaggtcaggagttcgagaccagcctggccaacatggtgaaaccctgtctttactaaaaatacaaaaattagctaggcgtggtggcaggcacctgtaatcccagctactagggaggctgaggcaggagaattgcttgaacctgggaggcggaggttgcagtgagcggagatcgtgccattgcactccagcctgagcgacaagagaaagactctgcctcaaaacacaaacaaaacaaaaataaaaaataaaataaaataaactgtcttcctagcgtatccttacaatttaattcctgcagaattttctcccttatttacatgactgccttccaaata

SEQ ID NO: 625240 - DNA, 549 bp, Homo sapiens
tcttctttaacacccctggcgaacactcacccaaagcctcataaattcttctatgaacgagtggttacttctcatggaaagcatgccctattattgagatgccatagcaataagaaactctttttgagttaaatattaaaataaactgttggctgggcacggtggctcatgcctgtaatcccagcactttgggaggccaaggcgagcagatcatgaggtcaggagttcgagaccagcctggccaacatggtgaaaccctgtctttactaaaaatacaaaaattagctaggcgtggtggcaggcacctgtaatcccagctactagggaggctgaggcaggagaattgcttgaacctgggaggcggaggttgcagtgagcggagatygtgccattgcactccagcctgagcgacaagagaaagactctgcctcaaaacacaaacaaaacaaaaataaaaaataaaataaaataaactgtcttcctagcgtatccttacaatttaattcctgcagaattttctcccttatttacatgactgccttccaaata

SEQ ID NO: 625241 - DNA, 613 bp, Homo sapiens
tataaacactatttttacactgaggactcccaaattcatgcttgcagttcagacctcacctgtgaattccagactcttatatctaattcttacttgatatcttctcttaaatgtctaataagcatctcagtcttaatatattcaaaactgagttcctaatccctgacaaatatagcccttcccatttcagttaatgacaactgattcggttgcttagctcagaaactttgaagtgattgttgactcttgttttttgtttttgtttgtttatttgtttgttcattttagacagggtcttactcccttcagccaggctggagtgcaatggtgcagtcacagctcactgcagcctctatttcctgagctctggtgattttcacactttagcctctcaagtagctgggactacaggcgcacaccacccagccttgctaattttttgtattttcataaagacagggttttgccctgttgcctatgctggtctcaaaygcctgagctcaagtgatctacctgcctcagcttctcaaagtgctgagatgctgattcttttctttctctcatatactttattcaatgtgtaagcgtatcccgttgatgccaccttcaaaat

SEQ ID NO: 625242 - DNA, 590 bp, Homo sapiens
cttgagctgaatgtaaacacccatgtgaccatctgcaggttcctagatcctcacaagtaaatagatggcctgtgtgctgttaccctcactcctactgatagggtttggctctctgtcctcaccaaaatctcctgttgaattgtgatccccagtgttggagatggggcctggtgggaggtgttttaatcatggggatggtttctaatggtttagcaccatcctctagtgctgtcttgtgatagagttctcaggatatctggttgtttgaaagtgtgtagcacctcccccttcactctcccttcctcctccttctgccatgtaagatgtgctggcttccttttcccctttggccatgattgtaagtttcctgaggcctccccagaagcagaagcctgtacagactgcagaactgttagttaattgaatctctttttaaattttttataaattaccckgtctcaggtatctctctatagcagtgtgagaacagactaatacacctaccaacatgagcttttcccatactacatttttttactgaccctgtatgtggctccaggattctctccaacacacagaatcaagaagct

SEQ ID NO: 625243 - DNA, 648 bp, Homo sapiens
tttttcatgtgtcttttggctgcataaatgtcttcttttgagaagtgtctgttcctatctttcgcccactttttgatggggttgtttgttttttccctgtaaatttgtttgagttcattgtagattctggwtattagccctttgtcagatgagtagattgcaaaaattttctcccattctgtaggttgcctgacttggaaattaaggtcctattttgtgtatctaccattaggaatcaatgaccttttttttgtatataaaaaaaaactattgcattaatgaccgggtagtttttaaagtatatgaactgtaacttattggaaattaatttgaccagatatcactggtgaattagccttttatcttatgatatattccatgtttgaaagtaacagaaactatttccttaaatatagttgctgttttataaaatcttatataattcagaattttcacagagtcagactagccaacaaccctgttatttcaaattaatgagtttttaaattaattttactcttttattaattctaaaatatttgatgcttttcatattcatcagatcctgtatatatgtgttgaatggagctcagccctttctctcaaagaaatttttgtctggtttgacatatgacaggtaaataaaca

SEQ ID NO: 625244 - DNA, 648 bp, Homo sapiens
tttttcatgtgtcttttggctgcataaatgtcttcttttgagaagtgtctgttcctatctttcgcccactttttgatggggttgtttgttttttccctgtaaatttgtttgagttcattgtagattctggttattagccctttgtcagatgagtagattgcaaaaattttctcccattctgtaggttgcctgacttggaaattaaggtcctattttgtgtatctaccattaggaatcaatgaccttttttttgtatataaaaaaaaactattgcattaatgacckggtagtttttaaagtatatgaactgtaacttattggaaattaatttgaccagatatcactggtgaattagccttttatcttatgatatattccatgtttgaaagtaacagaaactatttccttaaatatagttgctgttttataaaatcttatataattcagaattttcacagagtcagactagccaacaaccctgttatttcaaattaatgagtttttaaattaattttactcttttattaattctaaaatatttgatgcttttcatattcatcagatcctgtatatatgtgttgaatggagctcagccctttctctcaaagaaatttttgtctggtttgacatatgacaggtaaataaaca

SEQ ID NO: 625245 - DNA, 529 bp, Homo sapiens
aacctccaggcaagttttgggggaaattcacctgacaggggaggagcagagagggaatcagtagcggaagggaaagggtggagatggattacctgagcgcagcaaaacttagttgagtagaaataagctcccgtatgaacaccgggcactaaaactgcgaattaatgtggttcccttattatcaattccacgcacgtgtacgtttggcagaagctgagtaagtggagaataactctggaactgaaatgaagtcagtgaaccgacacaaaaccagatcctagcggtgagctggctgcggaggaaccaaagaaaaatgaatcctcgaggaaccctctcccatgctagraagatgtagttctacagctgcagcaccaaattcgaggcgcaggctgggaagtttaaagcgcagcgctaaccagactggacactgtcaagggaagcatactctgccttcagcaaccacaagagatatctcacgggggttattgcactcaactctatgtaagctggcagtcagctaacattagtc

SEQ ID NO: 625246 - DNA, 595 bp, Homo sapiens
  misc_feature 579: n = A,T,C or G
ttacttgacctgacttgaagcttacctagtgagagcagtctcttccccagagcatctgtcaaaaacaatcagagaaaactgttacatattttgactgcctgagatggcatygagaagatataataattatgtcttgcacctagtatcaaagtccaaaatataggaagcaaaactgacagagctaaaggggaaatgaacaattcaacaataatagttggagacttcaatacctcacttttgatattatataaagtaactagacagaaataggagacttgaacaacactgtaaactaactacatttaatagttatctaatagaaggttccatccaacagaagaatacacattcttttcaagtccataaaatgctgtccatgatagaccatatttagtctgtaagacaagtctaagtaaatgtcaaaggatgaaaataacacaaagtatgttctctgaccacagtggaataaaattagaactcaatgatgaaggaagtatgataaattcacatatatgtggaaattaaatgacacactcctaaataatcagtacagcagagaagaaatcacagggaaatttnaaaacactttgctgta

SEQ ID NO: 625247 - DNA, 595 bp, Homo sapiens
  misc_feature 579: n = A,T,C or G
ttacttgacctgacttgaagcttacctagtgagagcagtctcttccccagagcatctgtcaaaaacaatcagagaaaactgttacatattttgactgcctgagatggcatcgagaagatataataattatgtcttgcacctagtatcaaagtccaaaatataggaagcaaaactgacagagctaaaggggaaatgaacaattcaacaataatagttggagacttcaatacctcacttttgatattatataaagtaactagacagaaataggagacttgaacaacactgtaaactaactacatttaatagttatctaatagaaggttccatccaacagaagaatacacattcttttcaagtccataaaatgctgtccatgatagaccatatttagtctgtaagacaagtctaagtaaatgtcaaaggatgaaaataacacaaagtatgttctctgaccacagtggaataaaattagaactcaatgatgaaggaagtatgakaaattcacatatatgtggaaattaaatgacacactcctaaataatcagtacagcagagaagaaatcacagggaaatttnaaaacactttgctgta

SEQ ID NO: 625248 - DNA, 595 bp, Homo sapiens
  misc_feature 579: n = A,T,C or G
ttacttgacctgacttgaagcttacctagtgagagcagtctcttccccagagcatctgtcaaaaacaatcagagaaaactgttacatattttgactgcctgagatggcatcgagaagatataataattatgtcttgcacctagtatcaaagtccaaaatataggaagcaaaactgacagagctaaaggggaaatgaacaattcaacaataatagttggagacttcaatacctcacttttgatattatataaagtaactagacagaaataggagacttgaacaacactgtaaactaactacatttaatagttatctaatagaaggttccatccaacagaagaatacacattcttttcaagtccataaaatgctgtccatgatagaccatatttagtctgtaagacaagtctaagtaaatgtcaaaggatgaaaataacacaaagtatgttctctgaccacagtggaataaaattagaactcaatgatgaaggaagtatgataaattcacatatatgtggaaattaaatgacacactcctaaataatcagtacagcaragaagaaatcacagggaaatttnaaaacactttgctgta

SEQ ID NO: 625249 - DNA, 527 bp, Homo sapiens
tagaaaagggatatcaccttcatactatttcattttcaggtattatattaaaaacaccaacaataaactcttctttttagtttttatggtaggtacttactgtgtrgaaactgataaatatgtcatcatggtagtaactccttatggtagcaggagtgatttttattatgacataagctgagtacttcttccaatttaaatacatactgtatagtttatatttggctccttacagcatatttgaaattaattcaagtgctcgtgtaactctacctagtgctaatgagaacatgatcagttactcacatttccttgaaataaaggccccaaagccaaaattttaaatatggtgcctggactagatatatgcagttcattaatctagtttttttagttttatatcattatttttattttactttcaaaactatgccatcatgtgtcactttcctctctgagaaaaaaaatgatgatagaaatgcatctgaatgtcaattcagaatagcagatgattattctccagtaga

SEQ ID NO: 625250 - DNA, 527 bp, Homo sapiens
tagaaaagggatatcaccttcatactatttcattttcaggtattatattaaaaacaccaacaataaactcttctttttagtttttatggtaggtacttactgtgtggaaactgataaatatgtcatcatggtagtaactccttatggtagcaggagtgatttttattatgacataagctgagtacttcttccaatttaaatacatactgtatagtttmtatttggctccttacagcatatttgaaattaattcaagtgctcgtgtaactctacctagtgctaatgagaacatgatcagttactcacatttccttgaaataaaggccccaaagccaaaattttaaatatggtgcctggactagatatatgcagttcattaatctagtttttttagttttatatcattatttttattttactttcaaaactatgccatcatgtgtcactttcctctctgagaaaaaaaatgatgatagaaatgcatctgaatgtcaattcagaatagcagatgattattctccagtaga

SEQ ID NO: 625251 - DNA, 527 bp, Homo sapiens
tagaaaagggatatcaccttcatactatttcattttcaggtattatattaaaaacaccaacaataaactcttctttttagtttttatggtaggtacttactgtgtggaaactgataaatatgtcatcatggtagtaactccttatggtagcaggagtgatttttattatgacataagctgagtacttcttccaatttaaatacatactgtatagtttatatttggctccttacagcatatttgaaattaattcaagtgctcgtgtaactctacctagtgctaatgagaacatgatcagttactcacatttccttsaaataaaggccccaaagccaaaattttaaatatggtgcctggactagatatatgcagttcattaatctagtttttttagttttatatcattatttttattttactttcaaaactatgccatcatgtgtcactttcctctctgagaaaaaaaatgatgatagaaatgcatctgaatgtcaattcagaatagcagatgattattctccagtaga

SEQ ID NO: 625252 - DNA, 580 bp, Homo sapiens
aaaatctttttcatctttaatgtaggaatggaactaaatgcattaaaggagatttatccaatatgggaaattcagtgaaaccaaagataatctgcaaaatgatctttgatttcctctttgtatattacattttaatttktcttaatgtagcatgttaaataataatctaaagacattaaatttctgacattccttagcactatgacagtgaaccatcagagaagtaaagtgcatctatggaaagaaatgaccaaaatgtgaagtgacctcaagatcacatagcctgaaagtataaagctaggattcagatctactcctgacagccagaccagagatgttcatagcataacgctttccattatagaataataagtatcagaatatttttatttttaagctaaagtaactgaggctcagagatgtaaaatgacttacccccaggaggaccttggaatggagactggcatccacatttcctgacttttatcctagctctgtcttcttatatcatccagattcagagcaaatcctcattcttcctccattgtattttgaagaataaacattataggaaagaaaa

SEQ ID NO: 625253 - DNA, 580 bp, Homo sapiens
aaaatctttttcatctttaatgtaggaatggaactaaatgcattaaaggagatttatccaatatgggaaattcagtgaaaccaaagataatctgcaaaatgatctttgatttcctctttgtatattacattttaatttttcttaatgtagcatgttaaataataatctaaagacattaaatttctgacattccttagcactatgacagtgaaccatcagagaagtaaagtgcatctatggaaagaaatgaccaaaatgtgaagtgacctcaagatcacatagcctgaaagtataaagctaggattcagatctactcctgacagccagaccagagatgttcatagcataacgctttccattatagaataataagtatcagaatatttttatttttaagctaaagtaactgaggctcagagatgtaaaatgacttacccccaggaggaccttggaatggagactggcatccayatttcctgacttttatcctagctctgtcttcttatatcatccagattcagagcaaatcctcattcttcctccattgtattttgaagaataaacattataggaaagaaaa

SEQ ID NO: 625254 - DNA, 603 bp, Homo sapiens
gacacagttaattaaagttgagtggaatttcagaatactcttcctgcaataggaagagtacctatcttaggctaacaaagagtatactrtagactcagctaagcctttgctgagactaactatccctaccctaaacctgaaagtttccttgtattttctcatcctatccacataacgtacaaacaattgtttttgcacactaagtagcgtacctttttcacacacttaggtagcatacctaagggcctctagttttcaattttgaaaatataggctatctaataaatatgtgtagtattcactgtgttgaattactgtaagcctagggccttatattagtgcaataataatactgagttaaactccaacaagataaggtgaaacgtggcagcaagcaaattgcttaggtggtagacatgaaacatacatgtcatgcttctgctattttgtgaacagataatttggtctgacataaagttttaagtgttcatatggcattaatatgagtcagctacaatagtggtagctgaccatgaggaatggtattgtgttttgtatcatgcctggtcatgactgataaagaggaaattttattttttaatt

SEQ ID NO: 625255 - DNA, 603 bp, Homo sapiens
gacacagttaattaaagttgagtggaatttcagaatactcttcctgcaataggaagagtacctatcttaggctaacaaagagtatactgtagactcagctaagcctttgctgagamtaactatccctaccctaaacctgaaagtttccttgtattttctcatcctatccacataacgtacaaacaattgtttttgcacactaagtagcgtacctttttcacacacttaggtagcatacctaagggcctctagttttcaattttgaaaatataggctatctaataaatatgtgtagtattcactgtgttgaattactgtaagcctagggccttatattagtgcaataataatactgagttaaactccaacaagataaggtgaaacgtggcagcaagcaaattgcttaggtggtagacatgaaacatacatgtcatgcttctgctattttgtgaacagataatttggtctgacataaagttttaagtgttcatatggcattaatatgagtcagctacaatagtggtagctgaccatgaggaatggtattgtgttttgtatcatgcctggtcatgactgataaagaggaaattttattttttaatt

SEQ ID NO: 625256 - DNA, 625 bp, Homo sapiens
tgtgtagtattcactgtgttgaattactgtaagcctagggccttatattagtgcartaataatactgagttaaactccaacaagataaggtgaaacgtggcagcaagcaaattgcttaggtggtagacatgaaacatacatgtcatgcttctgctattttgtgaacagataatttggtctgacataaagttttaagtgttcatatggcattaatatgagtcagctacaatagtggtagctgaccatgaggaatggtattgtgttttgtatcatgcctggtcatgactgataaagaggaaattttattttttaatttaattactaacatcaggtctgttattctaaatgtaagatttttattatcataaaaataatattcattataagaagcaaatgagagacagaaatgatgagagggcgaacttccaaacttaagcataggctaacagctttggtgagtatgaaatgggcttttgtgcagcttggagcaaattgtatgcattactttggtatgagcctggaaattgaagccattgggttggatcaaaatgcttaatgtctttcagaatgaatacaagaaaagacattaaatctaagaaatacctttccttctacaatttattgc

SEQ ID NO: 625257 - DNA, 625 bp, Homo sapiens
tgtgtagtattcactgtgttgaattactgtaagcctagggccttatattagtgcaataataatactgagttaaactccaacaagataaggtgaaacgtggcagcaagcaaattgcttaggtggtagacatgaaacatacatgtcatgcttctgctattttgtgaacagataatttggtctgacataaagttttaagtgttcatatggcattaatatgagtcagctacaatagtggtagctgaccatgaggaatggtattgtgttttgtatcatgcctggtcatgactgataaagaggaaattttatttttwaatttaattactaacatcaggtctgttattctaaatgtaagatttttattatcataaaaataatattcattataagaagcaaatgagagacagaaatgatgagagggcgaacttccaaacttaagcataggctaacagctttggtgagtatgaaatgggcttttgtgcagcttggagcaaattgtatgcattactttggtatgagcctggaaattgaagccattgggttggatcaaaatgcttaatgtctttcagaatgaatacaagaaaagacattaaatctaagaaatacctttccttctacaatttattgc

SEQ ID NO: 625258 - DNA, 625 bp, Homo sapiens
tgtgtagtattcactgtgttgaattactgtaagcctagggccttatattagtgcaataataatactgagttaaactccaacaagataaggtgaaacgtggcagcaagcaaattgcttaggtggtagacatgaaacatacatgtcatgcttctgctattttgtgaacagataatttggtctgacataaagttttaagtgttcatatggcattaatatgagtcagctacaatagtggtagctgaccatgaggaatggtattgtgttttgtatcatgcctggtcatgactgataaagaggaaattttattttttaatttaattactaacatcaggyctgttattctaaatgtaagatttttattatcataaaaataatattcattataagaagcaaatgagagacagaaatgatgagagggcgaacttccaaacttaagcataggctaacagctttggtgagtatgaaatgggcttttgtgcagcttggagcaaattgtatgcattactttggtatgagcctggaaattgaagccattgggttggatcaaaatgcttaatgtctttcagaatgaatacaagaaaagacattaaatctaagaaatacctttccttctacaatttattgc

SEQ ID NO: 625259 - DNA, 625 bp, Homo sapiens
tgtgtagtattcactgtgttgaattactgtaagcctagggccttatattagtgcaataataatactgagttaaactccaacaagataaggtgaaacgtggcagcaagcaaattgcttaggtggtagacatgaaacatacatgtcatgcttctgctattttgtgaacagataatttggtctgacataaagttttaagtgttcatatggcattaatatgagtcagctacaatagtggtagctgaccatgaggaatggtattgtgttttgtatcatgcctggtcatgactgataaagaggaaattttattttttaatttaattactaacatcaggtctgttattctaaatgtaagatttttattatcataaaaataatattcattataagaagcaaatgagagacagaaatgatgagagggcgaacttccaaacttaagcataggctaacagctttggtgagkatgaaatgggcttttgtgcagcttggagcaaattgtatgcattactttggtatgagcctggaaattgaagccattgggttggatcaaaatgcttaatgtctttcagaatgaatacaagaaaagacattaaatctaagaaatacctttccttctacaatttattgc

SEQ ID NO: 625260 - DNA, 610 bp, Homo sapiens
aacaggccacacaacttaagctataaatagttgcacaattatctttagtcttaatcttatggtgacattgattgattattttttatcctcttgacttaattatttctgatgcaaaagtggctggatattgctaaaawtaattataatacactgttaaaataaatataacaacatatgtataaagagacacatatttccaaatacccacctaggattccacttagtacgagtgccatctcaagtgctgctttgaaaaaaatgggatatttacaaatacatcattggatattttaacacatcattcattcagtagacatgcagaatatcttttgtataatacttgtgataaatgctataagaaccagaaaataatagaaaaactggtctttcccctcaaataagttacagtataattggatcagaagtacagagttgaaatacctgaagaatgctagtacagctccaaatagtaataaatataaatatttcttatcgaactcaaatgtgtggacaacttgttggcttgaggaacaaagtcaatcagtaaagctttaagaatggaggaatgattggaaacggtaaattggcacctgaatttgagaagaaatta

SEQ ID NO: 625261 - DNA, 610 bp, Homo sapiens
aacaggccacacaacttaagctataaatagttgcacaattatctttagtcttaatcttatggtgacattgattgattattttttatcctcttgacttaattatttctgatgcaaaagtggctggatattgctaaaattaattataatacactgttaaaataaatataacaacatatgtataaagagacacatatttccaaatacccacctaggattccacttagtacgagtgccatctcaagtgctgctttgaaaaaaatgggatatttacaaatacatcattggatattttaacacatcattcattcagtagacatgcagaatatcttttgtataatacttgtgataaatgctataagaaccagaaaataatagaaaaactggtctttcccctcaaataagttacagtataattggatcagaagtacagagttgaaatayctgaagaatgctagtacagctccaaatagtaataaatataaatatttcttatcgaactcaaatgtgtggacaacttgttggcttgaggaacaaagtcaatcagtaaagctttaagaatggaggaatgattggaaacggtaaattggcacctgaatttgagaagaaatta

SEQ ID NO: 625262 - DNA, 610 bp, Homo sapiens
aacaggccacacaacttaagctataaatagttgcacaattatctttagtcttaatcttatggtgacattgattgattattttttatcctcttgacttaattatttctgatgcaaaagtggctggatattgctaaaattaattataatacactgttaaaataaatataacaacatatgtataaagagacacatatttccaaatacccacctaggattccacttagtacgagtgccatctcaagtgctgctttgaaaaaaatgggatatttacaaatacatcattggatattttaacacatcattcattcagtagacatgcagaatatcttttgtataatacttgtgataaatgctataagaaccagaaaataatagaaaaactggtctttcccctcaaataagttacagtataattggatcagaagtacagagttgaaatacctgaagaatgctagtacagctccaaatagtaataaatataaatatttctyatcgaactcaaatgtgtggacaacttgttggcttgaggaacaaagtcaatcagtaaagctttaagaatggaggaatgattggaaacggtaaattggcacctgaatttgagaagaaatta

SEQ ID NO: 625263 - DNA, 607 bp, Homo sapiens
ttatttggtattctttatacatgaatgatctctgaatagaagtatgagaaagcaccctatggagacaatgaggaaaaactcaggctttcaaacaatgagacagcctgattttagagggccattctaagtaaatcacctgaattttcacagtgttcttaccagtcttgatttttattcatgtaaaaatatagcattttctaaaawtgttgcaacaaaattctgagatataaaatgatgtttatatcttaaaaaattaaaccacatatactaattatttctttttttttgcatatcacttattcctaatcatcaaggttttaaatctcaacaccaagttactaaaaagttatttctcaattcttttaaacttaccataagaagtgtaatattttccatgaaaagattcccaatttaagaaaggagtgcaatggaattttttttagcttataaaaagtgagataaaaagctctggagttctttaattagttgtgagtaaagccttggggttggccatgagggtaatggacaaaggcaatcaaggaagggacttatggtaacaatgatgaaaatgtaaatggcagacattaggggaaaaggaacctgcatc

SEQ ID NO: 625264 - DNA, 607 bp, Homo sapiens
ttatttggtattctttatacatgaatgatctctgaatagaagtatgagaaagcaccctatggagacaatgaggaaaaactcaggctttcaaacaatgagacagcctgattttagagggccattctaagtaaatcacctgaattttcacagtgttcttaccagtcttgatttttattcatgtaaaaatatagcattttctaaaaatgttgcaacaaaattctgagatataaaatgatgtttatatcttaaaaaattaaacmacatatactaattatttctttttttttgcatatcacttattcctaatcatcaaggttttaaatctcaacaccaagttactaaaaagttatttctcaattcttttaaacttaccataagaagtgtaatattttccatgaaaagattcccaatttaagaaaggagtgcaatggaattttttttagcttataaaaagtgagataaaaagctctggagttctttaattagttgtgagtaaagccttggggttggccatgagggtaatggacaaaggcaatcaaggaagggacttatggtaacaatgatgaaaatgtaaatggcagacattaggggaaaaggaacctgcatc

SEQ ID NO: 625265 - DNA, 601 bp, Homo sapiens
aatgaggaaaaactcaggctttcaaacaatgagacagcctgattttagagggccattctaagtaaatcacctgaattttcacagtgttcttaccagtcttgatttttattcatgtaaaaatatagcattttctaaaaatgttgcaacaaaattctgagatataaaatgatgtttatatcttaaaaaattaaaccacatatactaattatttctttttttttgcatatcacttattcctaatcatcaaggttttaaatctcaacaccaagttactaaaaagttatttctcaattcttttaaacttaccataagaagtgtaatattttccatgaaaagattcccaatttaagaaaggagtgcaatggaattttttttagcttataaaaagtgagataaaaagctctggagttctttaattagttgtgagtaaarccttggggttggccatgagggtaatggacaaaggcaatcaaggaagggacttatggtaacaatgatgaaaatgtaaatggcagacattaggggaaaaggaacctgcatctgacagggtggcttgaacacatccatcagtttcaacaatacctgccacaagcaatgaata

SEQ ID NO: 625266 - DNA, 592 bp, Homo sapiens
taggcctttttaaagctaataaaaaagacacagcgaagttataaaatgtaattgacaagattgaaatratagtgaataaatatattacttttgataacagaatggaacctaatttgaaatgtcaatgggaatgatgagatgagatcactgttctttctataatatgtgattagatacacagaaaataaaagaatcaattgaaaatgttgatgataaattaacaagaatgtcccagccttggcaacataatgagacccgatctctagaaaaaaaaatttttttaaatcacctgcgtatggtggtttgtgcctgtagtcccagcttctcaggaggctgaggtggtaagatggcttaagtctagcaatttgaggttgtggttagccatgattgtaccactgcactccagcatgggtgacaaaaggagatcctgtctcaaaaaaaaaaaaaatgtccaataaattggctggataaaacctgagtggagtcaattgtcattattcttgattctgtctttgcaaatctgcctattaactcaaatttatttgtaacccccaaatcaatgcttgccatgttttgtgttaatttgcagatg

SEQ ID NO: 625267 - DNA, 578 bp, Homo sapiens
tgtagtgctgaagtatagtctactgttgctaggcacaagaaggctgtgatgtaccttatagaggaaatacatatgttagatcagatttgttcagttataagttatagtgccattggccatgagtttaatgttgatgaatcaataatatatgctaaataaggtgtctttaaacataaaaacacatgaaacaaggttataaactgactgatgaaaatatggtaccagaagctttcmgaaacctaaccctatatttttcctagagtcacagactcaatatttgcgaattcactgttcacagtgaccttaaagaacataggtactgtgaataatgataatcacctatatatcaaaacccacatcatctatggctaatagcaggtttggaagtacaatataaaaatattcaagtgaaaatagcaacacagatatactaatatagcaatgaatttaaaatcattttgatgttattaaatactttgttcttttctttctttagaatttacatggcctgaggacagataatatcagatttattgctacaaccccagatcctgaagagtgtctggcacatataagga

SEQ ID NO: 625268 - DNA, 564 bp, Homo sapiens
cacagatatactaatatagcaatgaatttaaaatcattttgatgttattaaatactttgttcttttctttctttagaatttacatggcctgaggacagataatatcagatttattgctacaaccccagatcctgaagagtgtctggcacatataaggaacccaattagtggctagtattattgctttctgttggagttttgccttattttattttattttttatactagttttagaattatgaactaaatgatgagatttaaaaattgtactagaaaagggaagtgaatagtgactatagggtcaactttataagagcaataaaaaaaatgtagtgagaaatgcagagcaawttaactcacatgcagttctacaaattaaaacacacagtacaaaattaattgacaagaggagagagaattcagaaaacggcagaataggaggctcctgaccatttctcttcccacagacacatcaagtaaacacctacacatggatcagttctctcagagagaaagtcagaatgcagttgaaagactcctacacaaaaaaagcctgagaaaat

SEQ ID NO: 625269 - DNA, 574 bp, Homo sapiens
atattgatttcagcattattcactatagccaagatatggaagcaatctaagtgtccattaacaaatgaatggataaagaaaaacgtggtatatatgcatgatggaataccatacaaccttagacaataaggatattctgycattcaggaaacatgaataaaactggacaacattatgttaagttaaataggccaagcacagaaagacgaatatggtctgtatgacctcatttatatgatctgatttacatggcaaatctaaaaacagaggaactcacagaagcagagagtaaaaaggtagttaccagaggcttgggatgaggtgggggaaaggaggatcaaagggtactaagttgtactcttcattgatgaaagggtacaaagtttcagttagactggaggaatatgttctagttgcactgcatgatgttcatagttaacaataatgaattttatatttcaaaatcgctaaaagaagagattcttaacattaccacaaaagtggataaattgatatggtgatgaatatattaattgtcttaattgtatcttccaatactgtatgtgtacatcaa

SEQ ID NO: 625270 - DNA, 514 bp, Homo sapiens
agactctgtctcaaaaaaataatgagtaaataaagaaatataaacagcttttttttaaagcaaagggtacaattcaacaaagtgaagagatcacagaatggaagaaagtatttgcaaactatccacctgagaaaggattaaaaaccagaatatgtaagctgcttaatcaagtccattagacaaaaatctaataatctgataattaatgggcaaaagatctgaatrgatatttctctaaagaagacataaaacaacaagcaggtgtatgaaaaagtgctcaacatcattcatcatcaaagaaatacaaatgataagtacaatgacatatcatctcaccctagttaaaatggcatttatccaaaagataggcaatcatgaatgttggtgaggttgtggagaaaacggaacccttgtacactgttggtgggaacggaaatttgtacagccactgtgaagaacagtttggaagttcctcaaaaaattaaaaatagaactactacatcatccagcaatc

SEQ ID NO: 625271 - DNA, 573 bp, Homo sapiens
  misc_feature 139: n = A,T,C or G
ttcccatgatcttgggcagcttcactcctgtggctttgcagcatcagccctcccctccgtgctgcattcacaggctgtctgcagcttttccaaggtgcatggtgcaaactgtcagtggatctaccattctagggtctgnagaatggtgcctctttctcaaagctccattgggcagtgccccactgtggtctctgtgtgggggattcaaccccacatttcccttgtgcactgccctagcagagattctccatgagggccctgccctgcagcaaacttttgcctggacatccaggcatttccatacatctagatggaggctcccatatctcaattcttgacttctgtgcactcactgtctcaataccatgtggaagctgccaagttttggggtttgtatcctctgaagtcatagcttgaaytgtaccttgatcccttttagccatgactacagtgactggaacacagggcactgagtccctgggcttcatacagcagggaggccttaggccaagatggcaaaaccattttttcctcccaagtttctgggcctgtgatgggaggggctgtcacaaa

SEQ ID NO: 625272 - DNA, 601 bp, Homo sapiens
tcacttttctctcttcttctgagattcacacaatctacacgttggtccacttgatgttgtcccacaagtcccttaggctctgctcacttctcttcaatcatatttgtgttcctcagactcaataatttcagttgtcttcaacttygttgattctttcttctgcctgctcaaatcttcccaaacatctttcattataatgtttaatcaattttcattctacaccagtctataagaccttaaccctttctatcatgttgactgttccttacacacaagtccatgactgcatggtttgaagcatgttttaggcatgtaaaaatcctttcttcagaagactgggatctcccagcaccccttccttcaccttttccccagaacccaatttttttaaatgacgttcccatcttgtgtctactcatctcttgtaacctattgcaatttctactttccaataattattgaaaataaaaattctgcactgaatcactttttgatatgttgtgctactgcttatagcagctctatttgacaaagatcttgaaagcaaaataaaaccttcctgctgggttgatctgtatgtagaaactgcctgtagcgaaaa

SEQ ID NO: 625273 - DNA, 557 bp, Homo sapiens
tttgcatctgtgtttatcagagacattgttctgtaattttttttctcatagtgttgtctggctttggtatcagagtaacgttggcctcattaaaataagtttggaactatttgcttcaattttttgaaaaagtatgagaaaaattggtattagttcttcaaagtttggtagaattcaacaatgaaaccatcagttcctgggtttttgtttcatgggaaactctttgttactaatttactcttttcatccattcagattttccatgtctttatgattcagttgataggctgtatgtgtttgggaatatattttttctaggttatcccatattttggcatatcattattcatagttgtcttataatattttcaatttctgtggtataagttgtaatgtcttctttttactttcttattttacttacttcagtcttctctatttttctcwattagtctagctaaagatttgtcagtttgtatcttgctttaaaaaacaactcagttttattgattattttgtattattttcctaacctctatttcatttatttctgctct

SEQ ID NO: 625274 - DNA, 557 bp, Homo sapiens
tttgcatctgtgtttatcagagacattgttctgtaattttttttctcatagtgttgtctggctttggtatcagagtaacgttggcctcattaaaataagtttggaactatttgcttcaattttttgaaaaagtatgagaaaaattggtattagttcttcaaagtttggtagaattcaacaatgaaaccatcagttcctgggtttttgtttcatgggaaactctttgttactaatttactcttttcatccattcagattttccatgtctttatgattcagttgataggctgtatgtgtttgggaatatattttttctaggttatcccatattttggcatatcattattcatagttgtcttataatattttcaatttctgtggtataagttgtaatgtcttctttttactttcttattttacttacttcagtcttctctatttttctcaattagtctagctaaakatttgtcagtttgtatcttgctttaaaaaacaactcagttttattgattattttgtattattttcctaacctctatttcatttatttctgctct

SEQ ID NO: 625275 - DNA, 571 bp, Homo sapiens
agattgatataaatattagataaattattaaaattaatattagagttgagaaaggaaccctcataattttgtaaaatatttctggaaataccagcatgcattaagagcttgatatgggttsatagcctgtgaccagctaaattgaattcctgagaattatcctaaaaatatgacctggaatgtagacacatggaaatatctaattagttttattataatctttgaattataaaaactttagatattttgtaatgttcgattattaaaaggagatagttcaaatgaaccatcaatgtccacataacaaaatattattcaaccattaaaattatgattgttaaaattatttaatagcacaggtgcaaaatatgtaataattaaaaatagaagataaaattgtaatgttatcttactttaaacaaatgcatatagatacacttaaattttgggaaatttaccaagatagcaacataaatcaccaaaataatgtttactcaatttttagtcaccaaggattaaatctatattatattttattattactatagtattaaatctctattgagtatta

SEQ ID NO: 625276 - DNA, 603 bp, Homo sapiens
catagcctgtgaccagctaaattgaattcctgagaattatcctaaaaatatgacctggaatgtagacacatggaaatatctaattagttttattataatctttgaattataaaarctttagatattttgtaatgttcgattattaaaaggagatagttcaaatgaaccatcaatgtccacataacaaaatattattcaaccattaaaattatgattgttaaaattatttaatagcacaggtgcaaaatatgtaataattaaaaatagaagataaaattgtaatgttatcttactttaaacaaatgcatatagatacacttaaattttgggaaatttaccaagatagcaacataaatcaccaaaataatgtttactcaatttttagtcaccaaggattaaatctatattatattttattattactatagtattaaatctctattgagtattagctaagcaagaatgagtactattgatgccaggagactgtgtttctggactagtatttgtaccttttagttttttacaaccataagttgccagaaagcagagcatgagttcagttatttttaatggcaataaagttttctggctgaagtatgt

SEQ ID NO: 625277 - DNA, 602 bp, Homo sapiens
atcttttcttaaaaatgatattttatatggatctttctcaactactgtctcaagagttgaagaggaacgcagagcaagctatatagactataactatatatataacatagagcaagctatatagactataaactatgctcaatcttgaaaataattagcataaatatataatatgcatttttctttttatacaattgctcttcagtagctttagagagttattgctagcaaagcaagctttttttttttttaaaccttcctgttgggcttctttttctagcatgttgaagtctacacaaataaaagactccagtgtctacaaaagtaggtggtaaaatgaacagtatggtattgaataatgaagtgaaacacctgaatccattcaggkcataattttgcttctatctcttgctggctgtgtggctttaagcgagttagttagccctctgtaaaatgaggataacaatattgacattaagattgcttggagaactaactgggataatgttaaaatatctgtcacctgaaagttacatgcggtacacaagctaccattacaatgctaaggggaacaaagaatatgctttttaaaaactgacagt

SEQ ID NO: 625278 - DNA, 552 bp, Homo sapiens
gtctaatccttgacaatgatccatgtgcgaggaaaaaaaatatgtattctgcagttgttgaatgaaatgttctgtaaatatctattaggtcaatttkgtcttttcatcaggataatctgtctaatgccaaaagtgggccattaaagttaacagctattattgtattggagcctttctatccctttagctctaataatatttgctttatatatcttggtgctccagtgttgtgtgcatatatatttaaagttaccgtatcctctagcagaattgactcctttatcattatatagtgaccttcattatctctttttatagttttggtcttggaatctactttatctgatataagtatagtgactcccgctctattttggtttccattggcatggaatatctttttttaaatcttttaattttcagtctatgcgtgtctttataggtgaagtatgtttcttgtaggcaacaggtcactgggtcttgttttttcatccattcagccagtttatgccttttgattatagagtttactccatgtacattcaatgtgat

SEQ ID NO: 625279 - DNA, 584 bp, Homo sapiens
atataaatgtggcataatttaattttttttttctgtgatgacactgtggcatagactagttagatgatcatcaatcccatttcctcttcctaggcacccagaaagacgatattttcaaacctctcttgcagttagactgatgtcatataactgactaatggtcaatgaaatctgggccaggaatatcaggcctggcccctaaaatatacctttcagtctccttttcttttctttccttttcttttactttcttttctttttctttttctttcttttcttttctttctctgcagaagcagaaggactcagacaatagagttttatatagaaagacatccctcaaagtcaccacttggaggagaaccacacaagaaagtccctcagcctgcatcaaattctggtgtgactaggaaataaawgttattgtgtgaagcctccaggaagtgaagcttgtttgtttcagtggctactattatttatgctgactaaagccaaagtttgagtttttctaattttacttaatttaaaaatataccaaaatgcataacacttcaaataaatatcattgtatgtacttattgttt

SEQ ID NO: 625280 - DNA, 561 bp, Homo sapiens
agtcttccctccccaactaagattatatttctgctaaataaactattgctttttagagcattatgatgtttcttcagtatagccaagaccaattttcttgaaattcctactaaaatgcaaactactgctaatatagccaagacttctgaacaacgttatttagccaaagtcttttcatatcagattctaatctagtcataatatgtttgactgctagctatgtttcagagaaatcttattcaagtraatattaaatgagaataaaagtcactgcaaaatccaaactgaatatacaacgtatatcagaaatgctaaaataccataatcacttaaacagataatcatctttatgcttcagtccatgaatttcaaaactgaatgatattaaccttcttttagatatgaagaaagaggcacctagaggtaatgcttagggtcacttaggacaacttcagaatgatccagttgctggtaagaaaatctgagctttaaaaagtggtgccttaggctctgagaggccacttctcaatttgctggaatggttcacatgtggatatgtgg

SEQ ID NO: 625281 - DNA, 566 bp, Homo sapiens
ctctttatgcaccaaactttcacatgattgctggagctacagcagttatattaccactgtgaaacacttgaggctaaaggctgaaagccagcaataaggttttcagaacagtgatggagagagcttgatatattaatgatattgttggaccatgcaatggtgctgyctgcttgcaccagactttacgttacatgaaagagaaataaaatcatcttgtttaaacaactattattttgggtttcttttacaaaaagccagactaaacctcatcttaatcacagattagtacaatactctgaaaaattttttaaataggtgaaaaatatatacaatgtttggttaagaagatatgggataaaatgacaatagtgaacttcaagttagtgaagagaatttagataattaaaaaaaatgttaccgggaaatgggataaccatctgaaaaaaatgtaaagtgagatcagtatcttacattattcaaattgaatttaatatgaatcaaacatttaaatgtaaaaagtgaaactaaaaaagtgcaaaaagaaatcaggagaatttaaaaaataa

SEQ ID NO: 625282 - DNA, 554 bp, Homo sapiens
ccatgtctcacatccaggtcatgctgcaaaaggtgggctcccatggccttgggcagctctgcccctgtggctttgcagggtacagcctccctccagactgattccacaggggctggtgttgagtgtgtgtgacttttccaggtgcacagtgcaagctgtcagtggatctaccattctggggtctggaggacagtggccctcttttcacagctccactaggcagtgccccagtgaggacactgtggkgggcttcaaccccacatttcccttctgcagtgccctagaagaggttcccatgagggccccacccctgcagcacacctctgcctggacatcccagcatttccatacatcctttgaaatctaggcagaaattcctaaacctcaattcttaacttctgtgcaccaacaggctcaacaccatgggaagctgccaaccttggggcttgcatcctctgaagccatagcttgagctgtacctcagtctcttttggccatggctagactggctgggacacagggcaccaactccctaagcttcaaacagcaggggg

SEQ ID NO: 625283 - DNA, 466 bp, Homo sapiens
tatggctatacattatactatataatttatgtatttattataacttttgtttattgtctgtctcccccagctaaaatgtaaattccatcatggtgaggagtttttctgttgtttatatatagcaccagtaactagaacacttcctggaacatacaagtgaacacagaggtacacaaaaaatatgaacaaatttattagcttccacatttgatgaactaagaaattaactacctatataacaattaatgttatacttttaatataattttatggccgaacaattttcacatgtaagcacatacscaaaagatattttcaaaaatgtgaatagacttaaatgagaagataaacgttgtcgtctttttcatattaaaaagatttgaaatatatatatttcaaatatacattaggggaattgataactaaactgtcatatgtccctttgatataggaattgaaactatat

SEQ ID NO: 625284 - DNA, 655 bp, Homo sapiens
tcaattaatttgctagagtgactcacagaactcaggaaagtacttatatttactggtttattataaaggttattacaaaggatacgggtgaagagatgcacaggatcaggtatgggggaaggagtgcaaagtttccatgctcagtttccatgctcaccccaggcataccatcctccaggaacctccatgtgttcagctattcagagctctctgaactgttctcttcggtttctatggaggccttattacatagatgtgatcaactaaaccattggccattggccattggccatcaaattaatttacttcagcctctctcccctcctgggaagtcaggggcagggctgaaagttagcaaacctctaatcatgccttcatttttccagttatcagccctcattttgaagctacctagggactgccagccatcagtcaatcaatagcacacaaaaagatarcactttggggattctaaggatttttggtgttgtatgccataaacaaggcaaagaccaaatatatattttacaatatcacaggtcccatctccaaataccatcatattggaatagggcttcaatatgtgaatttttggggaaacacaaattccataacaaataatacttgatagcaaccacaaaaccttaatggcata

SEQ ID NO: 625285 - DNA, 399 bp, Homo sapiens
gtggcaccaatctttacttccaaatggaacagtacatttataaaagtaaaagcgatggcatctacatcataaatctgaaaaggacctgagagaagcttctgctggcagctcgtgccattgctgccattgaaaaccttgctgatgtcagtgttatatcctccaggaatactggccagagggcagtgctgaaatttgctgctgccactggagccactccaattgctggctgcttcactcctggaaccttcactagccagatccaggcagccttccgagarccacggcttcctgtggttactgaccccagggttgaccaccagcctttaatggaggcatcttatgttaacctacctaccattgctctgtgtaacacagattctcctctgtgctatgtggata

SEQ ID NO: 625286 - DNA, 613 bp, Homo sapiens
acacttgaaattaaggaaaaccgttaaattgtgtatgagtatgtgtgwgtatagtataatgttatgagaaaaggacccatgatttgcagtcttataatctgggtatgtaatctaatgccatttaaaagttggtgagatagggtaaattttggagcatatttcattattctttttatatctgtaaaacaggaccatgttggcctggcatggtgactcacgcctgtaattccagcactttgggaggcctaggcaggcagataacttgaggtcaggagtttgagactagcctggccaacatgctgaaaccctgtctctactgaaaatacaaaaattagctgggcatgggggtgcacacctgtagtcccagctactcaggaggctgagtcaggagaatcacttgaacccaagagaaggaggtttcagtgagccaagatcatgccactccagcctgggtgacagagtgaggctctatctgaaaaacaaaacaaaacaaacgaaaacaaaagccaggaccatgtaaaaggatttttatgatatcaaagaacatcatgcttggtgtgtacaatgatatttcaacacactcaaattatattctaacatgctttctatgtga

SEQ ID NO: 625287 - DNA, 538 bp, Homo sapiens
tgggtgcttttctctagggtgaaggtacactagagcgtagtcattgaggacaagtcgatgagagattcccgagtacgtctacagtcagccttgctgtaagcttgtgcgctcggaagaacctagggtaacaatgggacaaactgaaagtaaatatgcctcttatctcagctctattaaaattcttttaaaaagagggggagttagagtctctacaaaaaatctaatcatgctatttcaaacaatagaacaattctgcccatggtttctagaacagggaaccttagatctaaaagattgggaaaaaattggcaaagaattaaaacaaacaattagggagggtaaaatcatcccacttacagtatggaatgattgggtcattattaaagtagctttagaactgtttcaaacaggagaagatagcgtttcagtttctgatgcccctgaaagctgtgtaatckattgtgaagaagaggctgggatagaatctcagaaaggaacggaaagttcacattgtaaatatgtagcagagctggtaatg

SEQ ID NO: 625288 - DNA, 550 bp, Homo sapiens
aatagaataagagtttaaacgaagtaaagtggtacgggcgtaggtttctctgcacagtgccgtatttaagggcacagaaaaagttacgggatgacaaaagaggtgagcaaggaggtctgcagggtggctattttgaacctaccaccggtttagtctggaggtggcccagtcacttggacatggggtatgacaatctaaatgccagcaatcttcatggtgccagaaatcccaaacaggcgaatgttcctcacactcgttcccgttcccgtaacaacacctgatttgtttctgacagaaaaggcaggactgggatggccagcctaagcgattgatgagaaatttaacctcctgtgataaaaaatcaacactaaagaccttgaagaagttcctgcccagacgtcttgggcagtatcgatgacctgacatacgaaactttgacaaccactaaacaggacaatagacaccgagcaggacaacaaacacaaaacaaacaatagacccttgggtatataaacaattatrgtaggtttttattagacagacaagggga

SEQ ID NO: 625289 - DNA, 374 bp, Homo sapiens
gttattttcaagacaaaactagagttgtccctagttcacattgaaaatctaagggtgtgcaaacatgcataaatgaacttcmtagtggaaaatagaaaaggatttccctttcctcaatcccttcaacctcttatgaactgttgtatcatgtttctttccatcttgctacctacaaatcactcctcaggaaggaagcgacaagtgacaaagcagaaagagctgttggaaaagaacttacatctttcaagggcaccagtttcatagctgtttgataggaaggcgtgagagtggctgggtagttgtagtcgacaatatcatgtttataatcagctttgtaggcaacctaaaacaggaagaaaagaagaagaatggag

SEQ ID NO: 625290 - DNA, 612 bp, Homo sapiens
tttgcctgaggaaggaagttaaaagacattactctgcccctcattagcagggaaatgatgtttaaaccaagggcagaatgggtttggactgacaacttttgttatgattattttaagacttttttttcccaygcagaattagagtataaagtataaaaagtgtgaaaagggccaggaaaattttaataacaaaaaaggacaaagtagtttatagatttaatgaagagaaaaggccatgtgaatttttttttctttcagaaaattgtattaagtaaatgttgacattaagcccaggataactttggagtaattcccctcccagagcatggaaacatcaactccagccccgttttgtgttttttttttcagataaaatacaggcaggacttcaataagatgaaaggcgctgcacattatcactcgcttccagctcaagacaacttggttctcaaacaggctcagagcgtaaacaaactcgtgagtgaggtgcgtatgggggaagagtcacacccatgagcatcacctcttttatctcctatagtcagtgaatgaggtgaccctataataaaaagctctggttaaaagtgtgacaccggccaggtgcggtggctc

SEQ ID NO: 625291 - DNA, 540 bp, Homo sapiens
agttacaccctatgcacatgaagacctagcccccaaccagtctgactggttgcagtaaggacacagatacagagggaagaccatgggaggatacagagagaagtggccatctacaagcagagagaggtctccgaagaaatcaaccctgctgatatcgtgatcttggatttctagcccctggaactgtgagaaaataaatttctgttgtttaagccaccaagcctgtggcactttgttatggcagccctagcaaactaacacatatgttatttgcaaggatatctgctattgctacagttttcagagttctctttacttcttactagccaacctcttgatattccaactcgctgttayagtttataatttgttatacagttgagcctccatatccccaggttctggatctgaggattcaaccaactgcagatcaaatatacttaaaaaaaagcaaaaaataacaatacaataatacaaatgatataaataaaaaaatacagggtaacagctacttacatagcatttacattgtattaggta

SEQ ID NO: 625292 - DNA, 499 bp, Homo sapiens
ggtggtgggcaagggcaggtctgacctgagaaagcatgagagctcaagacaaggccctgcttcctgaattctccaccccaagtgtgtcgacgcagcattgtacagtgcagaggagtggacggatggaacagggttgacaccatcagcctggaagagcaggacagtgagagttcacggtgcatctcatataagtactttcccttaccctgtccactgccagtttccttgagtgacccactctgggggtacctggtatcacatcccctccgctcaccagtgttatctccrtgcatgtcaccaggccctctttacacgcccacagcagtggccctccacttccctgcctctgggctttcttcaagctgcctaagtccattaagcttgtggagagaggtctcccctaaaggtataggggagttaatgaccctgacagttgccctcaaccaatgggggatgagagttgagtggatgtgtcccagccaccatccttcagtgggac

SEQ ID NO: 625293 - DNA, 537 bp, Homo sapiens
gccgccttcccgaccacctgtctggcacacatctggggtaagaaagcattccaaagccccgaatcctctctttggaattgactaagctcattgcctgaaggctaactctcatattttctcttttatccattattgacttataatttcattgctaaccctaaaaattcamtggggtttgcaaaaaagggatttttcgggaccattatccttttgtgaacttcaaacataccgtgtcaacgtttctccttgcccgcaaagtttaggatctaattctttccgactggtatgttctctgggccccgcgtgggcctccgatgatttctcctgcctttctctagacctgtggtatttctgctgtgtctcggcctcagacaccaacaagccatcaaatgatgtaggggcttgacaacaatttgtaattacaaccaccacacacacacaagtcatgatttgaaaagaaaaccctttcagaagtgagtcacttggcaacttaatacagagctaagataggtgtctgagcacagttgacggaaaaga

SEQ ID NO: 625294 - DNA, 435 bp, Homo sapiens
ataggcattttggtgtgagtattaaatttatttcattaatccaataaatctttattaagcaccttttattggcagaccttgttctaggcatgggggatatagaagtggcaaaaaggaccaaagatcctgtttagacagaactcatattttgatgggagagacacaatttttaaaaatagaaacattaacatgtaatatgtccagctgtgattaccactatgaagaccatcaagcaggctaagagtaatggaagataatgagataggagtggggacaggtgaggtgccattttgtatcaggtatttctataakgtgataaggtgacatttcagcagagactgaaggcaatgagaggcttcccaaagccaggaagagagattctgtcttcatatcacctcttttaaggcctgtgaggcaagggaacaagcacaaagg

SEQ ID NO: 625295 - DNA, 399 bp, Homo sapiens
gatggtagattttttgttatgtgttttttaattacaaaaatttctgtctgtatttagtttacattttagtaaggaaagacaaataagctamtaaatggtaatgaaaaatgctgtaaggatatctagagcaataaaagaagttatggatatgggagtataattttagatagtgaagatttctgtattcaaatgccacatggaaaaatgactaaggggaatgaggagatgagtcatatggaatgcccaagacacagaaggcaggcagagaaaataacaaggataaagacactgaagtaaaatcatgctttctatatttcaaaacagcagcaaggacactagtgtgacagagaaggaatgaccaatgggaggctgcagattttgtcagagatattttcaagg

SEQ ID NO: 625296 - DNA, 399 bp, Homo sapiens
gatggtagattttttgttatgtgttttttaattacaaaaatttctgtctgtatttagtttacattttagtaaggaaagacaaataagctactaaatggtaatgawaaatgctgtaaggatatctagagcaataaaagaagttatggatatgggagtataattttagatagtgaagatttctgtattcaaatgccacatggaaaaatgactaaggggaatgaggagatgagtcatatggaatgcccaagacacagaaggcaggcagagaaaataacaaggataaagacactgaagtaaaatcatgctttctatatttcaaaacagcagcaaggacactagtgtgacagagaaggaatgaccaatgggaggctgcagattttgtcagagatattttcaagg

SEQ ID NO: 625297 - DNA, 537 bp, Homo sapiens
tgttatgtgttttttaattacaaaaatttctgtctgtatttagtttacattttagtaaggaaagacaaataagctactaaatggtaatgaaaaatgctgtaaggatatctagagcaataraagaagttatggatatgggagtataattttagatagtgaagatttctgtattcaaatgccacatggaaaaatgactaaggggaatgaggagatgagtcatatggaatgcccaagacacagaaggcaggcagagaaaataacaaggataaagacactgaagtaaaatcatgctttctatatttcaaaacagcagcaaggacactagtgtgacagagaaggaatgaccaatgggaggctgcagattttgtcagagatattttcaaggctcaggatcatacagggacttgtaagcctggaaagcactttgaattttattcagaatgagatgaaaagccattgaaaagtttttaagcagatgagtaaaataatccaccttgtattttaagaggagcattctaccttctctgtggaatagag

SEQ ID NO: 625298 - DNA, 537 bp, Homo sapiens
tgttatgtgttttttaattacaaaaatttctgtctgtatttagtttacattttagtaaggaaagacaaataagctactaaatggtaatgaaaaatgctgtaaggatatctagagcaataaaagaagttatggatatgggagtataattttagatagtgaagatttctgtattcaaatgccacatggaaaaatgactaaggggaatgaggagatgagtcatatggaatgcccaagacacmgaaggcaggcagagaaaataacaaggataaagacactgaagtaaaatcatgctttctatatttcaaaacagcagcaaggacactagtgtgacagagaaggaatgaccaatgggaggctgcagattttgtcagagatattttcaaggctcaggatcatacagggacttgtaagcctggaaagcactttgaattttattcagaatgagatgaaaagccattgaaaagtttttaagcagatgagtaaaataatccaccttgtattttaagaggagcattctaccttctctgtggaatagag

SEQ ID NO: 625299 - DNA, 629 bp, Homo sapiens
gatatctagagcaataaaagaagttatggatatgggagtataattttagatagtgaagatttctgtattcaaatgccacatggaaaaatgactaaggggaatgaggagatgagtcatatggaatgcccaagacacagaaggcaggcagagaaaataacaaggataaagacactgaagtaaaatcatgctttctatatttcaaaacagcagcaaggacactagtgtgacagagaaggartgaccaatgggaggctgcagattttgtcagagatattttcaaggctcaggatcatacagggacttgtaagcctggaaagcactttgaattttattcagaatgagatgaaaagccattgaaaagtttttaagcagatgagtaaaataatccaccttgtattttaagaggagcattctaccttctctgtggaatagagaggtggaagggcaaagcttgaagcagagagagcagtgaagagtgtactgtaatattcttatgtgagaaatagtggagggaatgagaggtggtcagccttaaactgccatttgctctctgtatccgggctcagggactttcagactctccagggattccatacagtttttacattcgtttcccagttgcaaacata

SEQ ID NO: 625300 - DNA, 629 bp, Homo sapiens
gatatctagagcaataaaagaagttatggatatgggagtataattttagatagtgaagatttctgtattcaaatgccacatggaaaaatgactaaggggaatgaggagatgagtcatatggaatgcccaagacacagaaggcaggcagagaaaataacaaggataaagacactgaagtaaaatcatgctttctatatttcaaaacagcagcaaggacactagtgtgacagagaaggaatgaccaatgggaggctgsagattttgtcagagatattttcaaggctcaggatcatacagggacttgtaagcctggaaagcactttgaattttattcagaatgagatgaaaagccattgaaaagtttttaagcagatgagtaaaataatccaccttgtattttaagaggagcattctaccttctctgtggaatagagaggtggaagggcaaagcttgaagcagagagagcagtgaagagtgtactgtaatattcttatgtgagaaatagtggagggaatgagaggtggtcagccttaaactgccatttgctctctgtatccgggctcagggactttcagactctccagggattccatacagtttttacattcgtttcccagttgcaaacata

SEQ ID NO: 625301 - DNA, 629 bp, Homo sapiens
gatatctagagcaataaaagaagttatggatatgggagtataattttagatagtgaagatttctgtattcaaatgccacatggaaaaatgactaaggggaatgaggagatgagtcatatggaatgcccaagacacagaaggcaggcagagaaaataacaaggataaagacactgaagtaaaatcatgctttctatatttcaaaacagcagcaaggacactagtgtgacagagaaggaatgaccaatgggaggctgcagattttgtcagagatattttcaaggctcaggatcrtacagggacttgtaagcctggaaagcactttgaattttattcagaatgagatgaaaagccattgaaaagtttttaagcagatgagtaaaataatccaccttgtattttaagaggagcattctaccttctctgtggaatagagaggtggaagggcaaagcttgaagcagagagagcagtgaagagtgtactgtaatattcttatgtgagaaatagtggagggaatgagaggtggtcagccttaaactgccatttgctctctgtatccgggctcagggactttcagactctccagggattccatacagtttttacattcgtttcccagttgcaaacata

SEQ ID NO: 625302 - DNA, 629 bp, Homo sapiens
gatatctagagcaataaaagaagttatggatatgggagtataattttagatagtgaagatttctgtattcaaatgccacatggaaaaatgactaaggggaatgaggagatgagtcatatggaatgcccaagacacagaaggcaggcagagaaaataacaaggataaagacactgaagtaaaatcatgctttctatatttcaaaacagcagcaaggacactagtgtgacagagaaggaatgaccaatgggaggctgcagattttgtcagagatattttcaaggctcaggatcatacagggacttgtaagcctggaaagcactttgaattttattcagaatgagatgaraagccattgaaaagtttttaagcagatgagtaaaataatccaccttgtattttaagaggagcattctaccttctctgtggaatagagaggtggaagggcaaagcttgaagcagagagagcagtgaagagtgtactgtaatattcttatgtgagaaatagtggagggaatgagaggtggtcagccttaaactgccatttgctctctgtatccgggctcagggactttcagactctccagggattccatacagtttttacattcgtttcccagttgcaaacata

SEQ ID NO: 625303 - DNA, 599 bp, Homo sapiens
atatgggagtataattttagatagtgaagatttctgtattcaaatgccacatggaaaaatgactaaggggaatgaggagatgagtcatatggaatgcccaagacacagaaggcaggcagagaaaataacaaggataaagacactgaagtaaaatcatgctttctatatttcaaaacagcagcaaggacactagtgtgacagagaaggaatgaccaatgggaggctgcagattttgtcagagatattttcaaggctcaggatcatacagggacttgtaagcctggaaagcactttgaattttattcagaatgagatgaaaagccattgaaaagtttttaagcagatgagtaaaataatccaccttgtattttaagaggagcattctaccttctctgtggaatagagaggtggaagggcaaagcttgaagcagagagagcagtgaagagtgtactgtaatattcttatgtgagaaatagtggagggaatgagaggtggtcagccttaaactgccatttgcyctctgtatccgggctcagggactttcagactctccagggattccatacagtttttacattcgtttcccagttgcaaacat

SEQ ID NO: 625304 - DNA, 443 bp, Homo sapiens
ttgttattaattgatatagtaataagattggttagagaaatagcaaagagcgagcatccccatcctatgaccatatcagcaccagaagagaaaaacacttctacacagtttttcccttggcataggccctggtattctgttagggaacaggttataaagtaaatacaaagggtctttgtacttactttcagaatgtattttctttaacatgaaaagaatccaaggcctttttgcttctaattgctttttgtgtatctactaccatccmttgctaaattattgatacgtttcctcaaatctcggcatgatgtcctacattccaaattttcaatagctgaaaatttcaccttttcagtgccttcatgtttatcttagtaaaaagttgagaaagactgtaatagagttatttaatccgatttttttcatctaccataatttttgaa

SEQ ID NO: 625305 - DNA, 572 bp, Homo sapiens
ccgttagctagctgttcttctgtaacagtctctttctatgtattattcaaaactgatgcaactttttaaagaactattcctagaaactttctcccttcccagtcagaattaatgtattatttatccatttaaaggactatataagtaggacatggtttgggtatataacagcacttayggccatttactttgtggttcagtgatttctgtgtgcttctgacttgtatatactttcagcccttgtagatgtagtgctggtagttttcccaacttaaatttatctttatcatccacctttatccacagtcctcctcatgattagcacattgtcaataaatatttactaagctgaactgaaagtttttattatgcataaatactaagatgtccatgtccatggtcatgcaggacagcagaagtcctatttttttttttttaccagtgtatctattactaccaattgcttcaaggtcaggagccaactcatgtattagacatgtaaatcttgtgaaaatattcatattggaaacagcatgtagcaagtgcaaacagaactaaataaatccttaaat

SEQ ID NO: 625306 - DNA, 572 bp, Homo sapiens
ccgttagctagctgttcttctgtaacagtctctttctatgtattattcaaaactgatgcaactttttaaagaactattcctagaaactttctcccttcccagtcagaattaatgtattatttatccatttaaaggactatataagtaggacatggtttgggtatataacagcacttatggccatttactttgtggttcagtgatttctgtgtgcttctgacttgtatatactttcagcccttgtagatgtagtgstggtagttttcccaacttaaatttatctttatcatccacctttatccacagtcctcctcatgattagcacattgtcaataaatatttactaagctgaactgaaagtttttattatgcataaatactaagatgtccatgtccatggtcatgcaggacagcagaagtcctatttttttttttttaccagtgtatctattactaccaattgcttcaaggtcaggagccaactcatgtattagacatgtaaatcttgtgaaaatattcatattggaaacagcatgtagcaagtgcaaacagaactaaataaatccttaaat

SEQ ID NO: 625307 - DNA, 466 bp, Homo sapiens
tttatctttatcatccacctttatccacagtcctcctcatgattagcacattgtcaataaatatttactaagctgaactgaaagtttttattatgcataaatactaagatgtccatgtccatggtcatgcaggacagcagaagtcctatttttttttttttaccagtgtatctattactaccaattgcttcaaggtcaggagccaactcatgtattagacatgtaaatcttgtgaaaatattcatattggaaacagcatgtagcaagtgcaaacagaastaaataaatccttaaatttatcacagtcccttcaaagtatgaattcttcttctagcattacatcaaatttgataaaatcaaaaatattttatctcaatgttttaaaagtgttgatgctgtatacattgagttgttgtacaattgaatggaacccacattcaaagtttttcctcaatgttaaaattaa

SEQ ID NO: 625308 - DNA, 466 bp, Homo sapiens
tttatctttatcatccacctttatccacagtcctcctcatgattagcacattgtcaataaatatttactaagctgaactgaaagtttttattatgcataaatactaagatgtccatgtccatggtcatgcaggacagcagaagtcctatttttttttttttaccagtgtatctattactaccaattgcttcaaggtcaggagccaactcatgtattagacatgtaaatcttgtgaaaatattcatattggaaacagcatgtagcaagtgcaaacagaactaaatawatccttaaatttatcacagtcccttcaaagtatgaattcttcttctagcattacatcaaatttgataaaatcaaaaatattttatctcaatgttttaaaagtgttgatgctgtatacattgagttgttgtacaattgaatggaacccacattcaaagtttttcctcaatgttaaaattaa

SEQ ID NO: 625309 - DNA, 466 bp, Homo sapiens
tttatctttatcatccacctttatccacagtcctcctcatgattagcacattgtcaataaatatttactaagctgaactgaaagtttttattatgcataaatactaagatgtccatgtccatggtcatgcaggacagcagaagtcctatttttttttttttaccagtgtatctattactaccaattgcttcaaggtcaggagccaactcatgtattagacatgtaaatcttgtgaaaatattcatattggaaacagcatgtagcaagtgcaaacagaactaaataaatccttaaatttatcacagtcccttcaaagtatgaattcttcttctagcattacatcaaatttgataaaatcaaaaatattttatctcaatgtttyaaaagtgttgatgctgtatacattgagttgttgtacaattgaatggaacccacattcaaagtttttcctcaatgttaaaattaa

SEQ ID NO: 625310 - DNA, 466 bp, Homo sapiens
tttatctttatcatccacctttatccacagtcctcctcatgattagcacattgtcaataaatatttactaagctgaactgaaagtttttattatgcataaatactaagatgtccatgtccatggtcatgcaggacagcagaagtcctatttttttttttttaccagtgtatctattactaccaattgcttcaaggtcaggagccaactcatgtattagacatgtaaatcttgtgaaaatattcatattggaaacagcatgtagcaagtgcaaacagaactaaataaatccttaaatttatcacagtcccttcaaagtatgaattcttcttctagcattacatcaaatttgataaaatcaaaaatattttatctcaatgttttaaaagtgttgaygctgtatacattgagttgttgtacaattgaatggaacccacattcaaagtttttcctcaatgttaaaattaa

SEQ ID NO: 625311 - DNA, 154 bp, Homo sapiens
gaagagatacttgcacaaccatgttcagagcagcatcatccacaataaccaaaaggtggaagcaacccaagtgtccrtggatggatggacggatcaacaaaatgctgtctatgcatacagtggaatagtgttcagccttgaaaaggcaggagat

SEQ ID NO: 625312 - DNA, 287 bp, Homo sapiens
acatgatcaagtttgtgccagatttstccaccacaaagtcatcattcttccaattgtaattgagaagtatttcatatgaagatattaattacacatacacatgaatgcatatttatatgtaacatacatacaaaatattatttcaatgtctaaccaatataaaagttattaattagatatgtttaattttatttcctactaagtcttcaaaatctggtgtgtgttttaccctgacagcacatctcagtccagcctagccacatttcaagtgttcaatattcacatgg

SEQ ID NO: 625313 - DNA, 646 bp, Homo sapiens
atcttcacagtaccagcctttccccaagatcctcgccagagaaaagggttacccagatcatcctgccactggtgagttgctttgttgtcatgtactgggtggaccttatcatctcatcctcttcatccctgttatggacgtataacccagtcatcctgagcatctagaaccttgtagcctgtgtctatgccactctcgttccattggtacaaatccgctctgataaaagaatagttaatattctccaaaaaatggaattaaagtgctayaattttttaatgtgttggtgatgaaaaatatttctaaaaattagtctcattctatagttaaattgttcaagtagccccagatttagcttactgagtttaaataaaatgcgtggaattacacttttattatatttttatgcttctgaaactgaggcatctaaggactatgtagtttcttcagttcaatgttcaccatagattgacatttcagatatcaagtcttttgcacttttatttttatgttaactttgtacaagaaaatgtttctctctttttgaagtacattcttaaaaaatttgttttggtaatcaaatctctcaatgtttttacttttgaaaatatttacttactctgtttatgaatgatactttagctaa

SEQ ID NO: 625314 - DNA, 557 bp, Homo sapiens
tgggatcattctttgctgcatggaggccctgcctgccccagcagatgtggcgagcccatcctatgtcactcggtgggggcctaaatcggatctgaaggggtgtcctgagaacacagcaggcgtcctgaagctcccyctccctccctccgtggaagtcagctcaaggagttcctgaggacaggattcctgggggtttggtcctgggacaggacaagacacccacggtcccgtctcccacgccgccacaaactggagcccggatccaggccgcggctgcagcgggaacctcgctgccctgcgctgcagtagcgttatttaaaggggatgcagcctgactgccagaagcggagcgctagtcaggccagccaatgcgcatgcgcgcggcgcgagcgacttctcctgtcacagtggttcccacggttgtcttagaaaccagtccctgaggcttggcaaagcaggagccctccgtggcagtgcttgtgtgtcggggctctgaggctccggcctgacctctccacagggtcgacgggaacgtctctggatgccaggagacgcaa

SEQ ID NO: 625315 - DNA, 588 bp, Homo sapiens
tatattttaccacaatataaaaatacttaaaaaatagactatagctatatgcaacagcatgaatgaatatcacaaatataatgtctcataaaggaaagttgatgtaaaatatayatactatataatttcattcatattaaatccaaaaatcaaacaaaactgaggttctggcttctactcattgtggagtagcttggtgaactaacactcttaaaaataacaaacatgaaaccaggataaaaatactatatattattatagaaatccatctacatataatataaacacgacatatgtgtgaataagaaataatgaggatttcacctgtgcccagtgtaggggagataggtaataaagtttcaattcagcccagtaacaccttaaaaaaaaaaaaaactcttcaaataaacacaaccaaatccagagtctctataaatatcctttttagtttgtagtacacaattttgcaattaatgagacctgtgaagaaacatgaaaatgcaatccatacagaagataaaatgctggcagtagaagctaccccaatatatccaagatattgtaatcagaagacagggatttaaaggc

SEQ ID NO: 625316 - DNA, 570 bp, Homo sapiens
ttcgtaaattggttgcacaggatacctctgaaagtagaagtaaaggtagggctaaaayccaggaacactggttgaaagactgtttccaatgcccactccatcaagcctcgtgaatgcctctaggttctgctggtggaaaagtagacatttgctgtctagagaggtagcagggaatctcagtactggcaatatcatcttcattggtcatacataaattaggggggcaaaatgaacagtaactactgaaagctagatctccccaattttcacctctatctagattcaaaacataacagtctattagtcttataccctcagagaagactggaagactctagttggaagatcatgatcagcccaaaggaatagaccagtggatatgtcatgaggggcttttctgggaaaagttctcaacctgattgccctgtctggaagccacagttgacaattattacttaagaacctgaagcttactgtaaatgtttattgtactgcttttcaacacaaacagataaccaacaatcacgagattctaggtacagccaataacaaacacagaaacaaaaaaaa

SEQ ID NO: 625317 - DNA, 235 bp, Homo sapiens
gaattcttaaaaattaagaaatttattgcagaaatayataacttaatgggagatttggaaggtaaagctgactgcatctccagaaaagttagtgtaaacagagttgggaatgagaaagggaaagtttaatgaattaaataattggtcctatagggccagcaacaaaatacaggcatttgggaaaagaaaaaaatacaatgaagtgtgatgtatataaataattttatgaaatggg

SEQ ID NO: 625318 - DNA, 235 bp, Homo sapiens
gaattcttaaaaattaagaaatttattgcagaaatacataacttaatgggagatttggaaggtaaagctgactgcatctccagaaaagttagtgtaaacagagttgggaatgagaaagggaaagtttaatgaattaaataattggtcctatagggccagcaacaaaatacaggcatttgggaaaagaaaaaartacaatgaagtgtgatgtatataaataattttatgaaatggg

SEQ ID NO: 625319 - DNA, 539 bp, Homo sapiens
gggaagcccactccatccagtccttgtgtaaggatcctaaactcattcgtgaacactctcccttcatgactgaatcactaccttaaagccctacttcctaatcttatgacattggtgattaattttagggggacacattcagagcataacaccctatattcaatttcttaaaaattattttgttgttttgcttttctgtttttcaaatggcttaaagtgcacaaaaytggattactcataatccttggctcatagcataccttggctcctatttcatccttgtctgtgcctgggcctctgtgtaaatgtatttgaataatatggtaatcacttgtgaacttacaacacaaccaaagaaccagggttctgaccctaacatctgctcctcctctgtcctttttcctgattttcacccttcagcccgagggtaactactaccctgaatttatgtttaggattctcttcctttaaaaaaaaaacattgtttatttcatacatatgattaccttaaatgatatattatttagtttttaagggta

SEQ ID NO: 625320 - DNA, 420 bp, Homo sapiens
catggcaaatcccttcacaccggttcacagtactaagtaactccttgcttgtagaaaacattattaktatcattattatttttgagatggaatttgactcttgtagcccaggctggagtgcgatggtgtgatctcggctcactgcaatgtctgcctcccatgttcaaaggattctcctgcctcagcctcccaagcagctgggattactggcacacaccacgatggcctgctaattttttgtatttttgtagagacgtggattcaccatgttggccaggctggtttcgaactcctgacctcaggtgatccacttgcctcgaccttcaaaagtgttgggtttacaggcaggagccaccacacccagactagaaaacattatccaacagcaaacagtagcagtatgcttgggggttttaggat

SEQ ID NO: 625321 - DNA, 156 bp, Homo sapiens
atattaccttacaaatgctgctttayttataacttaagaatagggaccctgtcttttaaagctttatacatcctcaagtaaaggtttttcatattaaatccattaataatatctaaaggccgacctggaaattccatttctaagtatttatccaaa

SEQ ID NO: 625322 - DNA, 606 bp, Homo sapiens
tgtacttatagtggagctgggattaggatgcgtgttctggattcctggcggggtcctggcccatctgcagctaaggcctgtctttctgctcccatgaggtcccttttccattcctttcctccccatgacagccactgtcaccaccacccagggtctgcgctcactgtcacaccacccctcgctgacccctgtgtctgggctgaaacccaccatgtccgtcagatggattttcctcaatggtggttgggctccaaatccactctccctagactgacacaaattgcactacagggggccgcaactgtaggcgtttctgttctagagagagagagagagatggtcacatagaaatgtcaacatcacttggtgaagaggagagtggaaacacargagaaagttctgggagtgacgtcaggaggaggtagcccttgagttgggtcttgagggatgtgtaagagctaccaggcaaggaacactgggaagggcattccaagaggaaagagcagcattctccaaggctgagactggtctggtggctacaagatagagctgggtgaccgggaccccttgagacagtgctcccttttcaggaggaaacctgcagct

SEQ ID NO: 625323 - DNA, 549 bp, Homo sapiens
aaaaaccaaaataatggcatgttattgaggctcctgccatggtgttttttcttcaggaccttccaagaggttccggaaagttatccagaactgttcacctgaaacatgagcctggagcatttgtccacctgtcccacactggttgaggtcttcccctgaggctgttaacttgcaagtgtttctgggctgtatttatgctcagacaaaatcctacaataatggagatgccctagggcagaaagtggagcttgagtttgctggcagcacaagggaagcctgcgcttcagtggaacttcccrcggtggctgagactgaatgaaaggtgagctgagaagacatgacgcaggcgccattgcactaagcaatggtagccatcgatctgggcaagaggacccctgccctgaatcctgtacttgagaaggtgcctctctggccctccactgactgtaccctggcccacccagagcttcaccctctcttctagggcacacgctgggcactcaggcccctgatgaaatgtgcctgagcctgcatggcctcttccctagg

SEQ ID NO: 625324 - DNA, 567 bp, Homo sapiens
taatcttcacttgaataatacaaacatttattttttttacatatttatttatttatggaacagagaggtaattttaaaacagaatttttgcaaattgtattaaaatatattaaaaacataatacattatgacccagtagagtttttcaaagtaattcagtgttagttyaaaatgtgaaattcaatcagtataattcaccatagaatacagtgtgtatgtcagtataatatatatcaaaattggaaagaagtaaatgtatctttgttttgtaataagatgaaattaaaattttaatgaatttcaactttcattttagattctggagggtacctgtgcaggtttattacatggatgtattgtgtgatgctgagatttggggtacgaatgaagatgtgagtgcctgtcttgaacttgcacccagagcaatctcccctgatcagcagatggtaaactaatttgaattacacttgaatttcttagtagagcaggtcacaaagggcaaattgtggtccggagacaaaagtgcccaatggtctaaaatgagcctcccatatcactgagggtaca

SEQ ID NO: 625325 - DNA, 567 bp, Homo sapiens
taatcttcacttgaataatacaaacatttattttttttacatatttatttatttatggaacagagaggtaattttaaaacagaatttttgcaaattgtattaaaatatattaaaaacataatacattatgacccagtagagtttttcaaagtaattcagtgttagttcaaaatgtgaaattcaatcastataattcaccatagaatacagtgtgtatgtcagtataatatatatcaaaattggaaagaagtaaatgtatctttgttttgtaataagatgaaattaaaattttaatgaatttcaactttcattttagattctggagggtacctgtgcaggtttattacatggatgtattgtgtgatgctgagatttggggtacgaatgaagatgtgagtgcctgtcttgaacttgcacccagagcaatctcccctgatcagcagatggtaaactaatttgaattacacttgaatttcttagtagagcaggtcacaaagggcaaattgtggtccggagacaaaagtgcccaatggtctaaaatgagcctcccatatcactgagggtaca

SEQ ID NO: 625326 - DNA, 567 bp, Homo sapiens
taatcttcacttgaataatacaaacatttattttttttacatatttatttatttatggaacagagaggtaattttaaaacagaatttttgcaaattgtattaaaatatattaaaaacataatacattatgacccagtagagtttttcaaagtaattcagtgttagttcaaaatgtgaaattcaatcagtataattcaccatagaatacagtgtgtatgtcagtataatatatatcaaaattggaaagaagtaaatgtatctttgttttgtaataagatgaaattaaaattttaatgaatttcaactttcattttagattctggagggtacctgtgcwggtttattacatggatgtattgtgtgatgctgagatttggggtacgaatgaagatgtgagtgcctgtcttgaacttgcacccagagcaatctcccctgatcagcagatggtaaactaatttgaattacacttgaatttcttagtagagcaggtcacaaagggcaaattgtggtccggagacaaaagtgcccaatggtctaaaatgagcctcccatatcactgagggtaca

SEQ ID NO: 625327 - DNA, 484 bp, Homo sapiens
gttagttctccatgccaattttgcacttatctttgttctccacttcaaaatacatttacctctgacagaagctgagtacataaaagggaccttgtccagtggtacttatgaggcaggagacatgatatagttaaaattataaactataatcactatatagttatatactacatataatcactatatcactcccgggttcaagtgatactcctgcctcagcctcctgagtagctgggattacagacgtgtgccaccacacttgaataattgtatatgttttaaaataagaatagattttctcasctaaactgaagggaaatgctaaagaaagagtgagatttgacttgataattatgtgtctgaatgaatcagccaattaataaaatgaaaacaggccgggacagtggtacatgccagtcctcccagcaatttgggaggccaaggtgggcagatcacttgagtccaagagtttgagaccagcctg

SEQ ID NO: 625328 - DNA, 549 bp, Homo sapiens
tgtcactgcctctggtgtgtccattttacttctcttctcctgcctcagcttctgctctgaactctgtctctaacttacaagaaatcaagctcactggattctgagctcttcggggtcaaggactgtgtcagtagttcatgtctctttctagagatcacagcttagtatctggcacagagcagatactcagccaatgccaaatgattcatttgccagaaggctgaatttcatccataatcctagtcaatgcaaatacattttgccrgtggggtgtgtttgtcctctgaaggcgttttcccaggctttgtaaatacatacaggccatttagaaatttgaatgtcaaagagtaaaggagcttagaaagtaagcattggagaagtgtgggagggtggtattatttacaaaacattcctgggtccttgtgagttctatacacccttgatgagcactgattctgggccaggccagacacccagctggacccaggagatactgaggtgagtaaagccaaaatgcctccattcagcaggaggcgggcagtcacacca

SEQ ID NO: 625329 - DNA, 549 bp, Homo sapiens
tgtcactgcctctggtgtgtccattttacttctcttctcctgcctcagcttctgctctgaactctgtctctaacttacaagaaatcaagctcactggattctgagctcttcggggtcaaggactgtgtcagtagttcatgtctctttctagagatcacagcttagtatctggcacagagcagatactcagccaatgccaaatgattcatttgccagaaggctgaatttcatccataatcctagtcaatgcaaatacattttgccggtggggtgtgtttgtcctctgaaggcgttttcccaggctttgtaaatacatacaggccatttagaaatttgaatgtcaaagagtaaaggagcttagaaagtaarcattggagaagtgtgggagggtggtattatttacaaaacattcctgggtccttgtgagttctatacacccttgatgagcactgattctgggccaggccagacacccagctggacccaggagatactgaggtgagtaaagccaaaatgcctccattcagcaggaggcgggcagtcacacca

SEQ ID NO: 625330 - DNA, 549 bp, Homo sapiens
tgtcactgcctctggtgtgtccattttacttctcttctcctgcctcagcttctgctctgaactctgtctctaacttacaagaaatcaagctcactggattctgagctcttcggggtcaaggactgtgtcagtagttcatgtctctttctagagatcacagcttagtatctggcacagagcagatactcagccaatgccaaatgattcatttgccagaaggctgaatttcatccataatcctagtcaatgcaaatacattttgccggtggggtgtgtttgtcctctgaaggcgttttcccaggctttgtaaatacatacaggccatttagaaatttgaatgtcaaagagtaaaggagcttagaaagtaagcattggagaagtgtgggagggtggtrttatttacaaaacattcctgggtccttgtgagttctatacacccttgatgagcactgattctgggccaggccagacacccagctggacccaggagatactgaggtgagtaaagccaaaatgcctccattcagcaggaggcgggcagtcacacca

SEQ ID NO: 625331 - DNA, 549 bp, Homo sapiens
tgtcactgcctctggtgtgtccattttacttctcttctcctgcctcagcttctgctctgaactctgtctctaacttacaagaaatcaagctcactggattctgagctcttcggggtcaaggactgtgtcagtagttcatgtctctttctagagatcacagcttagtatctggcacagagcagatactcagccaatgccaaatgattcatttgccagaaggctgaatttcatccataatcctagtcaatgcaaatacattttgccggtggggtgtgtttgtcctctgaaggcgttttcccaggctttgtaaatacatacaggccatttagaaatttgaatgtcaaagagtaaaggagcttagaaagtaagcattggagaagtgtgggagggtggtattatttrcaaaacattcctgggtccttgtgagttctatacacccttgatgagcactgattctgggccaggccagacacccagctggacccaggagatactgaggtgagtaaagccaaaatgcctccattcagcaggaggcgggcagtcacacca

SEQ ID NO: 625332 - DNA, 567 bp, Homo sapiens
gcagaaaagggagccaagcaaatcctgatggagaacagcttgggtgagagtgtgagccacaggattgaggggctcaggcatgtaactggaggagcagaaagaatgaggggagataaagttgggaggtcagcagaggtcagtcacagaaggttttgaatcctggtgaggragcaatgggtgctgcacaagggacatgggcctggaggagatgcagttagctctgagtgaagatggagcatgccatccaccagggaaccacaagatgcaatagaaataagaaccctgagaagcctgcacaaagaatgaggggcccaggggtagcaccaagaaggtccctgtcagaggccagctttgaacggagacagaaaagactcttgagggcctcagctgctgcaaacctcctcaataaatcatattttaccttccaatatttgctaaagaatactaactattggaagagcaatggcccattgataataattattccctcaatgtacattttttacaattctcaaaatgctctcggtccagtctctcattggaacccccataaaatcccattttaca

SEQ ID NO: 625333 - DNA, 567 bp, Homo sapiens
gcagaaaagggagccaagcaaatcctgatggagaacagcttgggtgagagtgtgagccacaggattgaggggctcaggcatgtaactggaggagcagaaagaatgaggggagataaagttgggaggtcagcagaggtcagtcacagaaggttttgaatcctggtgaggaagcaatgggtgctgcacaagggacatgggcctggaggagatgcagttagctctgagtgaagatggagcatgccatccaccagggaaccacaagatrcaatagaaataagaaccctgagaagcctgcacaaagaatgaggggcccaggggtagcaccaagaaggtccctgtcagaggccagctttgaacggagacagaaaagactcttgagggcctcagctgctgcaaacctcctcaataaatcatattttaccttccaatatttgctaaagaatactaactattggaagagcaatggcccattgataataattattccctcaatgtacattttttacaattctcaaaatgctctcggtccagtctctcattggaacccccataaaatcccattttaca

SEQ ID NO: 625334 - DNA, 567 bp, Homo sapiens
gcagaaaagggagccaagcaaatcctgatggagaacagcttgggtgagagtgtgagccacaggattgaggggctcaggcatgtaactggaggagcagaaagaatgaggggagataaagttgggaggtcagcagaggtcagtcacagaaggttttgaatcctggtgaggaagcaatgggtgctgcacaagggacatgggcctggaggagatgcagttagctctgagtgaagatggagcatgccatccaccagggaaccacaagatgcaatagaaataagaaccctgagaagcctgcacaaagaatgaggggcccaggggtagcaccaagaaggtccctgtcagagrccagctttgaacggagacagaaaagactcttgagggcctcagctgctgcaaacctcctcaataaatcatattttaccttccaatatttgctaaagaatactaactattggaagagcaatggcccattgataataattattccctcaatgtacattttttacaattctcaaaatgctctcggtccagtctctcattggaacccccataaaatcccattttaca

SEQ ID NO: 625335 - DNA, 594 bp, Homo sapiens
gtgaattctaaacagaatttggtatattgtttatttagcactcattttatgttttctaattataagtataatgtattctcatattctcaaggtaataaatttgcaaattttaaattagtaggaagaggaaaaggaactaacatcccactgtccaaaggtaatcattattcaggttctgctcttttccttccatttgrttctctgatattttcttcatggttgccattatattacatattcaatattataacccactttgtgtttcagtcagtgtctatacatacaactttgaatgatacaaatgtctcatagaaactaagtttaatcaaatcaagaaactaagtttaatgccagtctatatcaatgtaccatttccttctagctaaatatttaggcttttccaaattttgttaacataaataactccaaagatatttttgttaacattttctcttagtgttattttcctaaggtagacttaaacaatttactataataaattatagaaaatgatcattttaaggttccttatacttgtaatatttgtaaataatatgttatcacctcttttgaattagttatttctgcttgata

SEQ ID NO: 625336 - DNA, 594 bp, Homo sapiens
gtgaattctaaacagaatttggtatattgtttatttagcactcattttatgttttctaattataagtataatgtattctcatattctcaaggtaataaatttgcaaattttaaattagtaggaagaggaaaaggaactaacatcccactgtccaaaggtaatcattattcaggttctgctcttttccttccatttggttctctgatattttcttcatggttgccattatatyacatattcaatattataacccactttgtgtttcagtcagtgtctatacatacaactttgaatgatacaaatgtctcatagaaactaagtttaatcaaatcaagaaactaagtttaatgccagtctatatcaatgtaccatttccttctagctaaatatttaggcttttccaaattttgttaacataaataactccaaagatatttttgttaacattttctcttagtgttattttcctaaggtagacttaaacaatttactataataaattatagaaaatgatcattttaaggttccttatacttgtaatatttgtaaataatatgttatcacctcttttgaattagttatttctgcttgata

SEQ ID NO: 625337 - DNA, 249 bp, Homo sapiens
tcactctctgcttcatagcaaataatttgttttgaatgcaggtatattttgttaagtagaaaactgtgcactaaaatatagtgcttaaaccaaaatcctatgtataaaaccacatattttctrttgatttgcattttttaaatgtaaaaatggattcacatttctgtgtgtaaaatgccagactcaaaatacttttactgctatgattccatgtcttatttactgaggaggcaaaccatactaacccag

SEQ ID NO: 625338 - DNA, 585 bp, Homo sapiens
ccagtatttcatgagtacttataatcagccaggatccattctcccacactgcggggaaaggagcccagtttaaaattcctgtcaggacaccagcaagatgatgaaatagaaagcctcaaagcccctccaccctcctctccaaggagacaccagcttgataataatacacagataaatcccctttgtgaaaagtacagaggagaatttaaagactctggattccctggtaggcttcaagccaggcacatctaaaccagcaggtaaatttgttgcactcactcatcctccctcaggagtacaacgcaatggagagaaagctccaaactcccagctcatctctagggagagaaataaaagtctagaccatatgtccaacattttgactttttgggagggcactagaacctatctaccctgaatctaagtgctaacaggaaaggatgccagattgcatgcctgctgataaagtcacagtttggactgtcattcaatcaccatcattcctcctgtgactcagtataacaagattgggagaatactctacagttcctgattcccccacaraaatgaaagagaatactgaga

SEQ ID NO: 625339 - DNA, 654 bp, Homo sapiens
tgttctttgaaaagatcaacaaaactgacaagtctttagcctgattaacaagaaagaaagagtaagggctcaaattcataaaatcagcagtgaaggcaatgacattcctacagctcttatatacataacagtattatgtagaatactatgaagaattgtatgccaataagttagccttaatgaaatgtaaaaattcctacacaaacacaaactactaaaactgactcaagaagaacaagaacatctgaatagaataacaagcaattaaattaaaatagtagtcaaaacacttcccacaaagaaaagcccaggaccagatgcctttactagtaaattctactaaacggtaagcaaaaaattaactccagctcttttcaaacttgtttcagaaaatagaacaggtaggaccacatctcaagtcattctataaagtcagtattactcagatatcaaaatcagacaaaaacattacaagataacacatttatagaccaatgtccttcataaatataaatataacaattctaagaaaacactaacaaaacaaatccagcaacatataaaaagaaatatataccatgaagaaacacatggtatttattccaagaatgtaaagttggttcaacatayaaaagtaaatcaatatacagtatg

SEQ ID NO: 625340 - DNA, 514 bp, Homo sapiens
  misc_feature 1, 2, 3, 4, 5, 6, 7, 8, 9, 10, 11, 12, 13, 14, 15, 16, 17,18, 19, 20, 21, 22, 23, 24, 25: n = A,T,C or G
nnnnnnnnnnnnnnnnnnnnnnnnnagctgggctaaaatagggcctgggctctccagccatagctgccactgtggagtagagctgcctgcaaccctcaagcctctggccttctgagggtcctccccacccatgcctagctctacccaacccaggtagaggcttcccaggacctgggaagactcacagcctctccctcctcatgccagagaagatcaagcaggctgtgctcactcactgcagctccagatgtaagaccttctgggtggtgccagtggagtcaccatcttcctctaagcttgctctgttttcacgaggaccatcacaggcatcctgtagtcttttccacacactcaggccaaacgttcctgtgatttgaccagactgctcagaaccacaactggcataccccctcctccatgccctctgccccttatcctctcccttcaagggtcagctagcwgcccctatcctcagcccccacactcactcaaatgttgagtgcccaccatacac

SEQ ID NO: 625341 - DNA, 540 bp, Homo sapiens
aaaactttaaataactgttacaaataatgttaaataaaattaaggaaaattgaataaaatggtggaaaagaattgcaatctatagaaaagaatcaaatggacattcwaaaactaaaaaaatacatctaaaattaagaactaattcaatagatttaatagcaagctgcatacagaagaggataggattcgtgaactggaaggcaggtcagcaaaaaaataatctggaattcagagattgaaaaaaaatgaaaaaaaaaaaaaagaatagggcatgagacctatgagacaaagtcaaatagtctagtatacatatagttagtacccccacaatgagaggagagagagaataatgcagaagtaatagtgaagagataatatctgaatgcttttcaaaactgatgaaagacatcaacctctagatttaaaagatcagtgaactccaagcagaataaatacaaacaaaaccacacttacgcacatcatagtcaaactgctgaaaaccaaaagcagccaggggaaaaaaagacaaattaccttcaa

SEQ ID NO: 625342 - DNA, 554 bp, Homo sapiens
accagggtaacctttcgcaggatgtgcaggactgtcctgctacctggagcaggaccctctgaggacagggtctcatcctcccagtgcctccctcactctccagcccggtccatttgccatgacgatcatgccccacacctgggggagaagcagtccctttctgtctttctggttatgttcacctctgcagccatttgcacagagactaaaacggatttgatgtgatgaatcacaaaatcacaccctttattcgacaactccacataaatagcgattccatttggaatgaattggacccatgyggtgagttatgggctcattagagtagcagagcacattcctttatcatattaagtttatttaaatcacacataatgttcatttttagaaacaattcatacctacctttaaggagtcatcagtattgctccaggaaacatgatacaatcccgtttctggcaggattcacacggtttctagtcgtgtgacaatgtgattccattatgtcttccctatggggacagcccataaagattgattctacattaaaaatg

SEQ ID NO: 625343 - DNA, 554 bp, Homo sapiens
accagggtaacctttcgcaggatgtgcaggactgtcctgctacctggagcaggaccctctgaggacagggtctcatcctcccagtgcctccctcactctccagcccggtccatttgccatgacgatcatgccccacacctgggggagaagcagtccctttctgtctttctggttatgttcacctctgcagccatttgcacagagactaaaacggatttgatgtgatgaatcacaaaatcacaccctttattcgacaactccacataaatagcgattccatttggaatgaattggacccatgtggtgagttatgggctcattagagtagcagagcacattcctttatcatattaagtttatttaaatcacacakaatgttcatttttagaaacaattcatacctacctttaaggagtcatcagtattgctccaggaaacatgatacaatcccgtttctggcaggattcacacggtttctagtcgtgtgacaatgtgattccattatgtcttccctatggggacagcccataaagattgattctacattaaaaatg

SEQ ID NO: 625344 - DNA, 411 bp, Homo sapiens
gatgatctgggcaaatgcaggctttgtcctcttgtgaattcccactgtatgtgtcaccagaattcagaacatagtggagaatctctcaggccttttatgattcagaagaaagaaatcatggagagagaggctccggggggcaggggtggagacggggatgacacagtcctccaggcagaggaactgtgttataatcaccactggtatatctgggtgttctgcacacaracttttgttaaacagcagaaggatcttttaagagaaacaatgaaagtccaaacagaagcttgagtgttttcttaactgtgccacaattgagaacaaatggaacaagggggcctcttggccatcacacggcgaagactctgtggtccaaaattcccgttttcatagcgtcccacctgacgacat

SEQ ID NO: 625345 - DNA, 562 bp, Homo sapiens
tgactttattctaatgataaggggactgagatagaagtgtaaaaatgtctcaagaaaatacatttcaagtagactgtcaccaggtgatggaaggcagctggatgatatgttcctttttaactgagattcctacgtggctataaatgggccaaggttaatgcattttaaaatccatatcccattatttcagttacagtgaattttgaacaatctttaaagagcataaatttgaatttatcmtaagtacctttctcagaaatctgtatttatttatcacaatttaatctaaccttggtcttccatctaaagatttaagctgtttttttgttgttgttttgtttttgctcttgttgcccaagctggagtgcaatggcacaatctcagctcactgcaacctccgccgcccaggttcaagtgattctcctgcctcagtctcccaagtagctgtgattagcaccaccatgcctggctaatttttgttgttgttgttgttgttgttttgttgttgtatttttagtagaaacgggctttcaccacgttagccaggctggtctcatactcc

SEQ ID NO: 625346 - DNA, 562 bp, Homo sapiens
tgactttattctaatgataaggggactgagatagaagtgtaaaaatgtctcaagaaaatacatttcaagtagactgtcaccaggtgatggaaggcagctggatgatatgttcctttttaactgagattcctacgtggctataaatgggccaaggttaatgcattttaaaatccatatcccattatttcagttacagtgaattttgaacaatctttaaagagcataaatttgaatttatcataagtacctttctcagaaatctgtatttatttatcacaatttaatctaaccttggtcttccatctaaagatttaagctgtttttttgttgttgttttgtttttgctcttgttgcccaagctggagtgcaatggcacaatctcagctcactgcaacctccgccrcccaggttcaagtgattctcctgcctcagtctcccaagtagctgtgattagcaccaccatgcctggctaatttttgttgttgttgttgttgttgttttgttgttgtatttttagtagaaacgggctttcaccacgttagccaggctggtctcatactcc

SEQ ID NO: 625347 - DNA, 574 bp, Homo sapiens
cccatctcctgtgtactttccacccctaattgtctgaggccctttcaccgtgccatgtttcttttttttgtatgtgctctatcctaagatcactgcagtaacagttctgctggcaccctgccttacctagcagataagctgtggggatatgagccacagtttctatagycttggggcctgaggctggagttgggggacagagaccatgagctactgtgcaaggaaatgttctgatgaagggcaaagtctggcgatgaaagaactgggagagtaggagtggaacccagaaatgtttagtcccaggtgcaggggctgggagtgagaacccagattgcttgatgacggagacgatgttgtcattttccttgtgtctacagcacctagcacagtgctcggcataaaataggccctcaaatgtaggtggatgataattactgaggagtaaaatttaggaactttgttgtttaaattgtgtgtgattggggaattgttgatttgcctgaatactgattacagtctctctaaaaggagcataaaaatgacatatttacgctgcctatgtaaaaagtattga

SEQ ID NO: 625348 - DNA, 574 bp, Homo sapiens
cccatctcctgtgtactttccacccctaattgtctgaggccctttcaccgtgccatgtttcttttttttgtatgtgctctatcctaagatcactgcagtaacagttctgctggcaccctgccttacctagcagataagctgtggggatatgagccacagtttctatagtcttggggcctgaggctggagttgggggacagagaccatgagctactgtgcaaggaaatgttctgatgaagggcaaagtctggcgatgaaagaactgggagagtaggagtggaacccagaaatgtttagtcccaggtgcaggggctgggagtgagaacccagattgcttgatgacggagacgatgttgtcattttccttgtgtctacagcacctagcacagtgctcggcataaaataggccctcaaatgtaggtggatgataattactgaggagtraaatttaggaactttgttgtttaaattgtgtgtgattggggaattgttgatttgcctgaatactgattacagtctctctaaaaggagcataaaaatgacatatttacgctgcctatgtaaaaagtattga

SEQ ID NO: 625349 - DNA, 267 bp, Homo sapiens
ctttatttgcctagaattttctgacttctcctcacccttcaacttgcttcctatcctgtcttgctaaaaagccctagaactgtgctgtccaatatggtagagaatttgcagcaatttgtcttagtctgttttccggtgctataactgaataccacagactgggtcatttgtaaagayggccgggcgcggtggctcacgcctgtaatctcagcactttgggaagccgaggcgggtggatcacgcggtcaggagatcgagaccatcctg

SEQ ID NO: 625350 - DNA, 527 bp, Homo sapiens
acattgaaataatcagactgtcacttcagtcgggtaattcaattttgtatttagcaattaaataaaaatatttaaacgtaaaatttacaaacacacatgcttggtcaaatrgactttatctgaatcttcaataattaagttgctttataaaatatccagattttcagcctaggaaaagatacaagcatttcaagactagagaattgtgagagcaatagaaatatttataaataaatgttaaaagtgaatatccaaattagaaaattagaaattcaggcatcaatttaaagtatctatctaaattgacaaggcctcactctgtagcccaggctggagtgcagtgccacaactgtagcccactgcagcctcaaactcctgggcttaagtgatcctcctgcctcagcctcctgagtaactaggactacagatgcacaccaccatactcagccaattttaaaattttttttatagaaatggagtcttgccatgttgaccaagctggtctaaaactcttggcctcgagcagt

SEQ ID NO: 625351 - DNA, 607 bp, Homo sapiens
atacttcattacaattcagttacatgaaatccccattctagagtttcaactcttctcaaatatacaatatcaattgtcctgtggttgacaggaaaattgagctttcaaaaatcttgaatgtgctggagaaaaaggtgaaaaataaacacaataggataaacagccattattttaagcagaatctttttctctcacaactgtatttcacctgcttaacactaataattaaaaggatctaaaaatagtcctataggagccaaaggtttcagtaacagattagaattactggatgkccatttcttgtggttaataacagatctattgtgttgacttaaaacataaaagggtgattattcccaacagatattttcttctttacgttaaacacggaagtctacaaaaaaaaatactgactgttcttggtaagtagattttaatttgtatctatatagtatgcttctcacttcattaggcttagaatttgtgactgaacagcactgtttgggcagcctgctgcctagttggtgatgtcagaagcaattactttcacagatttaagattttgtcatcacacatatcctgtctttagttatctgagtggacagcc

SEQ ID NO: 625352 - DNA, 597 bp, Homo sapiens
ttgaattagcacatttttattatttgtcctttattaaatattgtgttcaacataaaagttaactcagcaaattcccagttaaacaattgttccccaaacgtaccccactcagctacaatcattcaggataaattgggaaaccttggcaattgccttgggcagacatagctgcaattctaagtcaaagaaacagaacttgagttattatgggatcacttggagtttcctattttcgtttaaatgcaaaatgcaagtataacattttttatttgataagtgcaaattttagttcatatataaaatatcccraatttgcacaatctttagaatcaaaatcacttcttttcatttgttttaaaacagaagatttaaaaattatattgattgctaattactacatgaaaataattgcatcacaaagtgaggggtgttataaaaatgatccagccaaggtgtcaaaaatgctaggaatgccactggaagtcactgaatgtttttgatggcaggggtcacgaaagaatggttaaggtgaatcataaaaggcatcatcattataccaatctatgttatgtatatgtctagttaccaatatgtttt

SEQ ID NO: 625353 - DNA, 535 bp, Homo sapiens
acaaacttgaattccccaatggctcacagccttgcaaatctagtgctagctctctcacacattatataattttaaagaatttgtataacttccttgagactttctttttccaygtgtaaaattaagaggttaatctaaaatatctttaagctccttctcaattcaagcataccatgtatccaaagcagctcccataaatgtcttgacaagtattgtccaacagtaatttttctggggagtctctccctttgaagagaatacatataggaggccaacaatttcagggtgtcatacatttcagagtactatacttcccacctcatgggctcagtaatcttttctactattccatttatatgcctgccctccccttctaagcatttggttctttttatgaatcaattgaagagttcagaggggtaaagtaacctgtccaaagtcatacaaagtacctagggatgaggtctagatttttgttttgttttctttcccaagtttctccttgtgttaaatgtgaccttattaaatggtgtca

SEQ ID NO: 625354 - DNA, 535 bp, Homo sapiens
acaaacttgaattccccaatggctcacagccttgcaaatctagtgctagctctctcacacattatataattttaaagaatttgtataacttccttgagactttctttttccatgtgtaaaattaagaggttaatctaaaatatctttaagctccttctcaattcaagcataccatgtatccaaagcagctcccataaatgtcttgacaagtattgtccaacagtaatttttctggggagtctctccctttgaagagaatacatataggaggccaacaatttcagggtgtcatacatttcagagtactatacttcccacctcatgggctcagtaatcttttctactattccatttatatgcctgccctccccttctaagcatttggttctttttatgaatcaattgaagagttcagaggggtaaagtracctgtccaaagtcatacaaagtacctagggatgaggtctagatttttgttttgttttctttcccaagtttctccttgtgttaaatgtgaccttattaaatggtgtca

SEQ ID NO: 625355 - DNA, 601 bp, Homo sapiens
tttctaagcctataagactaatacctagacatttagattgtggtgggttcacttttcttcttgttagagggcactctgaatcactcttctggtgaagatctctgggagttacatgcaagcggtgggcctgggccccatttccacatcccacaaagagtgcatttactttgtgtatccagaagagcaaaactcccaactctactgctttgttttcaaacggacagccaagcattcratgtcttcagcttcactctctactttgtgcttgggttccatttctggttcatataggtatttaccttattttttaacttgactttgcctttttatccctctttatgtttttatttatgttgtatattcttttatgtatttgaaagagaaggggagtgtcctgttatgaacatgctataccatcttgactaagaacccctttgctgatacccaatgggattcctttatctggtctaactgactagatattttatcatttatttttcagtcaaggtttattgagcacaatatgatggtgtaggcatctttggagatatgctatctgcaggttcagctttggagattcagaagtgacatgcacatgcct

SEQ ID NO: 625356 - DNA, 601 bp, Homo sapiens
tttctaagcctataagactaatacctagacatttagattgtggtgggttcacttttcttcttgttagagggcactctgaatcactcttctggtgaagatctctgggagttacatgcaagcggtgggcctgggccccatttccacatcccacaaagagtgcatttactttgtgtatccagaagagcaaaactcccaactctactgctttgttttcaaacggacagccaagcattcgatgtcttcagcttcactctctactttgtgcttgggttccatttctggttcatataggtatttaccttattttttaacttgacwttgcctttttatccctctttatgtttttatttatgttgtatattcttttatgtatttgaaagagaaggggagtgtcctgttatgaacatgctataccatcttgactaagaacccctttgctgatacccaatgggattcctttatctggtctaactgactagatattttatcatttatttttcagtcaaggtttattgagcacaatatgatggtgtaggcatctttggagatatgctatctgcaggttcagctttggagattcagaagtgacatgcacatgcct

SEQ ID NO: 625357 - DNA, 597 bp, Homo sapiens
  misc_feature 336: n = A,T,C or G
ccatctagtggtcactgagaaatttttgtttcagaaaattgttaactttagaaattgttaataacaaagtagtaggaataacaataactgctgttgctgaagagacttattgaacacctacaattcttcagagctctatgttcagcattttatgttcattatcttgttttatctrtacaacaacctaaataggtaccgcagcgcagttatgcaaatgaagaaaccaagaacttagtggtattaaatgacatgccatattcagagatctagtaaatatctgactggttttcaaacccaattagtctagtccattgccttcacactcatccagaattntatgcctctactaaacctcggttgtgactatagaatatggttaatagactaacacacatgcacacacacacacactcacacacaaatgttaatgtgtttgaagggaggtgcaacctcacatttccactctacaaccaactcttatcatgttccaattcccaggcttctccttcaagcaagattttaattgcatggggatgtttacatattcgaaattcacatatggtatctctaaaatgtgatggattcactcattcatgc

SEQ ID NO: 625358 - DNA, 600 bp, Homo sapiens
gggagacagcgctggggctgcacactccagggagccagcaggarccagggacaagtgagagccctgccccttccaaattgaggcagaggctccctgggtaccactgcagccaaccaagctatggctgcaaacctgggcatccctgtgctctcaggacccagaagcaggtgggaaccccactcttctgggtgcagctgcaactgcccaaaccacagctgtggactcaggtatccctgtacttttggggaccaaggaaggccctccttgccctcacaagctcagaagtgggaagtgcttgctcccgctgctcttgctggcttctgcctgctcttggtgcccattccgatctcagagcaaagtcagggctgaacccaggcactgacatggcccagtgaggtgtgcacatgcttggggcagtgctgacatgttagccccctgccaccttggccccctctggactttaggggctaatgagcatagtagggaagctgagcaggggtggctgagggcagctcttggcacctacagcctgggtgccatgaatgacagtaggaagcagcgaggttcctgtaaaggagggaatgggtccccagtaaggtg

SEQ ID NO: 625359 - DNA, 600 bp, Homo sapiens
gggagacagcgctggggctgcacactccagggagccagcaggagccagggacaagtgagagccctgccccttccaaattgaggcagaggctccctgggtaccactgcagccaaccaagctatggctgcaaacctgggcatccctgtgctctcaggacccagaagcaggtgggaaccccactcttctgggtgcagctgcaactgcccaaaccacagctgtggactcaggtatccctgtacttttggggaccaaggaaggccctccttgccctcacaagctcagaagtgggaagtgcttgctcccgctgctcttgctggcttctgcctgctcttggtgcccattccgatctcagagcaaagtcagggctgaacccaggcactgacatggcccagtgaggtgtgcacatgcttggggcagtgctgacatgttagccccctgccaccttggccccctctggactktaggggctaatgagcatagtagggaagctgagcaggggtggctgagggcagctcttggcacctacagcctgggtgccatgaatgacagtaggaagcagcgaggttcctgtaaaggagggaatgggtccccagtaaggtg

SEQ ID NO: 625360 - DNA, 586 bp, Homo sapiens
gagggaaaggaagctctatgccccttcccacataccttgccttactcatctcttccatctttctgttcatttgtcccctttattatatcctttattaatataataaatatataaatgtgttttccttgatctgtgagccatcctagaaattaaccaaatctgaggagagggtcataggaattctaatttataggtggtgagtcagaaatataggtgacgacttactgcttgtgattggygtatgaagttggggacaattttgcaggacacagctttaaacttgtaggatctgatgctatctccaggtgacagtgtcagaattcaattgaattataggacacccagttggcatctgctgaaaaattggttgttggtggggagaaattcccacacattttggtgaccagaggtaaattattctatattgggaattagagtaggaaaaataatttgtttttttctatctcttacactagtttattgatttttacaaaaaacaaaaacaacacctgtggcactgggaagaaaagaagctgaagtgcatagataatagctgacatgcccaaggtctgctcgttagaagaag

SEQ ID NO: 625361 - DNA, 598 bp, Homo sapiens
ggcatatgatttttgcatattggttttgtatcctacaactttactgaatttgtttatcagttctaataggttttttgtggagtctttaggtttttccaaatacaagatcatatcatctgcaaacaaggataatttgactacttccattccaaattgcatgccctttatttctcctgtctgatttctctagctagaactttcagtactatgttgaataacagtggtgaaagtgggcctccttgccatgttccagatcttagaggaaaagcttyagattttccccattcagtatgatactagctgtgggtctgtaatatatgtttttttatgtttaggtgtggcccttatatacccagatttttaagagttttatcatgaagtgatgttgaattttatcaaatgctttttcagcatcaattgaaataatcatatggttttgtccttcattctgttgatatgatgtaccatattgattgatttgcatacgttgagccatcctggcatggcagggataaatgctacttgatcatgatgaatgatctttctaaagtattgttgaatttggtttgctagtattttgttgaagatttttgcgtca

SEQ ID NO: 625362 - DNA, 617 bp, Homo sapiens
tttctgaaagtagacggcagaaaaacagactttgaataatataatggtacttcaagattttaatatttaatttcaatagttcttctaaatggggcaagaatttggcctgtgaacaagaattgggccttttgaattttctttctattttacctgaatttatattgacccgcaaaaacctggaacatcctctgggcaaggtaagatcttgcttttattttttagtagacattaaagcaaacatgattaagcagctaaagtgccaactcaactcatgtagttttcctttctggaagctrctaaaatatctatacaaaactgcggaagcttctttatatgcacaatttgcaacaataaaatgatggaagcattttgtctatgttacccagctaccttgagtacagtataaagtagtagctaaatacccaagttctggagtgagaaagatttgccttctaattctcctctactgtttatgaattctgtgaatttgagtaattagagtttaagaaactcaaaacctcagtttccttgtttgtaaaatgtaagtggtattacttacttgatggagttgtgaggatttaaaaaatccaatgcatgaaagtgcttagcatagagcc

SEQ ID NO: 625363 - DNA, 235 bp, Homo sapiens
ttttttccattgagtatggtgttggctgtgagctagacatatatgacttttattattttgaggtacattcctcctatacctaayttgttgagtttttaatcatgaaagcatattgaaatttgtcaattgcctttcccatatttattgaggtgatcatatgattttcatcctttattctagtaatgtgttgtatcacatttgttgatttgtatatggtgaaccattttttttattc

SEQ ID NO: 625364 - DNA, 560 bp, Homo sapiens
cattggtataccccccccaaaaaaaatttttgattgtagacccagaaatattccagatgtttttgcatatatcatgtcattcaagcttgtcatataacaagcccatttggaaggtatttgtattcctactacacagaagaagaaactgaagcacacctatctagagttgtgctaaagaaaaacaaacataaatttatttagccaaattggagttttactgctctgccttatgtcttcctacctgcttgtaggatgacacctgtgcctaaagcatcttcaagctacttcccacagtgaagggcatccccaacccacatttctccacactgtagggcaggtcagggttcctcccgcaccatccactgaaaaaagttctggaacagctaaatctctgctttcaacattctgctaacactgctgatcttcttgcaggttaggaaatccartgccctaaagaaatacagacttaggctaaagagctggatctctggcttacacagatgttcctgaaacgttgagcatgttgtctaacctctctgtgtctcattgtccccatttgt

SEQ ID NO: 625365 - DNA, 603 bp, Homo sapiens
aaatagaactcatagtcagctacagagctctccacccaaaaacaatagattatacattttcctccttaccatatggcacatactctaactagagaaccaagagcaaaccaaccccaaagctagcagaagacgagaaataatcaaaatcagagctgaactgaaggagattgagacacacacacacacaaaaaaaaaaatcaaaagatcaacaaacccaggagwtggtttctttaaaaaactaataaaatagatagaccactagctagactaataaagaagaaaagagagaagatccaaatagacacagttagaaatgacaaaggggatattgccactgactacacagaaatacaaataaccatcagagtctattatgaacacctctaagcacacgaactagaagatctagatgaaactgataaattcctaaacacgtacactctcccaagactgagccagaaagaaattgaatcccaaaacaggccaataatgggctccaaaattgaatcagtaataaataacctaccaatgcaccaagatgtacaaagagatgggaccattcctactgagactactccaaaatattgaggagtggggaactcc

SEQ ID NO: 625366 - DNA, 603 bp, Homo sapiens
aaatagaactcatagtcagctacagagctctccacccaaaaacaatagattatacattttcctccttaccatatggcacatactctaactagagaaccaagagcaaaccaaccccaaagctagcagaagacgagaaataatcaaaatcagagctgaactgaaggagattgagacacacacacacacaaaaaaaaaaatcaaaagatcaacaaacccaggagatggtttctttaaaaaactaataaaatagatagaccactagctagactaataaagaagaaaagagagaagatccaaatagacacarttagaaatgacaaaggggatattgccactgactacacagaaatacaaataaccatcagagtctattatgaacacctctaagcacacgaactagaagatctagatgaaactgataaattcctaaacacgtacactctcccaagactgagccagaaagaaattgaatcccaaaacaggccaataatgggctccaaaattgaatcagtaataaataacctaccaatgcaccaagatgtacaaagagatgggaccattcctactgagactactccaaaatattgaggagtggggaactcc

SEQ ID NO: 625367 - DNA, 603 bp, Homo sapiens
aaatagaactcatagtcagctacagagctctccacccaaaaacaatagattatacattttcctccttaccatatggcacatactctaactagagaaccaagagcaaaccaaccccaaagctagcagaagacgagaaataatcaaaatcagagctgaactgaaggagattgagacacacacacacacaaaaaaaaaaatcaaaagatcaacaaacccaggagatggtttctttaaaaaactaataaaatagatagaccactagctagactaataaagaagaaaagagagaagatccaaatagacacagttagaaatgacaaaggggatattgccactgactacacagaaatacaaataaccatcagagtctattatgaacacctctaagcacacraactagaagatctagatgaaactgataaattcctaaacacgtacactctcccaagactgagccagaaagaaattgaatcccaaaacaggccaataatgggctccaaaattgaatcagtaataaataacctaccaatgcaccaagatgtacaaagagatgggaccattcctactgagactactccaaaatattgaggagtggggaactcc

SEQ ID NO: 625368 - DNA, 577 bp, Homo sapiens
tatttttaaatgtgcaattaaattattattgactatagtcaccctgttgtgctatcaaatagtaggtcttattcattctttctattttttgtactcattaaccatccccacctcccacccaggcccctactacccttcctagcctcctgtaaccatccttctactctaaatgtctagaagttgaattgttttgatttttggactccatgcataaacgagaacatgaggtgcttgtcttgctgtgcctggcttatttcacttaayataacaatctccagttccgttcatgttattgcaaatgacaggatctcattctttttaatggctgaatagtactcattgaatatatgtaccacattttctttatccattcatctgttgatgaacacttaggttgcttccaaatcttagctattgtgaacagtgctacaacaaacacgggagtgaagatatctctttggtgtattgatttcctttcttttgagtatatacccagcagggagattgctggatagtaaggcagctcaatgtttagttttttgaggaacctccgaactgttctccttagtgattgtac

SEQ ID NO: 625369 - DNA, 415 bp, Homo sapiens
atattttgaaacactagccaccttcctccaactctccacccctgatatggcctttaccttccacaggggaggttttcagtctactgcagagattctgtacacctccatagtggacattaatctgggtcagtgcatccctygaacgcagctccatgagcttcctcagttccattactgtgcagccaaagtccccttcacggctctcggccatcgagttggcaggcaagacacggtctgatgggttcgtcattttgcctgctgttaccaagcccctcaaccagagaagatgtagcgtttcccttcaactgaccagtgtctcctgcctccctgtcaaaacttcttcctacttcttgcttctctgggggcccagtgagggaatagattgaatatatcttgtgcaataagctcccgagta

SEQ ID NO: 625370 - DNA, 547 bp, Homo sapiens
tcagactccctcaaatctgcacttttatataacaccacctgctgggattggaaggccaactaggtgatttaggacacagggcatttttatacagaaaggcacaggaatggattcaggatttggtaagctctgacccccggggctgaaaacccagtggaaattagcattctttgctatatcaatataagacttcagcatcctgtttcctagtcccagtaaatggattttccagtgttaaggaaatctcttttcatctgctcctcttacagggctaaatggcttaggtcagaaatacaaacagaaaacacagataaatccagggtcatactttctttcagacttttctatattgctcctaatgtcccccatcaaagcagactgtgaggccaggtgcagtgwttcacgcctgtaatcccagcactttgggaggcagaggcaggtggattgcttgagcccagaagtttgagaccagcctgagcaacatagcaagacccatttctaaaaaaaatttttttttaatttgctgggtgtggtggtgcacacctgt

SEQ ID NO: 625371 - DNA, 637 bp, Homo sapiens
acatccaatccaagtaagtgatggttcttaactataaaatggaaattgtataaaaattaaaatagaatgtagaactagtaggataacattgaaaaactgactacttatatttgttttttttattttgtgtgtgtttttggctgattatatttaataaaagctactttyagtatttgaactaagtgcacatgtgtgcattcacatacacaggacaagctcctcagctttgaacaatatgaactttggacaatatgacaactatagcatcactgggcaaaaaaaatagctgacttatttccaagtgtgtttcctgggactagcagtaggttctctcaaattaaaagtaaaggcaccaggctataaagtgccaattcttagcaccagagagacttaaaatgtcacaggtgaatgacattacaaatcagagaatctgctgatctagttctgtggaattgtattatttttgtcaaatggaaaaaaaaaatcaaggtttatgccaaatagatttaaacagttaaatctttcctaaaatttcctagaagtgtattttacaatgctatgtaaaataaattgctggcttataaaaaatgctcaaagtttcagagatgtgaaaaataacaaagaactgaaaacatag

SEQ ID NO: 625372 - DNA, 580 bp, Homo sapiens
atcagaatataaggaataatcrtgggatgccagcttcatatacatatgataccagtgactggtcatcaattgaatatgttctttgagctgcttttctagcacttttcacaattcacagctgcactttgctagctaaagggatcaatctgtagctgtgaaacaggaaaaggctctaatctgtgattgatgatccaattcatgatctttttttcattatcattccattagactcttggtctgtgactatcttctttactgttgtgtctccagggccatcacagggcctggctcacaataggtactcaataagtatttattgtataagtgaataaatgatcaagaatgaatggctatgttaatcaactgagatgcatctaggattcaagaaagtcagaatactcaaggcgttctttatcttacaccttctattttgaattcaagacttattctcattttgtagaagaaaaactgagcactagtagttgacaatttgtttatgcatctattagtactttatcttgctgggctgtaattgctttcattcatatgtatctaaccaattgattgtgtatagcttaca

SEQ ID NO: 625373 - DNA, 439 bp, Homo sapiens
ccccaaacctcttgccacatgactacaccccaggcacttcactggccactaaaggaacacagagatgaatgcaacataagtcctttccatgtgggaagacatgtatacaaggaatactacacaggatagaacacgataatatgcgtgagccaccacactggcctgcaacatgattttgaatgttgctcctggttgcacaagtgtaacctgattctccagtcttcctaataattctgtaggaaacccaatatccttaaaataaataatccttcactcaaatccaccagaatttatttctacagctagcaacaaaacaatgttggaagatgcagcaactaataactaataagtacttggcttttcttctgtcatatttccacatgttgcccagcccagagtattaagcaggacsctctatcacatatcacagcaatgatcc

SEQ ID NO: 625374 - DNA, 505 bp, Homo sapiens
caaattgcaaacaaaacccctctttttggaagtcctgttggcagtgcatccccaatgcagaaaaataccaaagtcactatttttccctgtaaacctactcctttttttgtgtgtgttccttttctctattaaataacattatcccaagctcccatattagtaagcttgtcatcctctgtgtagctactcagccactaattcygttttattttgcctgtgatatgcctctcaagtacatagccttttctccattgccgctgtcttagcataggcccctgtcagctcttgctggcacagggacagcagcctcctaattgtgtttatgcttccaggttatcacatggccccagaattgtctttctactcacacacttttctgcatgttgttttttgcttactttcagtgtagcacataacccttcccgacgcggtcctaactcttctttcatcctccatcactttctcttgtgcccttgtgcccaggcaacactgaactacgcagaat

SEQ ID NO: 625375 - DNA, 505 bp, Homo sapiens
caaattgcaaacaaaacccctctttttggaagtcctgttggcagtgcatccccaatgcagaaaaataccaaagtcactatttttccctgtaaacctactcctttttttgtgtgtgttccttttctctattaaataacattatcccaagctcccatattagtaagcttgtcatcctctgtgtagctactcagccactaattccgttttattttgcctgtgatatgcctctcaagtacatakccttttctccattgccgctgtcttagcataggcccctgtcagctcttgctggcacagggacagcagcctcctaattgtgtttatgcttccaggttatcacatggccccagaattgtctttctactcacacacttttctgcatgttgttttttgcttactttcagtgtagcacataacccttcccgacgcggtcctaactcttctttcatcctccatcactttctcttgtgcccttgtgcccaggcaacactgaactacgcagaat

SEQ ID NO: 625376 - DNA, 611 bp, Homo sapiens
caactttaactagtatcccctctgctctcacttgctggggcctaagctgacaacttacagtgggaaaggattagcctctcttactaggctaatcctactcttcttccaccagcttgatcagcaagatgcagaacttcccaggattggtcccacatggagagtgcattaagaaaaggccacggacagtggcaagttctattgttccgtgataarggggccttctggagtgtgtgtttaatattgactcttcttcatagaggcttttatgggttccttagagagtgttctcactggaaaccttcatttctggccacattgacatgtggacacctgcccttcctgagcccctggcttttatagtgccccactcaattttggactttcagtgttaaaagattcctcatactcccaactcagaaagatctctcttccacatccccaacatgggaaatgctcatacatccttagttccaacaagcttataagtgttagcctgtcctcacactgccacctttacccttctgttgcagacaggcattgttctctgtgttacccaagtgtagagaatacatttcaaactgagtgatcccattgaagcctcctcccaaact

SEQ ID NO: 625377 - DNA, 505 bp, Homo sapiens
caaattgcaaacaaaacccctctttttggaagtcctgttggcagtgcatccccaatgcagaaaaataccaaagtcactatttttccctgtaaacctactcctttttttgtgtgtgttccttttctctattaaataacattatcccaagctcccatattagtaagcttgtcatcctctgtgtagctactcagccactaattccgttttattttgcctgtgatatgcctctcaagtacatagccttttctccattgccgctgtcttagcataggcccctgtcagctcttgctggcacagggacagcagcctcctaattgtgtttatgcttccaggttatcacatggccccagaattgtctttctactcacacacttttctgcatgttgttttttgcttacttkcagtgtagcacataacccttcccgacgcggtcctaactcttctttcatcctccatcactttctcttgtgcccttgtgcccaggcaacactgaactacgcagaat

SEQ ID NO: 625378 - DNA, 585 bp, Homo sapiens
caatataaacctattatttaagtcttaattttaggaaaatatatgcccctattgcacagcagatcattcagaaattttatagtaataatttaaattgattttttgggaaaaatgtttttgccttgtcttcatctataaaaggtcatagaaagcattaatagattttgatatctttttttaatgctaaaggaacaaaagctgaatagcactttgacaaaaaaaaagatgtgatgctcacactacaagagaattmaaaatctgcttgatgtccaaaggatatataatatgtgaatggaatacatccaacattttaaatgtctatatagacatactgttcctcacaacataagttggaaagaagaaaatgttattatcaagaagcttttgaggataagaaagagtctttattgtacctattcccaaatacacttgctgattttatacaatgacacaaaaagagacttaggataaaaattttaacagaattctatcttaagaagtcacacctactgatactagcctttgtaaaaataaacttgaatagctcagatacatttcaaaaaattcataaatcctatcctaaag

SEQ ID NO: 625379 - DNA, 523 bp, Homo sapiens
tgggggaaaccattgctatctttcccagagttaaatatattataccctaagstcttaagaacgtacttacaaaaaaattaattctaatcctataactatgtagaatagtgatttccaaatttatgtaataaacaaatctttttaattatctaaaataaaggagaagtaatcttaagttttgttttagatgttctcactctccaaaataacatccctaatctcttttatgcccatttttcttgaatcagtttttttctaagaccaattacattagtaaacacttccactttccaacagcccagagcatttgtagctgtatcttcattagagccatttcgcagttcacaagctaagttctgaggtattttatcagaattcattagatccacaagagactgacagaatttctcataaatgtcacctaatgggcttaacactatacctcagtaaatgcatattttagttaacctatactttaaacagcttaattagaacttaattgctggaattctcttccctaaaa

SEQ ID NO: 625380 - DNA, 523 bp, Homo sapiens
tgggggaaaccattgctatctttcccagagttaaatatattataccctaagctcttaagaacgtacttacraaaaaattaattctaatcctataactatgtagaatagtgatttccaaatttatgtaataaacaaatctttttaattatctaaaataaaggagaagtaatcttaagttttgttttagatgttctcactctccaaaataacatccctaatctcttttatgcccatttttcttgaatcagtttttttctaagaccaattacattagtaaacacttccactttccaacagcccagagcatttgtagctgtatcttcattagagccatttcgcagttcacaagctaagttctgaggtattttatcagaattcattagatccacaagagactgacagaatttctcataaatgtcacctaatgggcttaacactatacctcagtaaatgcatattttagttaacctatactttaaacagcttaattagaacttaattgctggaattctcttccctaaaa

SEQ ID NO: 625381 - DNA, 486 bp, Homo sapiens
agaattccctgcacaatcccatgtctttccatgcctcagtgcctctgatgacccatgggcctggatgccctttctccccatctttgcttgataaacttcaatggtcaagggctagttcaggtccttcttcggtgaasctgtctccatatttcccaggcagctgtttccacatcttccagttatttggttatatttctcttataacgcttttcacgtagtagtttgtattctccggatcttgtttcatatctggaacagatgatcaattctttttctttgtctttctttttttgatggctgttggatgagcaaaataaaatttgtcatacttttatatctaaggttctgtatctatgtaatccttcacaactgatttcagctttagtaaaagactgagttgttgaacagtagatatatttaatttttaatatttaattaattaagtgccattgtgagatgtgaattttgacttgctgggtttacatt

SEQ ID NO: 625382 - DNA, 591 bp, Homo sapiens
cctatgcccaggaagaggtaagctttatagatgggctcaggctgcaagccaagctcaacaccaatcagatggcatataaaaaggagaatggaagcctgacagatccacaagaatatccacaagtgtcagatatcccttttgtaaaatcatacaagaaataaactaaaataagaaaatgaacttagagaagcatcaccccaggtttacttattttatcttggtaattactaaatactctgctttacttggccatgtagcactcactataactttaccctggtgtctgtgacactgaggaaaaaatgccaagaaatctactattatccaaagaatactgattagatcgggccttgcagaatgtcctttaaaaaaatcagctttaaaaaacaccttgtagtaactgtcaaatttccaatcatgcttccagacagatcagcatttgtggtaggaactgttctcagtttttattaaaaatctcatttgccagtaggttcatatattttttagatgtctggcctaatttctttcaactctgtayatatcacatatttttcttagctataattagtcactaagacttattagcacagt

SEQ ID NO: 625383 - DNA, 429 bp, Homo sapiens
gtccactttgcctaacatattttcggcaggtagtttgaaggaaccraaaacattctgagattttgcaaagcataattgctttcgattctatgcctatattgttcttaatattgtactttacactttaatgaagtgtaaagtattgaataataatatgacttcttttttttccttcatgggttagtagggatataaatgataggaaggcatatagttaattccatttattctatttattcattcataaatgggtcatgtacctattatcaccattttccatggtaggattattgggtccagttattatgtgaatctttgggttttcctttcaattccaggtattgtaacctgatatgtgagtaagtttattattgttgcagtgtgctccaggaatacattcctactaatctgattgtctccacagggtag

SEQ ID NO: 625384 - DNA, 429 bp, Homo sapiens
gtccactttgcctaacatattttcggcaggtagtttgaaggaaccgaaaacattctgagattttgcaaagcataattgctttcgattctatgcctatattgttcttaatattgtactttacactttaatgaagtgtaaagtattgaataataatatgacttctttttyttccttcatgggttagtagggatataaatgataggaaggcatatagttaattccatttattctatttattcattcataaatgggtcatgtacctattatcaccattttccatggtaggattattgggtccagttattatgtgaatctttgggttttcctttcaattccaggtattgtaacctgatatgtgagtaagtttattattgttgcagtgtgctccaggaatacattcctactaatctgattgtctccacagggtag

SEQ ID NO: 625385 - DNA, 429 bp, Homo sapiens
gtccactttgcctaacatattttcggcaggtagtttgaaggaaccgaaaacattctgagattttgcaaagcataattgctttcgattctatgcctatattgttcttaatattgtactttacactttaatgaagtgtaaagtattgaataataatatgacttcttttttttccttcatgggttagtagggatataaatgataggaaggcatatagttaattccatttattctatttattcattcataaatgggtcatgtacctattatcaccattttccatggtaggattattgrgtccagttattatgtgaatctttgggttttcctttcaattccaggtattgtaacctgatatgtgagtaagtttattattgttgcagtgtgctccaggaatacattcctactaatctgattgtctccacagggtag

SEQ ID NO: 625386 - DNA, 429 bp, Homo sapiens
gtccactttgcctaacatattttcggcaggtagtttgaaggaaccgaaaacattctgagattttgcaaagcataattgctttcgattctatgcctatattgttcttaatattgtactttacactttaatgaagtgtaaagtattgaataataatatgacttcttttttttccttcatgggttagtagggatataaatgataggaaggcatatagttaattccatttattctatttattcattcataaatgggtcatgtacctattatcaccattttccatggtaggattattgggtccagttattatgtgaatctttgggttttcctttcaattccaggtattgtaacctgatatgtgagtmagtttattattgttgcagtgtgctccaggaatacattcctactaatctgattgtctccacagggtag

SEQ ID NO: 625387 - DNA, 612 bp, Homo sapiens
cattcccctaattaagtgtgtgctgttatgacatttcagctattactcattaattcctgcataatttgtgaggcaaattaaacagatctatagccattggataaatgatccacactccagcagcttgcaactgtctgtggttcctcgcacatgctaggtgtttttattcctgttttgtctttactgatttagtcccatctgctggagtatacataacttctgctcagtccttaaggctcatagcaggtgacactgattgcaggatattttcttgttactctcaggctgggataggtgcctctattttacatatgtctatcactgtatttttccatcccatttttacaattaccttttcacctgtcggtttctactattagactatgaggtccttgaaattattcaccaatacttcactctatgttttcagtctagtagtaaatactgtacaagtgtctgtagagtgaatacatgaagccaactctcagaaactagaattttcattgctgtgaagcactrttgaaaactcttattttgaaagctgaattaaacatattatcacctacattttatggacacatctgaatcactgcattaaattactgtgtttaa

SEQ ID NO: 625388 - DNA, 428 bp, Homo sapiens
tcagccactctccattgttcaaatggttgataaaatatgcacaaaactgaaatctggtggggtctggaacctgtggctttgcaatttggaaggcatttgattatgtyctttgtagattgttcatgttctttgaacctgtttgaaaaaacgtttatatttcaacctgctgagttcctaacatttaaaagagaataagtggcttccataaatccaggcaccccaggcagaaaaggtttgcctcacaaacaatggctgagagagacacctggcctcaggcacatcaagaggctgtattgttaggcctgggcattgtggagagtggatgttcaggaaaaggcaattcctaaaaggttactgtactaaaaggcttaagactcttatctgtcttgactcatttcaaacattcttcttcacaaaaacatcaaggc

SEQ ID NO: 625389 - DNA, 501 bp, Homo sapiens
ttttttaataacatttactttaaaattacaactgtaaattcttcctcccttcctttgagatataaatatttttccagcctcttgacattttttaccacccactgatgtctttctcaaggacctggaggccatccttttgaaatgtagtaaaggaagatagtgtcactattttccagtctctgtgagtggtaggagcctaacttcaataggagacaattagcaaacacagatgacctaatcacrttggcaatcattctgctaagaagctagctcaccccagtgcttaaaagctcttctaccttttatttcagtagaagtcttcctcccctactacagtagcctgaataaactcatcttactatttttaacaagtgtccagtgcatttttacttagataggacaaagcctaggccttggactttaccaagtcccctgggtgattctaatactgacccaagtttgagaacccctttagcttttgtagtatttttcaaaacacca

SEQ ID NO: 625390 - DNA, 573 bp, Homo sapiens
atagatctctcatgaatggtttggtcccatcctcatggtaatgagtgagttcttgcactattagctcctatgagaactggttgtttaaaaaacctagcatctccctgccctcctcccttgctgcttctctcaccatgtgatttctgcacatgccctttgtttcccaccttgagtggaagacacctaaagtccttacygggagcagatactagtaccatacttcttttacagcctgcagaaccatgagccaaataaacctcttttctttataagttactcagcctcaggttattcctttatagtaacacaaataggctaagacagaactagaacctaaactctgtttccaaaacgtgtgcgcaagtttgaataaaatcaagtaagtgttagaaaaaaattcttattgcgtttgcatgaatgtgtacacatatgcctgtgtatatctactatctacacacacatgtatgtccacttatatgtaggaaacagtcagtattttttgacaaatttatattttaggcatttacatggtggtggtttctctacatgcatatatgaataattacactctaa

SEQ ID NO: 625391 - DNA, 605 bp, Homo sapiens
tttgaataaaatcaagtaagtgttagaaaaaaattcttattgcgtttgcatgaatgtgtacacatatgcctgtgtatatctactatctacacacacatgtatgtccacttatatgtaggaaacagtcagtattttttgacaaatttatattttaggcatttacatggtggtggtttctcyacatgcatatatgaataattacactctaactcacttcagtaattttataatttgcctcatagcaaaatatctctttccattttaaagaaattactgtggccttttaaaaaagaatataagggaaataatgactttttttttttgtattttatacccataccacatccaaaagctttaggattcaaacacaaagtagcaagcatttacgtagaaagcaaatccaaagaaaagaggatttatatgagaccaactaaccaagtagggattgaattccaaattcagagaaaaaaaggtttattaaaatatgtcagctcatcaatttctagattacgcttttgaaatagccagtggccctctttcaggtgatttcagatagcagttcattttctttcaggtaataggattgaataaatagagaaggaagt

SEQ ID NO: 625392 - DNA, 561 bp, Homo sapiens
atgtataggccactttttgtttatctgtacatctgttgatgaacttttgggttgtttctactttttggctattgtgcataatgcttctatgactgttggtatacaaatatctgttcaagcccctgcattcgattcttttgtatacatatgcagaagtggaattctgggtcatatagtatttctatgtttaaattttttgaagaacagccattgtatcttcacagtgcccgcatcatttaacattcccaccagcaatatacagaggttcccatttctccatgtcrttgccagtagttgttattttctgctttttggacaatagccatcttaatgggtgtgaagtggtatctcattgcggtttcaatttgcatttcctaatgatagtgatgtcaaacaccttttaaaatgcttcttggccacttttataccttctttggaaaaatgtctattcaagtcccttgtcaattttttaattgagttgtttggttttttgttttttaaacacacacagtttaacaggtgtttgaagacataagtcatcacaaggaatgtgagttaatg

SEQ ID NO: 625393 - DNA, 583 bp, Homo sapiens
ggtgttatgcttaacttctgtgcaatggtagcctttctttttgcttttcttggcatgaccatataagtgatttacaaccaggttctttttatatgttttcccccactaaactcatatataatgatatgagaaatatatatatgagaaaatatggaaacaaatatatatatattttcttttgaaattttttgcttccatgttttctcttatgtttacccttttacattyataaatcaacatgcccatcttacagttactgcacttagtatatctccctttcactcaagttatatttttgacttttttaggagaaatgtatgtgagaaaaatatatacaaaaaaagaagcaaaaatttctaaaagtagtatatattttcttttggaatttttgctcccatgttttttctcttgttcaccttttacattcataaatcaagatcctgatgttatagttactgtacttagtatatcttctttttgctgtacatctcaaattatatattttttttaggaagccactatgttacacaaaatatatttcttaatgttaaaaatacttttgttaagaatgtgtaaagacaga

SEQ ID NO: 625394 - DNA, 412 bp, Homo sapiens
ctggcaccatccccaggcagaaggactgtcagtggaagtggaagccaaaatatctctagtgacacatggtgtatggtcttgtcaaattaagtctgatatggaaagggaagaaactatcttcatgagatagatatacatattcggtgtgactgggaactaaaccagggcaggaatatccatgctgttgtttcagaagagggttcacctggcatcaaatggaaagtgaactggaaatatagaaaactgtagattcaaccacaaactttattaaaggaagatgatctgaaactcaaccaaaaatgataarcgatttaaaaaataatgaaaatttgacggatgtggaacccagagaatgaagaaactatgttaagaattacaattattcccaaagatgtaactagaaacacgtaac

SEQ ID NO: 625395 - DNA, 412 bp, Homo sapiens
ctggcaccatccccaggcagaaggactgtcagtggaagtggaagccaaaatatctctagtgacacatggtgtatggtcttgtcaaattaagtctgatatggaaagggaagaaactatcttcatgagatagatatacatattcggtgtgactgggaactaaaccagggcaggaatatccatgctgttgtttcagaagagggttcacctggcatcaaatggaaagtgaactggaaatatagaaaactgtagattcaaccacaaactttattaaaggaagatgatctgaaactcaaccaaaaatgataaaygatttaaaaaataatgaaaatttgacggatgtggaacccagagaatgaagaaactatgttaagaattacaattattcccaaagatgtaactagaaacacgtaac

SEQ ID NO: 625396 - DNA, 553 bp, Homo sapiens
ctaaatagatgttcccttcactgtagcaatgttgaaggcatagtttagtatatctaactaggagctgacttgaacaaacattttagctagttatagtaaggaaaaatttaaaaatagcagcttagcagagaatctgwtaaaaccaaaataccaccttggtatgtggcagacatgttcttgtataaaaacactttattgattgtgaccaaggcaattgtactttataaaatagggaaataaaaaaacattgtagagatgaaagtctacaagatgcatgtatatatgtagggggaaaaagtcactaaaagcagttgatactggttaaaaaatgaagctaccatactttgaagaaaaattaattagtagttcacaagacaaaaacgaataaaggcttacttggaacacatgaaacccatgaagtttatggtgagatggaacacatatactatgtttttatgaaatccaaaatcaacaggaataatcactagaaaattaggggtgtaggaaagtgggattatgcttaagaatccacttacaaactgactatcatcta

SEQ ID NO: 625397 - DNA, 521 bp, Homo sapiens
ggatattcctatacagaagaataacattaggcctycacctcttaccctatacaaaaatcaactcaaaatagattaaagacctaaatgtaagatggaaactataaaactacaagaagaaaacacaggagaaactcttcaggacataggtgtggggaaagattttgtgaataagacccaaacacataagcaaaagaaaaaccaaaagtaaacaaatgggattatatcaaactaaaaaatttctgtactgcaaagaaatcaacagagtggaaagataacctacagaatgagaaaatatttggaaactattcattttacagtagattaatatccagaatataaaggaactcaaacatctcaacagccaaaaaaaaaaagccagtttcaaaacatgggcaaatgatctgaacaaacatttttcaaaagaagacatacaaatagccaacaagtacgtgagaaaacatttaacatcactaatcatcagggaaatgcaaatcaaaaccacaatgagatatcatctcacc

SEQ ID NO: 625398 - DNA, 609 bp, Homo sapiens
caggcacattggctcaaacttgtaatctcaacacttctggaagccaaggtgggcagatcacttgaggtcaggagtttgagaccagcctgactaacatggtaaaaccctgtctctaccaaaaaatacaaaaattagctggacatagtggtgtgtgcctgtagtccttgctactcaggagaggctgaggtgggagaattgtaacctgggaggcagaggttgcagtgagccaagattgcaccactgcactccaggctgggtgatagagtgagaccttgtctcaaaaagaaaagaaaagaaaagaaaagaaaagaaaatgtggtatatatacccactggaatattactcagccatcaaaaagaatgaaactctgtcattggcagtaacacagatagaactagaaaacattatattaagtaaaataagtcaagcaaagaaagacaaatattgcattgttctaactcacatgtggaaatttaaaaagtgaatctyatgaagatagtgaaagattggtggttatcaaaggccaggaggggtagagagaggaaactatttaaaaacgctgattaaggagtacaaatatatagttagatagaagaaataatgcctagt

SEQ ID NO: 625399 - DNA, 388 bp, Homo sapiens
tgaaagctatcttttcttgtcttctataattttagaaggtattttaaagatgttcctgggatcagactttatgtgcaacatgtcacgagagagtgaatattgatgatcaaactcctcttctaaaatgtatcataaaatcaggtttatagtaaatgttcttcagatcattaactaccataattctccagtccttttcttagctgttttattaatagtgtacaatcttcattactactaactgttacttgttaaaaacagacccatctaccataagccacatctcctcccactccctgttttacaagatacccayaaatacccttaaaacccatctgttctgtctgggatgctcaagggtcctccctcccacaacgaaaaaaaaagagct

SEQ ID NO: 625400 - DNA, 622 bp, Homo sapiens
atgacccagtttaagcaaaaagtaatttgctaatcacaaagcaaagaaataatacaataggctcctctctccactcacacacagcaggtatacccattatccagacagagcagtagacagaaaaggagatcaactgcaatgtgactggtactcaaaccacagagggctgcttccgaacaagagctcaccccaaagaaaaattggcaggcagtgccacctgcagaggaaagatatatcttctgcaggcactagctctccaaagctgacaggctgatatattctgctgaataaattgaaaaactttcaagtggtctaaaaaaggtagtctgaagtagactgcactgcagggatccaaccaagttaagaatgtcaggagcctgtggcaacatccacaccaggaaaaaagactcataacctctcgagttaagtgcaaatgagaaaatagcatggtgggtttcgtttctttgcgtatgttgtgtgtgtgtgtgtgtgtgtgtgtgtgtgtgagcccgcgtgcrtgtgtgtggctgtatgttgtgattttttaaaggacacaaaactgcaaactgttctttccatataaggagtaaatcaggcatgagaagtattttttcctctggaa

SEQ ID NO: 625401 - DNA, 579 bp, Homo sapiens
cttaattgaatactatcttactttcttctaattgcttaatatgtgtaaatttaacctcccaaacaagactacaagatccctgagagcaaggattatgtccaacatgtatatcctgttcccctcagctaggctgagtatatatatatatatawaatttatttcctgtcatcttatctgaggagggtgggaaaggcctcctggtgcacaaaggtccctctaccctgtgtttattttctttaaaccaaagaattcactcatttagattaagaaattagcccaattatagtactaacaatcgctgggatgatttctccacttagctattctgcggtgatatgcaaaataatagtttgggacttcaaggcctggatttgattctcaactccatcacttcctaatgacatgatcttgacaagttattaacatgtccataaaatttgcttatctataaaatgaggaaataacattctactcatggttatgtgacaactgaaaaaaaaatgcctgtaaaatttagcccatagtaagcacttagtaaatgctagctttttaaaacaataataataaatagtaacaata

SEQ ID NO: 625402 - DNA, 610 bp, Homo sapiens
gggctttgttagagaagagccagtagcatgaacacagttccattcatcccccaaagtcccacaagggttgggtcacagttaaggcactctgagcctaggacactcaaatcttatataatgggctgcaagcaaacttgcccaacatttgttctgaaggtgaacattatccttattatactagttagtaatcatgcatgctctcygcttcagaagaagacactataacttctagggctatttactatataaacatccttaaaaaaaatagtccagaacaaagaccatcagtctctgttctcaatatgtgcaggaaacaagcaatccagagaattgccttccaacaaaacttagctcctactagcaaggaccttacaatctgcaggaaaagatagacaagtaaattttaaaactaagagatagggaaatagtgctattttaaaaatcattaatataataaatgcatacaatcttaaaataccatataactataaaagatagtgaagccatatacttactaacatgaaaattgtttatgatatattgtttgttgcagaaagtggtctaaaaagtaagtatagtatactcccattcatatgtacaggtaaatcag

SEQ ID NO: 625403 - DNA, 611 bp, Homo sapiens
ttaaaaaaaatagtccagaacaaagaccatcagtctctgttctcaatatgtgcaggaaacaagcaatccagagaattgccttccaacaaaacttagctcctactagcaaggaccttacaatctgcaggaaaagatagacaagtaaattttaaaactaagagatagggaaatagtgctattttaaaaatcattaatataataaatgcatacaatcttaaaataccatataactataaaagatagtgaagccatatayttactaacatgaaaattgtttatgatatattgtttgttgcagaaagtggtctaaaaagtaagtatagtatactcccattcatatgtacaggtaaatcagataaatcattgacatgggacattgcaagtaatcaatagataatttcatttatataaaatattaaacttataatatgtaatatttataaatactgtcctggaatgatataaagtccaacatgctgtgcacttaagaactgcgcacaaaaagttatcttaaaaagacagggaatccaggcaggcttcttagagaaagcagttattaagtgaaatttcaatgaaatgtaaaaagtgggaagagaatttaaagcagaaga

SEQ ID NO: 625404 - DNA, 583 bp, Homo sapiens
gtgcacttaagaactgcgcacaaaaagttatcttaaaaagacagggaatccaggcaggcttcttagagaaagcagttattaagtgaaatttcaatgaaatgtaaaaagtgggaagagaatttaaagcagaagacagttgtgaacacactgaacttggaatagcatgatggattcataaaatagtataaaattatccataaaactgcatgttgtctggagtaaccaggataaaagataaatacaaaaaaatagtagaaagtagggctaaagaggtagacacgggttagataaaagtagcagccaataatgtattctaaaaggtgaggaggtggtagaaggcacctacctcagagtacatctacagcaggctccmctctaagagccaaattcattgctgtgtacatgcagctgcttgatgaaaagggattggacttagagcctctccagcaccctccatccctgaactacattcatccaacaggtacaggatgcctccactaggattaccccggcacaacagacttgtcatgtccaaaatgatatacattacctcctccgtcacctaaatcaaaacccaaaaggg

SEQ ID NO: 625405 - DNA, 566 bp, Homo sapiens
tatctcacataactgcttagaatattgaaaattattcaaaacttaaaatataaagaaacatctacactttacctttgaggacgctgtgacaggcagttccaggagggcccccagtgctccttgcctcctggtatgtatagtttcttcccaatcctcaaggttgatctgtgtgaccaaggaatacagaagttattatatgctacttcaaaggctaggtcataaaacacattttggttcctttctctttttccttctcttaacycactcactctgggagaagctagctgccatggcatgaggctagctgcctctcaagcagccctatggagagagcaacatttaagggactgaggcttcctcccaacagccagtgaggcactaagacctccagccaacagccatgcaagcgagccaccatgcaattgatcctctagcccagtcaacatctcaataactacagcccttctggatatcttgactgcaatcacacaagacgctaaaccaaagtcacccagcttagatactcccaaaacctgactcttgaaaactgtgtaagaaaatatttt

SEQ ID NO: 625406 - DNA, 613 bp, Homo sapiens
ctgtaaggacgtactagctatcctgctaaagaaagaggccatgtgacaaaccaaggtgtcccaaccaagctctcagatgaatacggctgcatgagtgatcccagtcaaccctatgtgtgataaaagaatcactgcagaaccacaagaaagaatcaatgttgtttgaagaccctaaatttggaggtagccggacacaaaatagataactgaaatgcaaccctatcacatataaaayactttacctggaaacttgaaaaactgtaaagtgtttctaaaataaagggcattttgatcctgttagacaatagggtatctgatatccttgatttcaatcagataaagccattgacatctaaatgaatcatacaattaatgattcttacaatagaaagactgaattttacagattatggaaattatcattcttataccatggctaactaatgcttggacttcctctaaaacatcatttcttaaactgtagtttgaggtccattgattgatttcaggggccacatgaaaaagacgcctaactattttgtctttaattttttctgaatagtttaaaacataactttgtaataagtatttcatttacaagacattaagttaa

SEQ ID NO: 625407 - DNA, 613 bp, Homo sapiens
ctgtaaggacgtactagctatcctgctaaagaaagaggccatgtgacaaaccaaggtgtcccaaccaagctctcagatgaatacggctgcatgagtgatcccagtcaaccctatgtgtgataaaagaatcactgcagaaccacaagaaagaatcaatgttgtttgaagaccctaaatttggaggtagccggacacaaaatagataactgaaatgcaaccctatcacatataaaatactttacctggaaacttgaaaaactgtaaagtgtttctaaaataaagggcattttgatyctgttagacaatagggtatctgatatccttgatttcaatcagataaagccattgacatctaaatgaatcatacaattaatgattcttacaatagaaagactgaattttacagattatggaaattatcattcttataccatggctaactaatgcttggacttcctctaaaacatcatttcttaaactgtagtttgaggtccattgattgatttcaggggccacatgaaaaagacgcctaactattttgtctttaattttttctgaatagtttaaaacataactttgtaataagtatttcatttacaagacattaagttaa

SEQ ID NO: 625408 - DNA, 570 bp, Homo sapiens
tctcagctaattggaaagtatttgtattatctaaacacatatacttacatccacttatcctgaaataatcaagtatgataagtaaaagcactttctcttaacatttggcagagaggaaaattggatgtattctaagctttataatagtatacctcaaaaaaattttaaaacaataatatacttcataggctgactttatgtaactacagtagtttcctttaaatatacaaatgtcttttaaaaatgtacattgttacaggaaagttacttttcttcttatgcaattgatagcatcacagaaaaaggcaaatcactacacatttgcctgccattaatattgactgaaatcacaagccgttttctacccttaagcttcctgcctattctacatgttattactttgtgccaaagatggaaatttatcataaataaattcaatgcatattaaagagaggaagcattctcatggcagaggtggggagcactttttgtttccacttgtttataagggaatattttattcatttcttactctctctccrgggtagcatgcaaacagagtcactcaac

SEQ ID NO: 625409 - DNA, 519 bp, Homo sapiens
aatttttccattgattattgtaggaaatctttcttgacattacttgctcccacatgcttttttgggttttgttttgttctcttttgtttttgataattgagtacatccccatatctttgtatttatgaggcagagatagttgtttagacacataaaacaattatgttctatttttatttttaaaytattcatttgaaatagcaattgcataatcattagctgtctggtttgataattgaaaataatttctgaagaactaagtacttttatcctcttaagtctgcagcagtgatggctaaatcaaacaacctggagaaagggtgtcctcttacattgactggtagatcgccaagacaccttttttttttcttttttttctttttttcttttgagacggagtctcgctctgtcgccagggtcaccaggctggagtgcagggatgcaatatcggctcacttcaagctccgcctccaaggttccagcgattctcctgcctcagcctcccaagcagctgggact

SEQ ID NO: 625410 - DNA, 519 bp, Homo sapiens
aatttttccattgattattgtaggaaatctttcttgacattacttgctcccacatgcttttttgggttttgttttgttctcttttgtttttgataattgagtacatccccatatctttgtatttatgaggcagagatagttgtttagacacataaaacaattatgttctatttttatttttaaactattcatttgaaatagcaattgcataatcattagctgtctggtttgataawtgaaaataatttctgaagaactaagtacttttatcctcttaagtctgcagcagtgatggctaaatcaaacaacctggagaaagggtgtcctcttacattgactggtagatcgccaagacaccttttttttttcttttttttctttttttcttttgagacggagtctcgctctgtcgccagggtcaccaggctggagtgcagggatgcaatatcggctcacttcaagctccgcctccaaggttccagcgattctcctgcctcagcctcccaagcagctgggact

SEQ ID NO: 625411 - DNA, 519 bp, Homo sapiens
aatttttccattgattattgtaggaaatctttcttgacattacttgctcccacatgcttttttgggttttgttttgttctcttttgtttttgataattgagtacatccccatatctttgtatttatgaggcagagatagttgtttagacacataaaacaattatgttctatttttatttttaaactattcatttgaaatagcaattgcataatcattagctgtctggtttgataattkaaaataatttctgaagaactaagtacttttatcctcttaagtctgcagcagtgatggctaaatcaaacaacctggagaaagggtgtcctcttacattgactggtagatcgccaagacaccttttttttttcttttttttctttttttcttttgagacggagtctcgctctgtcgccagggtcaccaggctggagtgcagggatgcaatatcggctcacttcaagctccgcctccaaggttccagcgattctcctgcctcagcctcccaagcagctgggact

SEQ ID NO: 625412 - DNA, 519 bp, Homo sapiens
aatttttccattgattattgtaggaaatctttcttgacattacttgctcccacatgcttttttgggttttgttttgttctcttttgtttttgataattgagtacatccccatatctttgtatttatgaggcagagatagttgtttagacacataaaacaattatgttctatttttatttttaaactattcatttgaaatagcaattgcataatcattagctgtctggtttgataattgaaaataatttctgaagaactaagtacttttatcctcttaagtctgcagcagtgatggctaaatcaaacaacctggagaaagggtgtcctcttacrttgactggtagatcgccaagacaccttttttttttcttttttttctttttttcttttgagacggagtctcgctctgtcgccagggtcaccaggctggagtgcagggatgcaatatcggctcacttcaagctccgcctccaaggttccagcgattctcctgcctcagcctcccaagcagctgggact

SEQ ID NO: 625413 - DNA, 447 bp, Homo sapiens
tttcacatgagaagccaacatgcaaaagagacataataagatttggaagaaacataatgaaaagaaaaaactgagagaagatagactcaaatgtgtagcttccacatcrccaattagaaataaggacacagattcaacaacagatagtgatagtggagaagaacagcaagggtgcctaacagaagatgaagagaaaatcaaatcacttttaagtctaaatggacaccttcccccacagacacctgcactaaggtaatgtctttgaagaagtgatgcactgccattgtgggttaatagctacctccctatgccttgttgggttttgacagtatcagggtatcagaaaaagggaaaaacaagtggcatagtaaagtagtaaaagaggctcagagagaagttgctatacacaacacagattagtgacaagctaggctattaacgatccaa

SEQ ID NO: 625414 - DNA, 447 bp, Homo sapiens
tttcacatgagaagccaacatgcaaaagagacataataagatttggaagaaacataatgaaaagaaaaaactgagagaagatagactcaaatgtgtagcttccacatcgccaattagaaataaggacacagattcaacaacagatagtgatagtggagaagaacagcaagggtgcctaacagaagatgaagagaaaatcaaatcacttttaagtctaaatggacaccttcccccacagacacctgcactaaggtaatgtctttgaagaagygatgcactgccattgtgggttaatagctacctccctatgccttgttgggttttgacagtatcagggtatcagaaaaagggaaaaacaagtggcatagtaaagtagtaaaagaggctcagagagaagttgctatacacaacacagattagtgacaagctaggctattaacgatccaa

SEQ ID NO: 625415 - DNA, 447 bp, Homo sapiens
tttcacatgagaagccaacatgcaaaagagacataataagatttggaagaaacataatgaaaagaaaaaactgagagaagatagactcaaatgtgtagcttccacatcgccaattagaaataaggacacagattcaacaacagatagtgatagtggagaagaacagcaagggtgcctaacagaagatgaagagaaaatcaaatcacttttaagtctaaatggacaccttcccccacagacacctgcactaaggtaatgtctttgaagaagtgatgcactgccattgtgggttaatagctacctccctatgccttgttgggttttgacagtatcagggtatcagaaaaagggaaaaacaartggcatagtaaagtagtaaaagaggctcagagagaagttgctatacacaacacagattagtgacaagctaggctattaacgatccaa

SEQ ID NO: 625416 - DNA, 293 bp, Homo sapiens
gtgattgaactattatctctgaactttaaaacccctagccttgtgatgttgcaaatcacacttctgcttcactagctgtcacctgttagagttcatcaagaggtggcgytttggggtaatggcaagactggaggaggaagaagggtcctgtttcttcctgtaggcgaactgtctgctgtggctcctgtacttccatcctcaaaatgccagtctgttttggaggcttcagttgagtccagtgtgaagagattccggcactcagaacaagcaccatcacgtcccctcagagaccc

SEQ ID NO: 625417 - DNA, 602 bp, Homo sapiens
gagggagaatccccttctactttgttaatgaaatttgtacagatgagaagggaaagtgggtgtaagttcatagattggtacttgtgatccaaytatggatgttacagataccaaaaataattatttaaacgggggtgagaagtcaaggacaagagcaacagtgaatgcattgaaaacttctttaagaatgatgatgactcttgagggtggcctattacactggcccaaagggtctcacaaatcagcttcattttatgaaaaagaagtaaataaagaataagttgactctaggagttttatgtcaatagctatggctataaaatttcataataactgatgcttaacaggtgattctgaatcaccaaaattaggaaaaattgttttcagttttctcctattaaggaatgagaaatacattttagtagcatttatgccacagaaagggactgaaataaatattcctaaacttacaggttaattcacaaccaggaaactaggctccacagaatgacttgatacccaactgaccaattcttgataatataaagatggaaacagaagcttaaagccaaaatactgagagccaattcattgaaaatgcc

SEQ ID NO: 625418 - DNA, 490 bp, Homo sapiens
catagattggtacttgtgatccaattatggatgttacagataccaaaaataattatttaaaygggggtgagaagtcaaggacaagagcaacagtgaatgcattgaaaacttctttaagaatgatgatgactcttgagggtggcctattacactggcccaaagggtctcacaaatcagcttcattttatgaaaaagaagtaaataaagaataagttgactctaggagttttatgtcaatagctatggctataaaatttcataataactgatgcttaacaggtgattctgaatcaccaaaattaggaaaaattgttttcagttttctcctattaaggaatgagaaatacattttagtagcatttatgccacagaaagggactgaaataaatattcctaaacttacaggttaattcacaaccaggaaactaggctccacagaatgacttgatacccaactgaccaattcttgataatataaagatggaaacag

SEQ ID NO: 625419 - DNA, 490 bp, Homo sapiens
catagattggtacttgtgatccaattatggatgttacagataccaaaaataattatttaaacgggggtgagamgtcaaggacaagagcaacagtgaatgcattgaaaacttctttaagaatgatgatgactcttgagggtggcctattacactggcccaaagggtctcacaaatcagcttcattttatgaaaaagaagtaaataaagaataagttgactctaggagttttatgtcaatagctatggctataaaatttcataataactgatgcttaacaggtgattctgaatcaccaaaattaggaaaaattgttttcagttttctcctattaaggaatgagaaatacattttagtagcatttatgccacagaaagggactgaaataaatattcctaaacttacaggttaattcacaaccaggaaactaggctccacagaatgacttgatacccaactgaccaattcttgataatataaagatggaaacag

SEQ ID NO: 625420 - DNA, 602 bp, Homo sapiens
gttggattaggttggacactaaatcactgatagttaatwgtgatttaactctgctgggtcatccagatttgtcttagcactagttattacacaaatctgggaagcaataccaaccacataacctaggaaaagcagtacagcgtggtagttagaccagcacagcttctgggatcaggctgcctaggctcaaagcctgctctgccatttacgagtgatgaaaatttgaccacatttgtaacctctctgtgctctctgagatgagaaagatgatgatgataactatagtgaggattaagtgagtaaatttatgcaaagaatataaagcagtatctggcacacagtaggtgctattcaaagtgtgatctgtagatcagcagcatctgcatcatccaggagcttattaaaaatgcagatctccaggccctgtcccagactgactgcatcagagtctgtatttcagcaaaatttctattgacattaaacatctgagaagcattgctatgtaaatgttggtgttgctatttcagattggctttaactagcttatgttgtcagggtgagagaggcacccctgctgatttgcattttctttccagcctctg

SEQ ID NO: 625421 - DNA, 490 bp, Homo sapiens
catagattggtacttgtgatccaattatggatgttacagataccaaaaataattatttaaacgggggtgagaagtcaaggacaagagcaacagtgaatgcattgaaaacttctttaagaatgatgatgactcttgagggtggcctattacactggcccaaagggtctcacaaatcagcttcattttatgaaaaagaagtaaataaagaataagttgactctaggagttttatgtcaatagctatggctataaaatttcataataactgatgcttaacaggtgattctgaatcaccaaaattaggaaarattgttttcagttttctcctattaaggaatgagaaatacattttagtagcatttatgccacagaaagggactgaaataaatattcctaaacttacaggttaattcacaaccaggaaactaggctccacagaatgacttgatacccaactgaccaattcttgataatataaagatggaaacag

SEQ ID NO: 625422 - DNA, 490 bp, Homo sapiens
catagattggtacttgtgatccaattatggatgttacagataccaaaaataattatttaaacgggggtgagaagtcaaggacaagagcaacagtgaatgcattgaaaacttctttaagaatgatgatgactcttgagggtggcctattacactggcccaaagggtctcacaaatcagcttcattttatgaaaaagaagtaaataaagaataagttgactctaggagttttatgtcaatagctatggctataaaatttcataataactgatgcttaacaggtgattctgaatcaccaaaattaggaaaaattgttttcagttttctcctattaaggaatgagaaatacattttagtagcatttatgccacagaaagggactgaaataaatattcctaaacttacaggttaattcacaaccaggaaactaggctccayagaatgacttgatacccaactgaccaattcttgataatataaagatggaaacag

SEQ ID NO: 625423 - DNA, 602 bp, Homo sapiens
gttggattaggttggacactaaatcactgatagttaattgtgatttaactctgctgggtcatccagatttgtcttagcactagttattacacaaatctgggaagcaataccaaccacataacctaggaaaagcagtacagcgtggtagttagaccagcacagcttctgggatcaggctgcctaggctcaaagcctgctctgccatttacgagtgatgaaaatttgaccacatttgtaacctctctgtgcyctctgagatgagaaagatgatgatgataactatagtgaggattaagtgagtaaatttatgcaaagaatataaagcagtatctggcacacagtaggtgctattcaaagtgtgatctgtagatcagcagcatctgcatcatccaggagcttattaaaaatgcagatctccaggccctgtcccagactgactgcatcagagtctgtatttcagcaaaatttctattgacattaaacatctgagaagcattgctatgtaaatgttggtgttgctatttcagattggctttaactagcttatgttgtcagggtgagagaggcacccctgctgatttgcattttctttccagcctctg

SEQ ID NO: 625424 - DNA, 584 bp, Homo sapiens
tttggcttcatgcattcccttgcagcctttctgcactgtgtggctgtttcaatagagctgtctcctgccctgggcttagctgtttatactctcctggtacaaatgttctcacatgctctttctttaatgatagttttatattaactaaactgcatcacacaatccatttaatctatgtcatattttacagagttctgagtgacagtattcagttggtgcaaagaaaaaaactgttacatattgataaaagttttgtatcatatgacttggtgaagggatatagttatacctctgtaccccagtaagccagttatgaaccatatcctrggaccctgtacagaacatcaatattgactaaacacttgctgtgtgcacagagtgatatttgtgatattctggcacagtggagaattatgacagatatttttaaatggtccctactatcaaagatatattttgaaaaatggaacatacatatgtgaaacatccaaaacacatctataaacaataactacaaaagccaattaacgcagtgggtataaatcttagtctacaatccaggtacacaaaaaacattgaatttc

SEQ ID NO: 625425 - DNA, 602 bp, Homo sapiens
gttggattaggttggacactaaatcactgatagttaattgtgatttaactctgctgggtcatccagatttgtcttagcactagttattacacaaatctgggaagcaataccaaccacataacctaggaaaagcagtacagcgtggtagttagaccagcacagcttctgggatcaggctgcctaggctcaaagcctgctctgccatttacgagtgatgaaaatttgaccacatttgtaacctctctgtgctctctgagatgagaaagatgatgatgataactatagtgaggattaagtgagtaaatttatgcaaagaatataaagcagtatctggcacacagtaggtgctattcaaagtgtratctgtagatcagcagcatctgcatcatccaggagcttattaaaaatgcagatctccaggccctgtcccagactgactgcatcagagtctgtatttcagcaaaatttctattgacattaaacatctgagaagcattgctatgtaaatgttggtgttgctatttcagattggctttaactagcttatgttgtcagggtgagagaggcacccctgctgatttgcattttctttccagcctctg

SEQ ID NO: 625426 - DNA, 536 bp, Homo sapiens
tcaactttgtgaatttattactcagttttatctggatttgatgcagctggatagtaatcctgtggtgatgagytctaccaatattaatttgtgtttttttaggaggtaggatcaagaagccttagatcacaaatccttcatcctgaccctaagatttcagatccacagtccacaggaaatttcaaataccattcaagtgagaagcaatctcctggattctcacaaagtgcttcttaaagggttcctgccctcctgggacagtgaaaagctggaaataataaagtctcactctttcttcgtcttttgtctttccctttctttctttccttctttctttctctgtctctccctttctttctttttcttcttgctctctctctctctctctgtctatctttctaaggaattttaaaagccaaggccaaatcagtatactcctaatgctatatttctataaaatgagatttctgagaaatctagaatttgttcccacctagatgaacattgtgaaaaatcaaggcttagttttcttctga

SEQ ID NO: 625427 - DNA, 536 bp, Homo sapiens
tcaactttgtgaatttattactcagttttatctggatttgatgcagctggatagtaatcctgtggtgatgagctctaccaatattaatttgtgtttttttaggaggtaggatcaagaagccttagatcacaaatccttcatcctgaccctaagatttcagatccacagtccacaggaaatttcaaataccattcaagtgagaagcaatctcctggattctcacaaagtgcttcttaragggttcctgccctcctgggacagtgaaaagctggaaataataaagtctcactctttcttcgtcttttgtctttccctttctttctttccttctttctttctctgtctctccctttctttctttttcttcttgctctctctctctctctctgtctatctttctaaggaattttaaaagccaaggccaaatcagtatactcctaatgctatatttctataaaatgagatttctgagaaatctagaatttgttcccacctagatgaacattgtgaaaaatcaaggcttagttttcttctga

SEQ ID NO: 625428 - DNA, 536 bp, Homo sapiens
tcaactttgtgaatttattactcagttttatctggatttgatgcagctggatagtaatcctgtggtgatgagctctaccaatattaatttgtgtttttttaggaggtaggatcaagaagccttagatcacaaatccttcatcctgaccctaagatttcagatccacagtccacaggaaatttcaaataccattcaagtgagaagcaatctcctggattctcacaaagtgcttcttaaagggttcctgccctcctgggacagtgaaaagctggaaataataaagtctcactctttcttcgtcttttgtctttcyctttctttctttccttctttctttctctgtctctccctttctttctttttcttcttgctctctctctctctctctgtctatctttctaaggaattttaaaagccaaggccaaatcagtatactcctaatgctatatttctataaaatgagatttctgagaaatctagaatttgttcccacctagatgaacattgtgaaaaatcaaggcttagttttcttctga

SEQ ID NO: 625429 - DNA, 467 bp, Homo sapiens
tctatttagaagcctggtgagatctccctgagaaagaaatgtgtatgctgagacccaagtaaagggataagcagaattaacttggcaaagaaaggggaaagtgtttagtacaaaggaacaaactcacgtaagacctgagggarcctgtctgtttgagaaaccaagagaaattcagtgtgactggaaactgtatagtgtgcaaggcaagagggtaaaaattgagcctggagaagtacagagaccgctgaagggttattaatagggcaataacactatttgatttgtgttctaaaagaacacacttgtttctgcctggaggaaggattggagggaagcaaaactagagcttgaaaccagcccagagtttatagacaaagatagtcaagaagttatggtggtctgaactacagtggtagtatagttgtgaatccaaaggaaataaaaaaaatgcttagagagtagaatca

SEQ ID NO: 625430 - DNA, 467 bp, Homo sapiens
tctatttagaagcctggtgagatctccctgagaaagaaatgtgtatgctgagacccaagtaaagggataagcagaattaacttggcaaagaaaggggaaagtgtttagtacaaaggaacaaactcacgtaagacctgagggagmctgtctgtttgagaaaccaagagaaattcagtgtgactggaaactgtatagtgtgcaaggcaagagggtaaaaattgagcctggagaagtacagagaccgctgaagggttattaatagggcaataacactatttgatttgtgttctaaaagaacacacttgtttctgcctggaggaaggattggagggaagcaaaactagagcttgaaaccagcccagagtttatagacaaagatagtcaagaagttatggtggtctgaactacagtggtagtatagttgtgaatccaaaggaaataaaaaaaatgcttagagagtagaatca

SEQ ID NO: 625431 - DNA, 467 bp, Homo sapiens
tctatttagaagcctggtgagatctccctgagaaagaaatgtgtatgctgagacccaagtaaagggataagcagaattaacttggcaaagaaaggggaaagtgtttagtacaaaggaacaaactcacgtaagacctgagggagcctgtctgtttgagaaaccaagagaaattcartgtgactggaaactgtatagtgtgcaaggcaagagggtaaaaattgagcctggagaagtacagagaccgctgaagggttattaatagggcaataacactatttgatttgtgttctaaaagaacacacttgtttctgcctggaggaaggattggagggaagcaaaactagagcttgaaaccagcccagagtttatagacaaagatagtcaagaagttatggtggtctgaactacagtggtagtatagttgtgaatccaaaggaaataaaaaaaatgcttagagagtagaatca

SEQ ID NO: 625432 - DNA, 510 bp, Homo sapiens
atgtttaatgtttactttgtatgcagatcccagtgtttctgactccagtcagctaatttaaccccaagtctccattattgtctttgcttgtcagmtttatttgatgtcttaaattatacactgcatcctgataccttcactgctcagttggaaggttctatgcccaattgcccttcctgatcaaagtaaggagaacattaggaatatattaggagaaataaaagagttgggattatttaacacttccctcctaggctccatactgcacagaaacatttgatttttatagttgtctccaagaggcaattttctaacagagattttatagcagagaagagagcttggcttttaaacaatgcaaaggtcaacaaagcaaaatttgctctatttatggtatgggtgtgacatttggacctcttagcatccaacattctattggctttaggaaagagctcatcaccacacctgcttgctttatttcacattaaatggtctttagttaagaggttt

SEQ ID NO: 625433 - DNA, 527 bp, Homo sapiens
cagtttaggcagatagaatctctttcaaaaattagtacagagaaaagagccaacatgaaacacataaaatatttcttttttttcttgttactgacaaagatcaggaaaatatttcttaataaacttaagaatatagatatttttctaaataccacttcatctrtatctcacgttttgatatgtattttttattattgttcaactctaagtttgcaacacaagttatttgagaatatgtttttagtttcaaacatactttatttattctattttcatttcactgttagttctctagtaatgttttaagacaaatttgttgtaagataatacaattgcttctaataattttgttttctaataaaattgttttaagataggaaaaatgttccatatgtctgttttttgaaatttgttgagattacttgtgagctagtacatgatcaatgtgtacttgaaaagaatatgttttatcttgcgtgtatgatttttatgatttatctttagatcaatattattgacctacagcc

SEQ ID NO: 625434 - DNA, 473 bp, Homo sapiens
tttagtttcaaacatactttatttattctattttcatttcactgttagttctctagtaatgttttaagacaaatttgttgtaagataatacaattgcttctaataattttgttttctaataaaattgttttaagataggaaaaatgttccatatgtctgttttttgaaatttgttgagattacttgtgagctagtacatgatcaatgtgtacttgaaaagaatatgttttatcttgygtgtatgatttttatgatttatctttagatcaatattattgacctacagccagtccagatataacataaagcagaaaaattataaaattccacattatcaagagtaaacaggaaagttaagactgtgggcctagacaaaatttgtttcagatttcagaggaagcatgaccctgtcaacaccttaatttcagacttctagcttccaaaaatgagaccacaaatttcattgttctaag

SEQ ID NO: 625435 - DNA, 565 bp, Homo sapiens
aacccaacttataccacagtcagaaccttaaggacaacaaagaattgaaaagcaaaaagccccattcacaaggccagcaacttcagagattaaaggaacattagcacacacagatgagaaggaaccaatgcaagcattctggcaactctaaaagccagagtgtcttcttgcctccaaataaccacactaacttcccagcagtggttcttaaccagactgaaatgggtgaaatgacagacatagaattcagaatctggatggcaaggaaactcaatgagatccaggattaggttkaaacccaatgtaaggaaaccagtaaaatgatcaagagctgaaagatgacacagccattttaagaaagaagcaaacttaacttctggaaataaaaaaattccccaaaggaatcttataatacaaatggaaacattaataacagaatagaccaagctgaggaaagaatctcagagctcaaagaccacttcttccaatcaacacaggcagacaaaaaatttttttaaaaattttaaatgaataaaacctccaagaaatattggattatgtaaag

SEQ ID NO: 625436 - DNA, 604 bp, Homo sapiens
tgatgctattcttatcaaaatgcctatgtcatttttcaaaaaattaaaaaaaaattctcaaatttatatggaaccataaagaagcccaaatagccaaagcaagccatgtgtataagattgaaactggacccctacctttcactacttacaaaaatcaactcaaaatggaataaagacttaaacatgagactaaaagtattaaaaccctagtagaaaacctaggaaataccattctggagataggccttggcaaaaatttcatgacagtctccacagaaattgcaataaaaataaaaatagacacgtgggacctaattaaactamagagtttctgcacagcaaaagaaactaccaacagggtaaacagacaacctacagaatggaagaaaatattcataaactgtgcatccaacaaagttctaatatccagaatctgtagggaacagaaaacctaataccatgtattttcacttataaatgggagctaaacattgagtatacatggactgaaaggtggggacaatacacaccaaggcctatttgagtgggaagagtgggaagagagtgaaggtcaaaaaactgcctatcaagtactgtgctcgct

SEQ ID NO: 625437 - DNA, 585 bp, Homo sapiens
tgtatagtacaaatagtgtactgatattctaagttatctagagttaacaatactttaacttaatgtcttgtaaatgaaatacttattacaaagttatgttttaaactattcagaaaaaattaaagacaaaatagttaggcgtctttttcatgtggcccctgaaatcaatcaatggacctcaaactacagtttaagaaatgatgttttagagtaagtccaagcattagttagccatggtgtaagaatgataatttccataatctgtaaaattcagtctttytattgtaagaatcattaattgtatgattcaattagatgtcaatagctttatctgattgaaatcaaggatatcagataccctattgtctgacagaatcaaaatgccctttatgatgaatgcagccgtattcatctgagagcttggttgggacactttggtttgtcacatggcctctttctttagcaggatagttagtacatccttacagttggcagtaagcctcttaagagggagtgaactgatgtataagcctatgcttgtatcatgtataccaatattccatttatcaaggcaaatatatgtcc

SEQ ID NO: 625438 - DNA, 503 bp, Homo sapiens
aagaattcaacaacaaagatccagtacagaggcttagccctctgaaaacttccacaaatgaagccaatggactatactcaatttaaaacacagttaaaggacaccaaccctcccagatgagaaggaatcagtggaagaactctggcatttcaaaaagccagagtgtccccttacctccaaatgagcccactaggtccccaccaatggttcttaactagtctgaaatgtctgaaacgacagacatgaaattcagaatacgaatggcaaggaagctcatcaagaactaggasaatgttgaaagtcattccaaggaagccaagcaattcaagagccgaaagatgaaatagccattttaagaaagacccaaattaaactttttaagctgaaaaattcaccacaagaattgcataatatgatcagaagtattaatattaacagcatcccagtgcagtgagtggctcatgcctgtaatctcggtactttgggaggccgaggcaggtgga

SEQ ID NO: 625439 - DNA, 503 bp, Homo sapiens
aagaattcaacaacaaagatccagtacagaggcttagccctctgaaaacttccacaaatgaagccaatggactatactcaatttaaaacacagttaaaggacaccaaccctcccagatgagaaggaatcagtggaagaactctggcatttcaaaaagccagagtgtccccttacctccaaatgagcccactaggtccccaccaatggttcttaactagtctgaaatgtctgaaacgacagacatgaaattcagaatacgaatggcaaggaagctcatcaagaactaggagaatgttgaaagtcattccaaggaagccaagcaattcaagagcygaaagatgaaatagccattttaagaaagacccaaattaaactttttaagctgaaaaattcaccacaagaattgcataatatgatcagaagtattaatattaacagcatcccagtgcagtgagtggctcatgcctgtaatctcggtactttgggaggccgaggcaggtgga

SEQ ID NO: 625440 - DNA, 529 bp, Homo sapiens
ctcaactgtcttctattggatcacagccaaagctacaacatcaagaaattcttggctaattctgcttcctgcaaaatcaagggcaagaattcaacaacaaagatccagtacagaggcttagccctctgaaaacttccacaaatgaagccaatggactatactcaatttaaaacacagttaaaggacaccaaccctcccagatgagaaggaatcagtggaagaactctggcatttcaaaaagccagagtgtccccttacctccaaatgagcccactaggtccccaccaatggttcttaactagtctgaaatgtctgaaacgacagacatgaaattcagaatacgaatggcaaggaagctcatcaagaactaggagaatgttgaaagtcattccaaggaagccaagcaattcaagagccgaaagatgaaatagccattttaagaaagacccaaattaaactttttaagctgaaaaattcaccacaagaattkcataatatgatcagaagtattaatattaacagcatccca

SEQ ID NO: 625441 - DNA, 503 bp, Homo sapiens
aagaattcaacaacaaagatccagtacagaggcttagccctctgaaaacttccacaaatgaagccaatggactatactcaatttaaaacacagttaaaggacaccaaccctcccagatgagaaggaatcagtggaagaactctggcatttcaaaaagccagagtgtccccttacctccaaatgagcccactaggtccccaccaatggttcttaactagtctgaaatgtctgaaacgacagacatgaaattcagaatacgaatggcaaggaagctcatcaagaactaggagaatgttgaaagtcattccaaggaagccaagcaattcaagagccgaaagatgaaatagccattttaagaaagacccaaattaaactttttaagctgaaaaattcaccacaagaattgcataatatgatcagaagtattaatattaacagcakcccagtgcagtgagtggctcatgcctgtaatctcggtactttgggaggccgaggcaggtgga

SEQ ID NO: 625442 - DNA, 503 bp, Homo sapiens
aagaattcaacaacaaagatccagtacagaggcttagccctctgaaaacttccacaaatgaagccaatggactatactcaatttaaaacacagttaaaggacaccaaccctcccagatgagaaggaatcagtggaagaactctggcatttcaaaaagccagagtgtccccttacctccaaatgagcccactaggtccccaccaatggttcttaactagtctgaaatgtctgaaacgacagacatgaaattcagaatacgaatggcaaggaagctcatcaagaactaggagaatgttgaaagtcattccaaggaagccaagcaattcaagagccgaaagatgaaatagccattttaagaaagacccaaattaaactttttaagctgaaaaattcaccacaagaattgcataatatgatcagaagtattaatattaacagcatsccagtgcagtgagtggctcatgcctgtaatctcggtactttgggaggccgaggcaggtgga

SEQ ID NO: 625443 - DNA, 608 bp, Homo sapiens
tctagattgctggtccccagagaagaaatgtgcctgaagtcttcactaatgttaatgcatctgccttgaagggagaaggctcacagagataggaactactgcaatcactccagaaaatgcctccttgaatttgaaatcagttctggtcatcagtgaccaacaataataagctcaattacagtgtgtgtagaataaatagaaactaaagtatcagcaaaaagagaaccagcctgtgtccagaatacagagtctaccttgtctataatggttcattgttaagaaaaatccttgtcatatgatcaaggaactcaacagcaagcccaaacctaatctcagccaacctttttaaccaattatcaggaacaattaaaaawaaagcctaaaacatgaatatggcaaagtgagtattttgacttctcttgcaggtgtatgcgtaaaaaaacaagtaaagctactacatcagtgtcctttgtttaatgaccccaactggccacattccataatatagggaagataatggatctcaaaaggtacaactaaaggtagcttaaaccatcaaattcactactcaaagtgtagaaacctgtcccagatcatccagttcaagg

SEQ ID NO: 625444 - DNA, 603 bp, Homo sapiens
gaggtaatgaattttttaaaatttgagtttaaaaatggaaaattatgtgggattaaggtttagawacagaattaaggacttgaaaagaaaagtgaataatagtaaaacaataaaaaagggaatggaagattattttgaaacaatgaaaataatatgttagaaaattagaaaaatgtgaaataaaaaagaaattatacaaaattaacatagaaataacatatttgaaatgctgttaataataaccaacacttcctgagcgctttctgtggatgaattaaagtttctatttcttcttgtatatactataatttctactctctgaatgttgttcttaagtaacctttggcttattacctttattgtttcctcatttatagaacagggataataatggtatctcctcatatggctcttgtaaggctcgaatgagttaattcctatacagagcttagaacactgagcagcccagattcaagaggagggaaaatagattctatctcttaatgggggaagtggcaaagtcacattgcaaaagagcaggtgggatggccatctttggaaacacaatctgccacagcaagaacatataagaaatgtatagca

SEQ ID NO: 625445 - DNA, 603 bp, Homo sapiens
gaggtaatgaattttttaaaatttgagtttaaaaatggaaaattatgtgggattaaggtttagaaacagaattaaggacttgaaaagaaaagtgaataatagtaaaacaataaaaaagggaatggaagattattttgaaacaatgaaaataataygttagaaaattagaaaaatgtgaaataaaaaagaaattatacaaaattaacatagaaataacatatttgaaatgctgttaataataaccaacacttcctgagcgctttctgtggatgaattaaagtttctatttcttcttgtatatactataatttctactctctgaatgttgttcttaagtaacctttggcttattacctttattgtttcctcatttatagaacagggataataatggtatctcctcatatggctcttgtaaggctcgaatgagttaattcctatacagagcttagaacactgagcagcccagattcaagaggagggaaaatagattctatctcttaatgggggaagtggcaaagtcacattgcaaaagagcaggtgggatggccatctttggaaacacaatctgccacagcaagaacatataagaaatgtatagca

SEQ ID NO: 625446 - DNA, 603 bp, Homo sapiens
gaggtaatgaattttttaaaatttgagtttaaaaatggaaaattatgtgggattaaggtttagaaacagaattaaggacttgaaaagaaaagtgaataatagtaaaacaataaaaaagggaatggaagattattttgaaacaatgaaaataatatgttagaaaattagaaaaatgtgaaataaaaaagaaattatacaaaattaacatagaaataacatatttgaaatgctgttaataataaccaacacttcctgagygctttctgtggatgaattaaagtttctatttcttcttgtatatactataatttctactctctgaatgttgttcttaagtaacctttggcttattacctttattgtttcctcatttatagaacagggataataatggtatctcctcatatggctcttgtaaggctcgaatgagttaattcctatacagagcttagaacactgagcagcccagattcaagaggagggaaaatagattctatctcttaatgggggaagtggcaaagtcacattgcaaaagagcaggtgggatggccatctttggaaacacaatctgccacagcaagaacatataagaaatgtatagca

SEQ ID NO: 625447 - DNA, 348 bp, Homo sapiens
ttgcttcaatatccaataaattactcgtctgcatctgagaccacctcagcctggaccccattgtccatatcacwatcagccttttggtcacagccattcaacaagtctctaggaggttccaaactttccctctttctgtcttttcctgagccctccaaactgtcccggcctctgtctgttacccagttccaacatcacttccacattttcaggaagcaaaaatgatttcactttcacatgatctctatagcagtgccctactcctggtaacaattttctgtatcagtctgtttttacactgctgtaaagaatacctgagactgggtaatttataaaagaaagagggtt

SEQ ID NO: 625448 - DNA, 526 bp, Homo sapiens
aaaacaaagatgacttaaagaattatgtatggaccaacacaaggatatccttgacctctaagtaggtctyaccttctgtagcaatctggtacagcaagtgaaaagttagtaagaatcatatattgcttcattcagatagtggacaattatgatcaaaggtgtaatacagtaggcctccttcatctgcagtttcacgacccatggttattaattattcacagtcaaccacagtctgaaaatattaagtgaaaaattccagaaataaagaattcaaaagttttaaattgcacactattttgagtagtgtgatgaaatcgtacaccaccctgtcccactcaggacattattgttcctttgccagtgcattcatgctgtatgtgctacccttccctccccacccacacagtcacttttatcagattaactgacactgcacatagagttcagtactagctgtggtttcaggcatctactggggggtcttagaacatattccccatggataaggaggggactactgtatttt

SEQ ID NO: 625449 - DNA, 468 bp, Homo sapiens
ctccatttttttgtttgttctttctgatgttttaagatttcttcttttatcttttcctttttgtttatttatagagtttttttagccagtcttttagggtaggtctactggcaataaatgctaattttctttcatgtgagttactttccctttcattcctgaaaattattttctctaggtatacgattattttatttcagcacttgaaaaacattgtgccacttcctattggctccatggttcgtgataagaaatctgctgttaatccagttttctcttgtaggcttcatayaggtgcattcaagactttttttgtcttttgttttcagaagtttgattatgatatgtcttgacatggatatctttgggtttaccttatttggagtttgttcagcttctctatctaaatgtttatgtctctttttaagtgtgtaaagttgtcagccataatttctttgagcacttttc

SEQ ID NO: 625450 - DNA, 570 bp, Homo sapiens
ggactttttacttaactcttgcctatgtgcctaattacagaaataatgctctactactgctaacattctataagcagaacgcttggatctgccaaggtattcttgaggttctgaaagggccacagaacattattcttctcacttccttctagtacctgtcctcacctggataagttatgcctagcctgcaaagcaccttggcggagtcaatgccccatgccccatgcaccacaagctccctgcaaaacccagtcagaagagtcttcagactggtgaatacaggcatcatttaaagatataggtacttcaaagacgggcagaatgggcatattagaaggaaaatggatacttctaaaaatatcacagkaacagaatgagaaaagaatacaggtcctatatcaagcaaaaatcctcagactgagaccttgaaaggcaaaatctctctgttcagggagcggggagggggagacagagatggaaattcagtcctcaattcttgctcaattatatcagaataaggaggtattatttctaattttccacaaacatgagactcttagttcttaaaat

SEQ ID NO: 625451 - DNA, 618 bp, Homo sapiens
ctgcattcagagatggatgtgttagatgctcattcctattcttttgcagtggggctggaatgcaccaggacagaactcaatagctgaggatcccaatgaaactgagaggaagaaaagataagcagaggcacatcaggaagcaaactaacagtccagaatagcaaagatacctatggtccacaccgcgccctgaccggttcttagtgaacaactggttattggtaatattgctgaggtagcattgsctggtggtttagatggtctctttccagaactgccaagatactttaacttttagcaagccctgtatttctgtcatccaactggccagaaattcaccacaggaagaggctgtggaaagtcatgaactgccattttgaaaactagaacccttacaattaccaaaggagaggtgctttattactaacccacgtatcattattaccttccatatcagtacagggttcagccaaagttgtcatttggctcatgattgtttttactaatttattttttccatatacatgggaaatttaaaaatacttttcaattgtatacaatagaaatattaaaattatagattacttttttaaaaaaacggcaatatactcaaagctt

SEQ ID NO: 625452 - DNA, 403 bp, Homo sapiens
tctgggcactctgtaatcactcagtgaattataaaacaccatacttcaagtcccaaagaagaaaaaaaatttgccctgttacttgctaagctgaacygaataggaccagacagaaaatcaagtttatttggtcggggggaaagaaaggactttttcactaaccatctgtgtgaaacactggaggagaaacaagagtcttagaatttgggagtataaatgaaaacatccagctagaatgcatctctttgcaatgacaaagaggaacaatattctcagaggaccattttgtactttgtcttttttttttgagacaaggtctcactctgtctcccagcctggagtgcagttgcacgatcacagttcactgcagccttgaccttccaggctcaagcgatcctctcac

SEQ ID NO: 625453 - DNA, 507 bp, Homo sapiens
ggctcactgcaaccttcgcttcctgggttcaagcaattctcccgcctcagcctcccaagtagctgggattacaggcgtccgccaccacaccggctaatttttgtatttttagtagagacgaggtttcaccatgttggccaggctggtctcaaactcctgaccttaagtgatctgccctcctcagcctcccaaagtgctaggattacaggcgtgagccaccacgcccagcctacttgatttcttttttgtatttactaacaattcaggagcttttaaaaattgacctattactccaacatagtttttaccwctgaacatttgaggtacctctttaaaaggcagattccctatttaaccatcctttagttccgtgatatggtttggatgtgtgtcccctccaaatctcatgttgaaatgtgatctccaatgttggaggtggggcctggtgagaggtgtttgagtcaggggggccaatccctcatgaatggcttggtaccctccctgtag

SEQ ID NO: 625454 - DNA, 507 bp, Homo sapiens
ggctcactgcaaccttcgcttcctgggttcaagcaattctcccgcctcagcctcccaagtagctgggattacaggcgtccgccaccacaccggctaatttttgtatttttagtagagacgaggtttcaccatgttggccaggctggtctcaaactcctgaccttaagtgatctgccctcctcagcctcccaaagtgctaggattacaggcgtgagccaccacgcccagcctacttgatttcttttttgtatttactaacaattcaggagcttttaaaaattgacctattactccaacatagtttttacctytgaacatttgaggtacctctttaaaaggcagattccctatttaaccatcctttagttccgtgatatggtttggatgtgtgtcccctccaaatctcatgttgaaatgtgatctccaatgttggaggtggggcctggtgagaggtgtttgagtcaggggggccaatccctcatgaatggcttggtaccctccctgtag

SEQ ID NO: 625455 - DNA, 507 bp, Homo sapiens
ggctcactgcaaccttcgcttcctgggttcaagcaattctcccgcctcagcctcccaagtagctgggattacaggcgtccgccaccacaccggctaatttttgtatttttagtagagacgaggtttcaccatgttggccaggctggtctcaaactcctgaccttaagtgatctgccctcctcagcctcccaaagtgctaggattacaggcgtgagccaccacgcccagcctacttgatttcttttttgtatttactaacaattcaggagcttttaaaaattgacctattactccaacatagtttttacctctgaacatttgargtacctctttaaaaggcagattccctatttaaccatcctttagttccgtgatatggtttggatgtgtgtcccctccaaatctcatgttgaaatgtgatctccaatgttggaggtggggcctggtgagaggtgtttgagtcaggggggccaatccctcatgaatggcttggtaccctccctgtag

SEQ ID NO: 625456 - DNA, 570 bp, Homo sapiens
gacccggcctatttctctctgcctaacaatatcacctggggggcatgtggagaagcatcctgcagccctctcattcctctcgttctgtcctctgtgagactttagtcctgacctgcctcagtacctgtattagtccattctcacgctgctaataaggacatacccgagattgggtagtttataaaagaaagaggtttaatggactcacagttccacatggctggggaggcctcacaatcatggtggaaggtgaaggaggagcatagtcacatcttacatggtgacaggcaagagggcatgtgcagggaactcccctttataaaaccatcagagacttatttactatcacgagaacagcatgggaaagagccacccccatgattcaattacctcccaccaggcccctcccaccacacatgggaawtatagcagctataattcaaaatgagatttgggtggggatacagccaaaccatatcagtaccccacttatacactgctcccaccctggcctcgcacaaaggcacaggaaacactgatgttgtctactttctcagaccctccttggga

SEQ ID NO: 625457 - DNA, 613 bp, Homo sapiens
catcttacatggtgacaggcaagagggcatgtgcagggaactcccctttataaaaccatcagagacttatttactatcacgagaacagcatgggaaagagccacccccatgattcaattacctcccaccaggcccctcccaccacacatgggaaatatagcagctataattcaaaatgagatttgggtggggatacagccaaaccatatcagtaccccacttatacactgctcccaccctggcctcgcacaaaggcacaggaaacactgatgttgtctactttctcagaccctccttgggagcatgcccctgcatgctcaaatctgtctgaagtgttcccttccctccctccttctccccagcccctgccctttctcaggtcctrccagcatctctcccaaggcctcaccagcctctcagctttcttgctttcctttcggattctttccccctcccttagtcaggtgcttctgaatctagtcgggggacagggtagtctggctctttatctattcttccaaatccattgtactccttgagtcctttctctgctatgcagttgtatcacctcagccatgatcagtggatgccccgtggtcttcctttgatgaga

SEQ ID NO: 625458 - DNA, 613 bp, Homo sapiens
catcttacatggtgacaggcaagagggcatgtgcagggaactcccctttataaaaccatcagagacttatttactatcacgagaacagcatgggaaagagccacccccatgattcaattacctcccaccaggcccctcccaccacacatgggaaatatagcagctataattcaaaatgagatttgggtggggatacagccaaaccatatcagtaccccacttatacactgctcccaccctggcctcgcacaaaggcacaggaaacactgatgttgtctactttctcagaccctccttgggagcatgcccctgcatgctcaaatctgtctgaagtgttcccttccctccctccttctccccagcccctgccctttctcaggtcctaccrgcatctctcccaaggcctcaccagcctctcagctttcttgctttcctttcggattctttccccctcccttagtcaggtgcttctgaatctagtcgggggacagggtagtctggctctttatctattcttccaaatccattgtactccttgagtcctttctctgctatgcagttgtatcacctcagccatgatcagtggatgccccgtggtcttcctttgatgaga

SEQ ID NO: 625459 - DNA, 466 bp, Homo sapiens
ttcctctctcctccactgtcctttcaaattaaattcattgctcttcaaaatgtctgtggttcccagaaatgacgcaagttgtatgtaccccgttcaaagcctgagcatttgactctcaggacattctcccaagtggtctgggccctgccacttgctaatacagctctgacaatctcaatcactcctctttttcctttctttacagaaactcagagaagacaatggctatatgkactccttttaaaaaaagtcttgcaaagcttaccttaaaaaatttggatattcttgctaaaccacaaaataaaaaaaatagttaattcctcttaatattatttgctaacatggatagtatctgaccacccacaggacaaaaaaacagacatttaacagttgcttacaggctaaatgagaggccctagttaatgcacattagtcctgtttctatctcttgtccttgaaataagct

SEQ ID NO: 625460 - DNA, 466 bp, Homo sapiens
ttcctctctcctccactgtcctttcaaattaaattcattgctcttcaaaatgtctgtggttcccagaaatgacgcaagttgtatgtaccccgttcaaagcctgagcatttgactctcaggacattctcccaagtggtctgggccctgccacttgctaatacagctctgacaatctcaatcactcctctttttcctttctttacagaaactcagagaagacaatggctatatggactccttttaaaaaaagtcttgcaaagyttaccttaaaaaatttggatattcttgctaaaccacaaaataaaaaaaatagttaattcctcttaatattatttgctaacatggatagtatctgaccacccacaggacaaaaaaacagacatttaacagttgcttacaggctaaatgagaggccctagttaatgcacattagtcctgtttctatctcttgtccttgaaataagct

SEQ ID NO: 625461 - DNA, 512 bp, Homo sapiens
attttctattctttgggataatttgtgtaaaattaacatttcttaaatatttggaattatggacttaactatggattcatttttaaatagatacaaaactagtctagttttttatttctttttctgccaattttggcaagttgaattttcctagtggtgtccatgtcttctaaaatttaaaacttattaaaaccaagttgttagtatcttttaatgtccgtagaatctagttatgtcacgatttcattattaatattggtaaactatgtcttctttctctcctgtctctttttttcttgaattgytttcaaaactccttatattagttttttccagaaatccaagttttgttttattgatttcttccatatgtgtttgtttccttcatctttaactttggccttgtgtttattatatttgtccttctaccttttttttaggtgaatttaatgtgtgtgtattttttttaacacttaacgcttttaagggtataaaatttccttagagcacaa

SEQ ID NO: 625462 - DNA, 464 bp, Homo sapiens
gtggctgttcacccttaccctctagaataaaccagctaatgtaagtagagtactttcctgagttctgtgagccattctagcaaattatcaaacatgaggacaaggttgggaaaccctctacatttatagcctatcagtcagaagttcaggacttgtcactggcatctgaagggacagwcttgtgggcctgagccctcacttgtggaacctgatgctaactccaggtggatagatcagaattgaatagaattgttggacacttcagtgtccagagagttagagaattagtcagtgtgaggaaaaaccccacatatttgatgtcagaaatgtcgggtgagtaaaagcagtttgtaggactatgtgggaagacactgcaggtagactgtacgagctgaacaaaacccctgggtgagagccagcgagaaaatgaggacctggtcctacagtagcaaataactgaattc

SEQ ID NO: 625463 - DNA, 455 bp, Homo sapiens
gaattctcagctctgttccctacttaccattttgtcagtctctggaattttcttacactattggctatgccatatgatatcctgcagaagttcttcacccacgagaacgttccctaggcttggaactcaccatccacctgcaaacggcctgatgattcaaaaacggtgttcctcttttggatggctatttacagttttgagaactcctgccccggatgtagaaagagagaacagtcccrtgaaattggcatctttgaataatttccgcatcagatgaaaatgaagaattttccaaatacaactggacatgccacaaagagaaaaattaactggaaaacaacttaagccctccactgcaggtgtgttggcaaaaatttccatataactttcacatgattcctggcatgaaagaaaatgtttacactgaggtctcttgaaacaagaagaggaatatt

SEQ ID NO: 625464 - DNA, 522 bp, Homo sapiens
aatattaaggaatgccctctagaattytttttttaaaaaattagctcttatttctaattataaaggtgatctacaaattgtaaaaacacttgacaagtacagaaaataataaaaagaaaatgcttcccccaagtaatcacattagccagagataataactgttaacattttgcttatatttttccaacacttttttatccataaaagacatattttattcagattgtataatgccaaattttgtgttaaagatacaagatatatagccatagattcaactttattgagtttattatcgaaatagtttttctttattgatttttaatgtacttaatcaggcaacaaccaagagtggcaatattaaaaacacccaatccaaaaattagttgataattgtttattgtattttaataggttttgttttctatattttaatgtttaatcttttaatgtacatgactgtggtacctttattgtatattttagctctaaaaaatcttgaaggtgttttacaaactacaa

SEQ ID NO: 625465 - DNA, 578 bp, Homo sapiens
ctccccagccacatggaactgtgactccattaaacctctttttctttataaattacccagtctcaggttatgtctttatccacagcatgaagatggactaatacaccccaaaagacatgttcagtcctaacccctatccctgtgaatgtgaccttatttgaaaatagttttttgctgatgtaattaaatgaaggatctcaagaggagatcatcctggatttgggtggtccctgcatccttgatgggtgccgttgagagaaaggagatgaaaaactgagacagagacacagacgggaaggccgcatggagacrgaaaaagagattggagtgctgtgtctacaagccaaggagcacccagggttgccagcaacagccagaaagtagactagacgtgtgcaagagtcccccacagaggttccagggggaacaaccctgtggacgccttgatttcagacctccaggctcctcacctgcaagagaataaagtcaccaagttttggtaatttgttagggcggccctaagaaatgaataccctcttccatgtacatacatacttcccacacaccagcatgcacag

SEQ ID NO: 625466 - DNA, 580 bp, Homo sapiens
gtcacaacattcagggtagtgattgtctctgaaggaagaagaggggcacaggaggtgagagggagggagagttttatatgaattggtaacatacattcttgagctgggtggtgagttcacaggtgttaatttcataattattgtttaatctgtatacatgttatatatacccatgtgtatgctatgtttyattataaaatattataatgttccccattatatgtgattcttgggaacccagagtttgttaggagaacaaatacgtacataaagacatacaataatatttattacagcataatttgctgagttaaaaaaggaagctaccaaaatattccagtttaaaaatggttaaaaatttatggtgcaataatttcttataaagagtccttggctaccagttttaagaataggaggctagaaaactaatgaatctctcagctttcaaaactcaggggacaaactggactagaaattaagaaggaggattcttcttgctgtttgggctatttattggtcagaaatattaatttaaatgtgagttctctttccatctctagccacatgagcacaaagcaag

SEQ ID NO: 625467 - DNA, 565 bp, Homo sapiens
tcagaaatcacgtccagggccagttattttatggaaaagtgattaaatatgactgaaacattttaattgccagaagacctattgtctaactcaaaaagaaaaagaaaaaaatagcaattcacaatgtccacattagctcttcccagtgggtttatttgcacatgagcagccagcattccctgtcctggagcctccaggaagttccctccctgttgatgggcagctgtcttagtcttttccttttcctactcatttttctttttctttcttttttttttttttttttttttttttttgtaaatgcagagagcttgcatcccacctctgctaaccttttgactgcaggctaaagagataatttgaatttttaaatatattgccaatatgaagacaaagcrattttgacattagtaaatcctcggtttttgtctgagttggaaaacaccaggaaagcaggttttagaaagcctgtgtagctctcccagagcagccagaagcaaggtctagtccaagacgaggttcgctcttgatttaatcccctctgcaagttgccattgcccacagc

SEQ ID NO: 625468 - DNA, 630 bp, Homo sapiens
cttctcaaacttcaatgtgcatgtgaatcccctggaatcttgttaagatgcaggctgataaaataggcttggggccatgccaacattccgcctctctagctagctcccaggtgatgatgctgatgatgttggtccacagaccacacgttgagtatggagatttcataacagcacatgcccagtggcttatccaatataacaaaaagcatcagtccctggcatgagttcctgatgaggacagactaaggacctcatataggagcacgtgggaaagtttaagaatttggaaagaagcattgaaaagtcacaattctacctactctagaataactcctgtggtaagctgaaggcactggagagtgaggggttgagcaggtggaatttcttcaaccattattgagaaatagccttgtgcaaggcttgacaaagtatggtctgtgggccaaatacagcctactatctgcttttaaaaayaaagttttggcccggcaaggtggttcacacctgtaatcccagcactttgggaggccgatgcgggcggatcacctgaggtcaggagtttgagactagcctgagcaacctggtgaaaccccatttctactaaaatacaaagattagccatgtgcctgt

SEQ ID NO: 625469 - DNA, 630 bp, Homo sapiens
cttctcaaacttcaatgtgcatgtgaatcccctggaatcttgttaagatgcaggctgataaaataggcttggggccatgccaacattccgcctctctagctagctcccaggtgatgatgctgatgatgttggtccacagaccacacgttgagtatggagatttcataacagcacatgcccagtggcttatccaatataacaaaaagcatcagtccctggcatgagttcctgatgaggacagactaaggacctcatataggagcacgtgggaaagtttaagaatttggaaagaagcattgaaaagtcacaattctacctactctagaataactcctgtggtaagctgaaggcactggagagtgaggggttgagcaggtggaatttcttcaaccattattgagaaatagccttgtgcaaggcttgacaaagtatggtctgtgggccaaatacagcctactatctgcttttaaaaataaagttttggcccggcaaggtggttcacacctgtaatcccagcactttgggaggccgatgygggcggatcacctgaggtcaggagtttgagactagcctgagcaacctggtgaaaccccatttctactaaaatacaaagattagccatgtgcctgt

SEQ ID NO: 625470 - DNA, 530 bp, Homo sapiens
accccaaatggtattgcaaccatcacactgggatgaactacatacctggatgagagtggacaactgctgagttcctcatgcagaagcctctgccaggacccacgagctccctttcccttttctccccaagatggaacccactctgccacttccatcttggggagagagaggtcaggtggggctcaggacaccagcaggtgaggaagtaggtggctaagagccctgcctgaggaggtggggagttggtagaatgtggaactgtgcatgtgctgagactccagagagttttaagacagcgaccacagaccattaaattytaaaggcagggtctttctgagtgggggtcccgttccactgcacaggttgtgcatgtagaaagctggtcctgcctagcacacactagaggctgaagtgctgttgtattaaggatgtttttggctgagacaatatgccatggtgaaaaagtacctggatatccagctctaccacttcctgacccagagctgattgttttgtcactgtaaaacatg

SEQ ID NO: 625471 - DNA, 563 bp, Homo sapiens
tacacacagtcactagagtcagtgtaggcaaattacctaatcattctatgccttagttttcccatctgtaaaaaggagataacactaacacttacttcaaagggttattgagagaataaaatttctatgaagtgctaagaacaggaagttctcaaataaatgagagctgttaaacttctcttaatttcagaaaccttctatatgagaaacattgattatctttttaattcttccattgtttattataactgtgttttgggttgcattcaaattagtrtttattctcaatgatttctacattacttttttgactatgttttgaagacattgcagtacatttgttaccaaacattgttgcaatatttatgtccctaaatttttaccataagtggtaaatgtaaaattagaaggcctgcaagcatacaaataaacttcttggaaactgtgctttttgcttccctcttgttgtaagtgtctttcatagaggggctggtaggactgaaagattctgaaggttgagggcccttgaaaaggacagggctttgcatccaatgagtaaccca

SEQ ID NO: 625472 - DNA, 536 bp, Homo sapiens
agaatgaaatcctgggagctaggagggaatttatggatcactggtgaaactacagtccccactttttatcttgttacagatgaggaaaccaaagttcagtagggaaagggatgtggccaatgtcatactataaattagtggcacagtgaggaatttcctggcctgacagctgcatgggaagtctacaggcaatctttatgattgcatagggtgacagaacaatggtattcacctaccagagccaatctatcttcagccaagagtctgccccttcttttttaccactgggctcatatcatcatacaggcaatggcttcttcccataccccatcctttttctagcaaacaaaagtttttttctggcagcatggattacatatactgagcaacacaagagaagaaggatttctttttctcagagttcttgcaacacttgtcttcactgcttacctgacctttaattttakacaacccagtgagatcccttatgttgttctcttaagtaacccagtggtttttgactggaggtaattttg

SEQ ID NO: 625473 - DNA, 568 bp, Homo sapiens
  misc_feature 227, 228, 229, 230, 231, 232, 233, 234, 235, 236, 237, 238,239, 240, 241, 242, 243, 244, 245, 246, 247, 248, 249, 250,251, 252, 253, 254, 255, 256, 257, 258, 259, 260, 261, 262,263, 264, 265, 266, 267, 268, 269, 270, 271, 272, 273: n = A,T,C or G
  misc_feature 274, 275, 276, 277, 278, 279, 280, 281, 282, 283, 284, 285,286, 287, 288, 289, 290, 291, 292, 293, 294, 295, 296, 297,298, 299, 300, 301, 302, 303, 304, 305, 306, 307, 308, 309,310, 311, 312, 313, 314, 315, 316, 317, 318, 319, 320: n = A,T,C or G
  misc_feature 321, 322, 323, 324, 325, 326: n = A,T,C or G
aaagccttcttattttcctcttaaaatgttttcattggtaccacaacaattaatagtaaaataattttgatcaaagtttattaatgccatatttcccccacctagaataaaagtaattggatggttatacttcatgtgtccatgtatctaaatttgtttaattcgcaaatgtgtgtattctctttctgttttttggaggacattctgatggcatcctgctcaatgannnnnnnnnnnnnnnnnnnnnnnnnnnnnnnnnnnnnnnnnnnnnnnnnnnnnnnnnnnnnnnnnnnnnnnnnnnnnnnnnnnnnnnnnnnnnnnnnnnnttattgtgttgaatgaataaatctattcgtttatttatgcaacaaacatttattaagcactgtggtgatcagtttatgtgtcttcttggctagtctatggtgcccagttgtttggtcaaaggcttgtctacatgttgccgtcaaggtatttttgaccaaggtataacaattactatcarttgactttaagttaagcagattatttcaatcaagcttcatcccatcagttgaacgcttcaagg

SEQ ID NO: 625474 - DNA, 568 bp, Homo sapiens
  misc_feature 227, 228, 229, 230, 231, 232, 233, 234, 235, 236, 237, 238,239, 240, 241, 242, 243, 244, 245, 246, 247, 248, 249, 250,251, 252, 253, 254, 255, 256, 257, 258, 259, 260, 261, 262,263, 264, 265, 266, 267, 268, 269, 270, 271, 272, 273: n = A,T,C or G
  misc_feature 274, 275, 276, 277, 278, 279, 280, 281, 282, 283, 284, 285,286, 287, 288, 289, 290, 291, 292, 293, 294, 295, 296, 297,298, 299, 300, 301, 302, 303, 304, 305, 306, 307, 308, 309,310, 311, 312, 313, 314, 315, 316, 317, 318, 319, 320: n = A,T,C or G
  misc_feature 321, 322, 323, 324, 325, 326: n = A,T,C or G
aaagccttcttattttcctcttaaaatgttttcattggtaccacaacaattaatagtaaaataattttgatcaaagtttattaatgccatatttcccccacctagaataaaagtaattggatggttatacttcatgtgtccatgtatctaaatttgtttaattcgcaaatgtgtgtattctctttctgttttttggaggacattctgatggcatcctgctcaatgannnnnnnnnnnnnnnnnnnnnnnnnnnnnnnnnnnnnnnnnnnnnnnnnnnnnnnnnnnnnnnnnnnnnnnnnnnnnnnnnnnnnnnnnnnnnnnnnnnnttattgtgttgaatgaataaatctattcgtttatttatgcaacaaacatttattaagcactgtggtgatcagtttatgtgtcttcttggctagtctatggtgcccagttgtttggtcaaaggcttgtctacatgttgccgtcaaggtatttttgaccaaggtataacaattactatcagttgactttaagttaagcagattatttcaatmaagcttcatcccatcagttgaacgcttcaagg

SEQ ID NO: 625475 - DNA, 407 bp, Homo sapiens
atgccaaaggaaaaagttaagcttgagaactgagtcaatgcgaaaactgccttcctttcattcccaaacacatagctgtaatttcacatgcttattttgtcttatgtgaaatgtagatttactgagccaagaggactgcataactgactcctcccctttctcttcacatgtaaaatgtagattcacagagtgctaatcagagtttcacaagaatataaccacttgcctcattgcctacccctcctttttttttcactttcttcatcctcctgtttgctctttcctatttaaatactgaagtttccaaaactctcttggaaaaaagcacaggacacagatcctactgtgacttgtgtttcttgcccccyagccccaggcacatcctcaaccttggcaaaataaacctc

SEQ ID NO: 625476 - DNA, 565 bp, Homo sapiens
agtgatcctcctgcctcagcctcccaaagtgctgggattacaggcatgagacactgcacccagccccaacatataatttttaccaaatttttttcttagttaatctagctaaaggtttgtcaattttgctgatctttttgaagaatcaaattatggtttgtcattcttctctactgtttttctattctctactttatttattgctgttttaaactttattgattattttcttatgctagcgttagggttcttctttttctatttccttaaggtataaagttgggttgttgatttgagaccattattcctttttaatgtaagcatttagttataaatttctcttttagcattgcttttgctgcgttccaaaatttttggcatgttgtatttcattttcatttgtctcaagatatgctctctcttgtgatttcttatttgacacattggttatttaagagcrtgttttttaatatccatgtattcatgaattttccagttttccttctgctgatttctattttcattccattgtgatcagaaaagacactctgtctgatttcagtcc

SEQ ID NO: 625477 - DNA, 586 bp, Homo sapiens
atggcagctggcttcaccgaaagtgagcattccaaaagagtcaggtggaggctgaaaggtttcatatgacctagcctcagagtcacacagcaccactttctccatattctccatttctctacattctgttggtcaatgtagacataggctagctcagattcaagtagcaagagaaayagaccttacctttcaagggcctgtgcatacagagaagaaaggaattgatggccgttatcttggagacaagctacctcagtgggtatcaagctcattatattaaactaaaatattataagtttcaaaatagcaactaattcagactggtgtccacctccccccctcccacccctaaaaaaggctcatgtgaatccccttcctgaaacccatttaaaagatgcaccagttaggcctacattttgaaacggataacacctgctccactgaacatgacttgggaaggaataatttgcttggtggctggaaaataagtgcattaaattagcattgaacttgctttcgacccatttagtcttaaagagaacaaatcactggattatcagtagttcacagacaaggcaaaaagata

SEQ ID NO: 625478 - DNA, 645 bp, Homo sapiens
tgaacttgctttcgacccatttagtcttaaagagaacaaatcactggattatcagtagttcacagacaaggcaaaaagatacatttttgcaaagatctccattgtgggtaaacccaagatggcttaatttcagcctgatacagagtgcaaactcataaaagcaaattgcctgccacatagtaagtacacagtaaaaattagctgcaagtattcaattaaagagtaaagaattacagtctgagcataaaagtacttagtaattcattagaaaaaaatatgttataggcaggagtctgaggcccaacaaggggcagggatctgtccagggtcacacagcttgtaggagcagggccaggtttgaagttcatctggactcagatttctcacttatgacggggggaggggggagcacatctcaacgtgcttaataacctgggaattttaccgcaaaatgaatgrcattatatttcagctgaagttttgctgaattctacaaagaacagcttgaccctcaattaatgaacacgtgcacatcttaagtctttcacatctgccaggtggtacaaatgtaggtaattagcccagaccttgagtggcctatgcatttgacccagttaccaatgttgcagaaagttgtactgggct

SEQ ID NO: 625479 - DNA, 645 bp, Homo sapiens
tgaacttgctttcgacccatttagtcttaaagagaacaaatcactggattatcagtagttcacagacaaggcaaaaagatacatttttgcaaagatctccattgtgggtaaacccaagatggcttaatttcagcctgatacagagtgcaaactcataaaagcaaattgcctgccacatagtaagtacacagtaaaaattagctgcaagtattcaattaaagagtaaagaattacagtctgagcataaaagtacttagtaattcattagaaaaaaatatgttataggcaggagtctgaggcccaacaaggggcagggatctgtccagggtcacacagcttgtaggagcagggccaggtttgaagttcatctggactcagatttctcacttatgacggggggaggggggagcacatctcaacgtgcttaataacctgggaattttaccgcaaaatgaatgacattatatttcagctgaagttttgctgaattctacaaagaacagcttgaccctcaattaatgarcacgtgcacatcttaagtctttcacatctgccaggtggtacaaatgtaggtaattagcccagaccttgagtggcctatgcatttgacccagttaccaatgttgcagaaagttgtactgggct

SEQ ID NO: 625480 - DNA, 526 bp, Homo sapiens
cataattcactaataaagtccaatttcaaataccactatattgcttgatatgtggtgcaggtattttaacagaatatccttgaaatttctccctcctattcttcgtgacattgctatcattcatttcactcgtcctatcttctataatcactcaatacatcattgctactattaaacagttcttttatatcaattaagattagaagtaagaaaaataaaattttatccttccttattccttctgttacactcttcttaatataggtatgagtttctgacctatataatttccttttccctgaaggatttattttaacatctgcagagtggtcttctggtcatgaaatccctcagcttttgctggtctgaaaaactaattctcttttgaggttgagtttcactggatattctatatttgtggactttttccctttcaayagtttaaatattttttatttcattctgttcttgcttgcataactctcttctttttctctctccttccttcctttccttcattttgata

SEQ ID NO: 625481 - DNA, 601 bp, Homo sapiens
ccctactgaaacctgtgcaggagagaaccatcaacagctttagttggtgggaaggggaggcagagcactaggagaataaactgccacggtatagttgtaaaaggctactggaaagtaaacacaccaaaatgtcaattaggtaatttcatcatggactgatgctttctctcctagtttttttatattttgaggatggattacttttataatggcaaaaaaaaaattacttcaaaattttttgcagtgtttctattctgccccaatttaataccatccttacaaagctcacatcatgtgtgaaacttattgaaaagtataaccaggataatctgctaaattcgttaggaagacagaagatgtagctgacttcagtgagagtttgaagtgaatgcaacccaagtcatgtatagttcacttgaaggacatttgttcagtcaacraggatttcccatcccccacacccaagtccagccctttccagtgggcccttgtgcgttttattcttgtaaacacacttcaatatcactttctctaagaaggggctgttcatttgtatgagcttctgtaggtctcccttctaagagatgccttagcgaagctt

SEQ ID NO: 625482 - DNA, 601 bp, Homo sapiens
ccctactgaaacctgtgcaggagagaaccatcaacagctttagttggtgggaaggggaggcagagcactaggagaataaactgccacggtatagttgtaaaaggctactggaaagtaaacacaccaaaatgtcaattaggtaatttcatcatggactgatgctttctctcctagtttttttatattttgaggatggattacttttataatggcaaaaaaaaaattacttcaaaattttttgcagtgtttctattctgccccaatttaataccatccttacaaagctcacatcatgtgtgaaacttattgaaaagtataaccaggataatctgctaaattcgttaggaagacagaagatgtagctgacttcagtgagagtttgaagtgaatgcaacccaagtcatgtatagttcacttgaaggacatttgttcagtcaacgaggatttcccatcccccacacccaagtccagccctttccagtgggcccttgtgcgttttattcttgtaaacacacttcaatatcacyttctctaagaaggggctgttcatttgtatgagcttctgtaggtctcccttctaagagatgccttagcgaagctt

SEQ ID NO: 625483 - DNA, 556 bp, Homo sapiens
tgattatcatatatactttacaaattttaattttataataattcatattcattaacttattcatttttcaatccactttttccatttgggggtcacaggtggccagagcccattccagcagcttcacactcaagagagcaactatccatggacaggatgccatcccattgtagggcacactcacacatacactgacacgcactcacactgggattagaacacaccacacgattgaaacacaccaacgmagctaacatgcacatctatggtgtttggaaggaaaccagagtagcctgagaaaacccactgacggggagaatgtgccatctccacacagacagtggccctagctaggaatcgattttttttctcatcaatgttatgatgaaatgatgttgactgaaatggcgttattcaaggacttgtacttaaatatctccatatacattggctttgtttaagggtctctgtcaaacagactaagtagcaacatcacacaaattcttacagagggcaacaatcaacaagaatgcaaaattatgtggcacagcatgat

SEQ ID NO: 625484 - DNA, 556 bp, Homo sapiens
tgattatcatatatactttacaaattttaattttataataattcatattcattaacttattcatttttcaatccactttttccatttgggggtcacaggtggccagagcccattccagcagcttcacactcaagagagcaactatccatggacaggatgccatcccattgtagggcacactcacacatacactgacacgcactcacactgggattagaacacaccacacgattgaaacacaccaacgaagctaacatgcacatctatggtgtttsgaaggaaaccagagtagcctgagaaaacccactgacggggagaatgtgccatctccacacagacagtggccctagctaggaatcgattttttttctcatcaatgttatgatgaaatgatgttgactgaaatggcgttattcaaggacttgtacttaaatatctccatatacattggctttgtttaagggtctctgtcaaacagactaagtagcaacatcacacaaattcttacagagggcaacaatcaacaagaatgcaaaattatgtggcacagcatgat

SEQ ID NO: 625485 - DNA, 536 bp, Homo sapiens
gaggagagtttcattcattayagtcttgaattcttaattgcttaatttgagctattcgtgtctgcccaattgattctgtaccaaccttttaaattcaactatggtagtttgtttctatagcaacagtaaatgctagcttcaataaactttgtgaaacattctggcatgttccacttgatacaacttatttaacaatactgtcacaaaggtagatgtgatctagaaggcgttttttagaaagcctgctactggtcaacgtcattccagaaatttagagcttgataagtgacattgttgatggccacttgaaatttttggaaagtagttctatggtatgtatactgtctatcacaataagaacctaagcagaaaacaggagaaaagtttttaaatttacacaaaattatgagaagcagcatagatgagaaacagcatagatgaaagtgtcatgaaaggtaaaaagtcagtgcattttcattttgtataaaatgttaagcactgtatgcttaacactgtgtacttcttttcttttgctt

SEQ ID NO: 625486 - DNA, 536 bp, Homo sapiens
gaggagagtttcattcattacagtcttgaattcttaattgcttaatttgagctattcgtgtctgcccaattgattctgtaccaaccttttaaattcaactatggtagtttgtttctatagcaacagtaaatgctagcttcaataaactttgtgaaacattctggcatgttccacttgatacaacttatttaacaatactgtcacaaaggtagatgtgatctagaaggcrttttttagaaagcctgctactggtcaacgtcattccagaaatttagagcttgataagtgacattgttgatggccacttgaaatttttggaaagtagttctatggtatgtatactgtctatcacaataagaacctaagcagaaaacaggagaaaagtttttaaatttacacaaaattatgagaagcagcatagatgagaaacagcatagatgaaagtgtcatgaaaggtaaaaagtcagtgcattttcattttgtataaaatgttaagcactgtatgcttaacactgtgtacttcttttcttttgctt

SEQ ID NO: 625487 - DNA, 427 bp, Homo sapiens
gcctgttcttcagaggctaaagaatctcctcatctccagtgaagccatccctggaatccctcactgattcagctggartatggaggagcttaagttctaaagacctattcacttcctttaattccacctatacttcacaactgagaataccacaaacagttgggccctagaagaaagaagagctcacagatcttgcacttctaggtctgaattgtccaagtgaagaacgctcatttactccacatcccacagataactatctctcaagtgatcccagtatgaaagtctggagtatgagtataatatactcactgtaatatctgagtacaggaagttcacttcagagtcttcattctctcaaataagacagacacttttgataaagattattttatttaattgatcttacagtctttctagctgtttt

SEQ ID NO: 625488 - DNA, 427 bp, Homo sapiens
gcctgttcttcagaggctaaagaatctcctcatctccagtgaagccatccctggaatccctcactgattcagctggaatatggaggagcttaagttctaaagacctattcacttcctttaattccacctatacttcacaactgagaataccacaaacagttgggccctagaagaaagaagagctcacagatcttgcacttctaggtctgaattgtccaagtgaagaacgctmatttactccacatcccacagataactatctctcaagtgatcccagtatgaaagtctggagtatgagtataatatactcactgtaatatctgagtacaggaagttcacttcagagtcttcattctctcaaataagacagacacttttgataaagattattttatttaattgatcttacagtctttctagctgtttt

SEQ ID NO: 625489 - DNA, 575 bp, Homo sapiens
atccatcctgttgcctgggtaatcttcctaaaaaaaggttttcatcatgtcattgtctgcttaaatccataacattaagtccaaattcttttgcctttgtcaaaacattaaccaaattctaattggcaaggcactccatagcatagtgtctggcttacagttggctcttgatacatgttctttgaatgaacaactatagaggattagatgtatggatggatgaacctggtcattcaaaaatccccaacatctctctttacctacaggctagcactgtgtttaacccaagttccgtggcttttaatgaagctattttattttgctgagtcccttccttggccttcttcatcctaacacccatctcaagtgccactcttgtcccttcaactataccagcccatactaacctcwactttttctgtattcacactaaatttaattcagtaccatttagtttaccagtcaattgttctaactgtagcgtgcaccttttctcccttttaactaaactgaaagctcattgaagagagaaaaaaaggtatgtttgcattcttgctcattgattgatttaacaa

SEQ ID NO: 625490 - DNA, 640 bp, Homo sapiens
ccaaagtataattcagggtttgctcttgaagagcactttgtttcattcacattttcctaataggaaaatgtggcttgcattgacagtaaaaaatgagatctttattatacttaagactgggtacagcaggrtagtgtcctggcaggcagtctgtctttccatcagtcagggtgagtccagaaactttgcctttctatagatcaccatagattccaaagcatgttgcttaatttcttccaactttgaagctcacatacctagaggcaggcaaaaatgcagctgtggttttacttgaactgcttttctattcttggtttttgagacagaatatacatagtagatgaaattacatatgcaaaattctatagcctatgatattaggccattcttgcattgctatacatacttgagaccaggtaatgtataaagaaaagaggtttaattggctcacagttctgcaggctttataggaagcatggtgctggtatctgcttggcttctgggaaggcttcaggaaggtgaagggggagcaaacaagtcacatggccagagcaggagcaagatggagcggtggaggcaccacacacttttaaatgaccagatctcagaaaaactcactctctattgcaaaggtagcaca

SEQ ID NO: 625491 - DNA, 640 bp, Homo sapiens
ccaaagtataattcagggtttgctcttgaagagcactttgtttcattcacattttcctaataggaaaatgtggcttgcattgacagtaaaaaatgagatctttattatacttaagactgggtacagcaggatagtgtcctggcaggcagtctgtctttccatcagtcagggtgagtccagaaactttgcctttctatagatcaccatagattccaaagcatgttgcttaatttcttccaactttgaagctcacatacctagaggcaggcaaaaatgcagctgtggttttacttgaactgcttttctattcttggtttttgagwcagaatatacatagtagatgaaattacatatgcaaaattctatagcctatgatattaggccattcttgcattgctatacatacttgagaccaggtaatgtataaagaaaagaggtttaattggctcacagttctgcaggctttataggaagcatggtgctggtatctgcttggcttctgggaaggcttcaggaaggtgaagggggagcaaacaagtcacatggccagagcaggagcaagatggagcggtggaggcaccacacacttttaaatgaccagatctcagaaaaactcactctctattgcaaaggtagcaca

SEQ ID NO: 625492 - DNA, 546 bp, Homo sapiens
gtgtctttgggcattttgagcattgacaccaaagttccagcatcaaatcttagaatatcaagcagccagatggatcacctgaggtcaggagttcacgaccagcctgactaacatggtgaaaccccatmtctactaaatacaaaaaaattagccaggcatgattgtgcatgcctgtaatctgagctacttgggaggctgagacaggagaatcgcttgtgtacctgggaggtggaggttgcagtgagctgagatcacaccattgcactccagcctgggcaatgagagcaaaactctatccccccgcaaaaaaaaaaaaataaaagaatatgaagcagccaaagaagcaggaaaacatgacacataatgaagaatctaataatctagttgaaattgacagacatgttggacatagaagaaaaggacattagagcagttagtataattgtattttaattaaatggggaggttgaagattttttaaatatcaaattctgtagataaaaagtatgatttacagtctgaaatggaagaaggcagtggattaaa

SEQ ID NO: 625493 - DNA, 563 bp, Homo sapiens
gacactgaggttgagtggtgtctttgggcattttgagcattgacaccaaagttccagcatcaaatcttagaatatcaagcagccagatggatcacctgaggtcaggagttcacgaccagcctgactaacatggtgaaaccccatatctactaaatacaaaaaaattagccaggcatgatkgtgcatgcctgtaatctgagctacttgggaggctgagacaggagaatcgcttgtgtacctgggaggtggaggttgcagtgagctgagatcacaccattgcactccagcctgggcaatgagagcaaaactctatccccccgcaaaaaaaaaaaaataaaagaatatgaagcagccaaagaagcaggaaaacatgacacataatgaagaatctaataatctagttgaaattgacagacatgttggacatagaagaaaaggacattagagcagttagtataattgtattttaattaaatggggaggttgaagattttttaaatatcaaattctgtagataaaaagtatgatttacagtctgaaatggaagaaggcagtggattaaa

SEQ ID NO: 625494 - DNA, 608 bp, Homo sapiens
tttggtgctgaatctcaagcacccagtacggtgtctggcacataataggcacacactacatatttactgaatgaatcaattacgcacataaacatgtttatcagaccacatgattaggataatctcaacctcaaaatcacccaactcagcttgtttcatttcaaatcccagttttctaagacagatgatgacacaataagggaaagatctagaacatttttaactattaatgcacaggaagtctgcatttaaacagaaaatctggaaataataaattgatattaaaattactgagggtctaagatgatgaatcataacaccaactgtctctgaggaaaagtactattgttttagggcagaagctgagctcttgtcacaatttctaggggaaatacgaaaaaaaccttccacttttcagtaagtaaaatttgggctctttggagatttgaatwtaactattttagacgtatcagaatattattaaagtaccttaataaaaatatctgtgaaaactgtggggaaaaaacataataaataatatacaagatatatactgtgctctatctgccttggcactccttttctcgtagtatttaagagttcttagc

SEQ ID NO: 625495 - DNA, 546 bp, Homo sapiens
gtgtctttgggcattttgagcattgacaccaaagttccagcatcaaatcttagaatatcaagcagccagatggatcacctgaggtcaggagttcacgaccagcctgactaacatggtgaaaccccatatctactaaatacaaaaaaattagccaggcatgattgtgcatgcctgtaatctgagctacttgggaggctgagacaggagaatcgcttgtgtacctgggaggtggaggttgcagtgagctgagatcacaccattgcactccagcctgggcaaygagagcaaaactctatccccccgcaaaaaaaaaaaaataaaagaatatgaagcagccaaagaagcaggaaaacatgacacataatgaagaatctaataatctagttgaaattgacagacatgttggacatagaagaaaaggacattagagcagttagtataattgtattttaattaaatggggaggttgaagattttttaaatatcaaattctgtagataaaaagtatgatttacagtctgaaatggaagaaggcagtggattaaa

SEQ ID NO: 625496 - DNA, 577 bp, Homo sapiens
agacacaataaacccttcaaaaaatcaatgaatccggcgctttttatttgaaaagatcaacaagaaaaccctgtttggctagttcacctggctcatctgatggcaagttcctatcttgagaggactatgaaattaaaaccaatacaagtgccacaaataacatacaacattgtaaatcagcacaatttgtagctgggtgaatggaagaaatagttctattcatcacttcctcattttccctaaatctacaatctccagatgtcactactgaattaacagccaacaattccacaacattacctgggagacactggccctttttcttcctcttcctcatcatcactttcattttctgtaaataaattcagagaagcaggtcacattaagcaattcatacttcacatatgaacaaatcactgtccartcatagcacaaggacataactattctcagtgcaagaataaggattctgacaggaatattctaggttgtcctagattaactttggtgagaattagatgaccctgctttccagacccacaggccaaaatctccctctacatgtagaccataatgc

SEQ ID NO: 625497 - DNA, 577 bp, Homo sapiens
agacacaataaacccttcaaaaaatcaatgaatccggcgctttttatttgaaaagatcaacaagaaaaccctgtttggctagttcacctggctcatctgatggcaagttcctatcttgagaggactatgaaattaaaaccaatacaagtgccacaaataacatacaacattgtaaatcagcacaatttgtagctgggtgaatggaagaaatagttctattcatcacttcctcattttccctaaatctacaatctccagatgtcactactgaattaacagccaacaattccacaacattacctgggagacactggccctttttcttcctcttcctcatcatcactttcattttctgtaaataaattcagagaagcaggtcacattaagcaattcatacttcacatatgaacaaatcactgtccaatcatagcacaaggacataactattctcagtgcaagaataaggattctgacaggaatattctaggktgtcctagattaactttggtgagaattagatgaccctgctttccagacccacaggccaaaatctccctctacatgtagaccataatgc

SEQ ID NO: 625498 - DNA, 565 bp, Homo sapiens
acatgtaaataatataaaaattattaatgagataacattattatctgagataatattacatgatttttcataagtctgaaattcaaggtatattttatactcacagcacatctcaatttggactagccacatttcaagggttcaacagctcctaagactagtggctagcttactggatagcacagggctagagcatagtgggcaaaggggacagggaaactcaatgagrtggagaggcaggcaggcaccaggtcacatccagcttcagacaacaaagttaatgaactggatttcattttaattgaaatgagaatagactgcagttttttaacaggtaatcatacagaagttttgaaaagatcatgctatggtgaatgaattattggggagcaccaagagaagcagagagaccaggtaggaggctgctgcggtagtgcaggtgaaagacaatagtagcttggatcctggtggttagtaaagggagggggaaataaatggatagatatggatatgttttgaaagtatagctaacaggacttgctggtggactggatagagggagagg

SEQ ID NO: 625499 - DNA, 565 bp, Homo sapiens
acatgtaaataatataaaaattattaatgagataacattattatctgagataatattacatgatttttcataagtctgaaattcaaggtatattttatactcacagcacatctcaatttggactagccacatttcaagggttcaacagctcctaagactagtggctagcttactggatagcacagggctagagcatagtgggcaaaggggacagggaaactcaatgagatggagaggcaggcaggcaccaggtcacatccagcttcagacaacaaagttaatgaactggatttcattttaattgaaatgagaatagactgcagttttttaacaggtaatcatacagaagttttgaaaagatcatgctrtggtgaatgaattattggggagcaccaagagaagcagagagaccaggtaggaggctgctgcggtagtgcaggtgaaagacaatagtagcttggatcctggtggttagtaaagggagggggaaataaatggatagatatggatatgttttgaaagtatagctaacaggacttgctggtggactggatagagggagagg

SEQ ID NO: 625500 - DNA, 626 bp, Homo sapiens
ggtaacagtctgctgaaagagcacttagcaagtcccactaagccaacaacataatgaattcttgtgaagtatcaagtacataaaacagtcactcctacaatgatagtgtagcccatgaaataagtaatacctgatttggtagaatcagtgttactctctagacactcaggtactaaaatcatgtggaaatgataatataattttaaattaagtcacttktgactcagaattaggacaaaggctttccagtatcagaaaagagaaccgcttccaggcctagtgttgcacaatatgagacttttttttaggctaaggccagtttttagactttttgtgttaacagcagttttcttggcacttactagtcctcacagtagtgagttatagatctcaaactgctataattgtcaaccctattgttaataataggagacagacaagaaccattgactaccataaaattaaaggcctaatcttttaccagcatctaatgccaacatcttccaaagggcctgatccacttcacataactaaaataagagtgggataaatttaccatagtcacaaaggagcagaccttggcattgcaaggtttaaggcaaagatcttctgttctttgaatttag

SEQ ID NO: 625501 - DNA, 616 bp, Homo sapiens
tttttcatgctttgcatctctcaacagctgagacttcctcttccatgtatagcagccaggccctttcttctctatctcctattttcactgtgagttctgctctgttccagatgtagctgactggatatttcccctcagccccacagaaacatgtggcattgcctagcagcctttggtagcttattatctaccatagtcatgcaggcacatgaccatctgtgggcagagtcaactcaatgggatggatagaaactgaaggatttgcaggtgtatggcccccacatgtggaaggggtgagaagcctggcagccatgtcatttccttgtgcagactgcatagagggagggaaggcagtcagcaaagcttctgagagcaccttgccagtgagagagaccaggaacctgtggctgtgctgtatgagctgctggagaccyatggatgtgtagggacagccctgcctccacggagcccccacactagagggcaagacacacacccaagtagataagcacagtaaggggctacaggcacagtatgagaagtcatcctctgtgctgtgagagcgccaatgcaaatgtggtcatttatctcaggcaaggaaggtaacaggctcata

SEQ ID NO: 625502 - DNA, 543 bp, Homo sapiens
caactcaatgggatggatagaaactgaaggatttgcaggtgtatggcccccacatgtggaaggggtgagaagcctggcagccatgtcatttccttgtgcagactgcatagagggagggaaggcagtcagcaaagcttctgagagcaccttgccagtgagagagaccaggaacctgtggctgtgctgtatgagctgctggagacctatggatgygtagggacagccctgcctccacggagcccccacactagagggcaagacacacacccaagtagataagcacagtaaggggctacaggcacagtatgagaagtcatcctctgtgctgtgagagcgccaatgcaaatgtggtcatttatctcaggcaaggaaggtaacaggctcatagaggacatagcaaggggggtgagttttgaaagccttgtgggttctgcaggtggaggaaggcattcctggtaaagggagcagcaccttagttctgagagctgcaaatggttgtgtgagggcttcacaggttcaagcaggcccatgttctatgcctca

SEQ ID NO: 625503 - DNA, 543 bp, Homo sapiens
caactcaatgggatggatagaaactgaaggatttgcaggtgtatggcccccacatgtggaaggggtgagaagcctggcagccatgtcatttccttgtgcagactgcatagagggagggaaggcagtcagcaaagcttctgagagcaccttgccagtgagagagaccaggaacctgtggctgtgctgtatgagctgctggagacctatggatgtgtagggacagccctgcctccacggagcccccacactagagggcaagacacacacccaagtagataagcacagtaaggggctacaggcacagtatgagaagtcatcctctgtgctgtgagagcgccaatrcaaatgtggtcatttatctcaggcaaggaaggtaacaggctcatagaggacatagcaaggggggtgagttttgaaagccttgtgggttctgcaggtggaggaaggcattcctggtaaagggagcagcaccttagttctgagagctgcaaatggttgtgtgagggcttcacaggttcaagcaggcccatgttctatgcctca

SEQ ID NO: 625504 - DNA, 620 bp, Homo sapiens
ggacttgccgaggcaggcacaaaagggaatctcctggtctgtcagttgcaaagacagtggaaaaaagcacagtatttgagcaggagtgtactgctcctccaggtgcagtcactcacagcttcccttggctaggaaaaagaaatcccccaaccccttgcgcttcccaggtgaggtgacaccccaccctgctttggctcatcctctatgggctgcacccactgttcaacgagtcccagtgagatgaaccaggtacctcagttggaaatgcagaaatcacctgtsttctgcgtctatctcactggaagctgtagaccggagctgttcctattcagccatcttggaagcaaccctctttttttttttgtattttggtagagacagggtttcaccatattgcccagactggtttcaaactcctgaggtcaagccattctataaaagaaaattatatttgttttatctgagttccttcctcaggaaaggactctcagtcctctcaaaaagcatcagagacctgaaactcagccaatcacagcatccagacaatgagatgccagtcccctcactcatcacgagtgcttcctcacccctccctagttcctctcttcccacacacagtt

SEQ ID NO: 625505 - DNA, 620 bp, Homo sapiens
ggacttgccgaggcaggcacaaaagggaatctcctggtctgtcagttgcaaagacagtggaaaaaagcacagtatttgagcaggagtgtactgctcctccaggtgcagtcactcacagcttcccttggctaggaaaaagaaatcccccaaccccttgcgcttcccaggtgaggtgacaccccaccctgctttggctcatcctctatgggctgcacccactgttcaacgagtcccagtgagatgaaccaggtacctcagttggaaatgcagaaatcacctgtgttctgcgtctatctcactggaagctgtagaccggagctgttcctattcagccatcttggaagcaaccctctttttttttttgtattttggtagagacagggtttcaccatattgcccagactggtttcaaactcctgaggtcaagccattctataaaagaaaattatatttgttttatctgagttccttcctcaggaaaggactctcagtcctctcaaaaagcatcagagacctgaaactcagccaatcacagcatccagacaatgagatgccagtcccctcactcatcacragtgcttcctcacccctccctagttcctctcttcccacacacagtt

SEQ ID NO: 625506 - DNA, 507 bp, Homo sapiens
ccctgcctcccaatcccacttgcttggtgtcagccattatttatcacatggaggaagggggaaaggcacccaggaagtcccaagtcctgttctcacaatcatctggcctccctgggcaaagggaaaagagggaaggcaaaaagaatatagcactacggtttgcrgaaatttccccttggtacaggaaactctggtaaactgagagagtatgttttccatgagggaggcctcaagggctcttctctggccctaagcccaagctggattttgactcattttctgaggtgcaaatgaaatgataaaagttgatcaaaggagagggcacagagaaagaggatgactcctctctcgcaggtccaccttccttggtgttgcttgagggatcagaaaaaatgccttaacataggtgtgtgggaactatggctgctaagtatgaactcagttacctccagttataagctagtgtgaggttccatggtgtaatggtgagcactttggactctgaat

SEQ ID NO: 625507 - DNA, 507 bp, Homo sapiens
ccctgcctcccaatcccacttgcttggtgtcagccattatttatcacatggaggaagggggaaaggcacccaggaagtcccaagtcctgttctcacaatcatctggcctccctgggcaaagggaaaagagggaaggcaaaaagaatatagcactacggtttgcggaaatttccccttggtacaggaaactctggtaaactgagagagtatgttttccatgagggaggcctcaagggctcttctctggccctaagcccaarctggattttgactcattttctgaggtgcaaatgaaatgataaaagttgatcaaaggagagggcacagagaaagaggatgactcctctctcgcaggtccaccttccttggtgttgcttgagggatcagaaaaaatgccttaacataggtgtgtgggaactatggctgctaagtatgaactcagttacctccagttataagctagtgtgaggttccatggtgtaatggtgagcactttggactctgaat

SEQ ID NO: 625508 - DNA, 507 bp, Homo sapiens
ccctgcctcccaatcccacttgcttggtgtcagccattatttatcacatggaggaagggggaaaggcacccaggaagtcccaagtcctgttctcacaatcatctggcctccctgggcaaagggaaaagagggaaggcaaaaagaatatagcactacggtttgcggaaatttccccttggtacaggaaactctggtaaactgagagagtatgttttccatgagggaggcctcaagggctcttctctggccctaagcccaagctggattttgmctcattttctgaggtgcaaatgaaatgataaaagttgatcaaaggagagggcacagagaaagaggatgactcctctctcgcaggtccaccttccttggtgttgcttgagggatcagaaaaaatgccttaacataggtgtgtgggaactatggctgctaagtatgaactcagttacctccagttataagctagtgtgaggttccatggtgtaatggtgagcactttggactctgaat

SEQ ID NO: 625509 - DNA, 507 bp, Homo sapiens
ccctgcctcccaatcccacttgcttggtgtcagccattatttatcacatggaggaagggggaaaggcacccaggaagtcccaagtcctgttctcacaatcatctggcctccctgggcaaagggaaaagagggaaggcaaaaagaatatagcactacggtttgcggaaatttccccttggtacaggaaactctggtaaactgagagagtatgttttccatgagggaggcctcaagggctcttctctggccctaagcccaagctggattttgactcattttctgaggtgcaaatgaaatgataaaagttgatcaaaggagagggcacagagaaagaggatgactcctctctcrcaggtccaccttccttggtgttgcttgagggatcagaaaaaatgccttaacataggtgtgtgggaactatggctgctaagtatgaactcagttacctccagttataagctagtgtgaggttccatggtgtaatggtgagcactttggactctgaat

SEQ ID NO: 625510 - DNA, 528 bp, Homo sapiens
tcactgttgtttttaactaaattctttcttcccttttggttgaattatattggcacattaattctccaggcttagtaacctagaaacagtctgagctaaaagtgaactaactaggtttcaagagtcttctgccccactaagggtcctgctttcctgctgtgtgtttaataagcaggatgagctttttccaaagttgggttgacagctaatttaatagtcactcaattgccctgggggaaaaaaggaatcatataacaggacctggtgaaagaggcctagatggtgtagatcaccaggaggctgcagtgcctcaggacccagttctcagtgagttgcttcatataatgatcaatgaaataygggctcagagtccgttgtagccactagttggggttctttgtgtcatgcttgtgtctcagactacataaatgcttctgaaagtatctgtagtgaaggacacagtggttttttttgttatgttttgtttttatttctaatctatcatagaaacatatatggtctgaattc

SEQ ID NO: 625511 - DNA, 493 bp, Homo sapiens
tcaagcaactatcccacctcagccccccaagtagctgggattacaggtgtgtgtcaccacacctggctaatttttgtattttttgtagagacaggrtttcgccatgttgccaagactggtctagagctcctgagctcaagtgatcggcccaccttggtttctgaaagtgcagggattacaggtatgagccactgcacccagcttagcctatttattttgtcaacccaggaaatgggtactttgtctaatgcagggaactgtaaagctcagggaagtgaagttacttgttcaaggtcactggtaagtgggagagatggggttgaatctggtcttctgctccaggttttatgtttctgttatatcttttctacttaggatggctttgtcaccatcctgcttagagtatggagctgagctcagctgatcaaactctggggactcgttgcaacaattttttccctctctttagagaccagtaggaagtgctgctgtt

SEQ ID NO: 625512 - DNA, 493 bp, Homo sapiens
tcaagcaactatcccacctcagccccccaagtagctgggattacaggtgtgtgtcaccacacctggctaatttttgtattttttgtagagacaggatttcgccatgttgccaagactggtctagagctcctgagctcaagtgatyggcccaccttggtttctgaaagtgcagggattacaggtatgagccactgcacccagcttagcctatttattttgtcaacccaggaaatgggtactttgtctaatgcagggaactgtaaagctcagggaagtgaagttacttgttcaaggtcactggtaagtgggagagatggggttgaatctggtcttctgctccaggttttatgtttctgttatatcttttctacttaggatggctttgtcaccatcctgcttagagtatggagctgagctcagctgatcaaactctggggactcgttgcaacaattttttccctctctttagagaccagtaggaagtgctgctgtt

SEQ ID NO: 625513 - DNA, 598 bp, Homo sapiens
actctcactatttagatatttacatcgtaagaaaaatctacatcttctctgacctcagtatccttcaaggtcaatctcaaatctataaaaacattttccttttacattttctcattttaaaataatctttcatgtaaactcatattataggccttttgaaagcctaagctagtcatcttcagtgatttcttcccatttatatattcagttagttctgaaagaatcggcatcagtcagaatgatttttttctcatagaaacactttaccttgttcacacttattatgtytgtttcattggcccatctattgatataactttcatatatttgtcaagtaagaaaatgatactcattaatctatatttctcagcttaacttttatgatttttttgaatttgattcatattagcaattccacagtcctatagcatgttagaggtggataataaattttacctcttagccaagagttttatatttacatatttgtatttttcaacctcctttcatggatatcatactgctctatgatagagtgagctttatactcagtcatacttttttcaacttctttttatttttcaacactttttctttt

SEQ ID NO: 625514 - DNA, 577 bp, Homo sapiens
ggactgcttaagctcaggagttcaagactgcagtgagtggctgggtgcagtggctcatgcctgtaatcccaacattttgggaggccaagaccgatggatcacttgagctcacaagtttgagaccagcctgggcaatgtggtgaaaccccatctctactaaaaatacaaaaaaatagccaggcatggtgatgcacgcctgtagtcccagctacttagaggctgaggtgggagattgcttgagcccaggaggtggaggttgcagtgagccaagatagcaccgctgtactcccgcctggacactagagccagaccttgtatcaaaaaatggtaataataatagtaaaagaaagaaaaaagaaaaaaaaagaaaaatgaaagactgcagtgagctatgattgtgtcactgcactccagccatggtgacaaagtaagactctatctctaaaacaaaacraaacagaaacaaatttagtaattgaaatgaaaaactcagcagctaggtatcacctgatttagacacagctgattagagaatcagtgaactgggaagtaaatttgaagaagtcatacaacatgt

SEQ ID NO: 625515 - DNA, 567 bp, Homo sapiens
agtctgggcaacaagagcaaaactccaaactctgtttaaaaaaaaaaaaagaaaaagaacatagaaagctgcagtcactttggaaaacagtctggcagttcctcaaaaattaagtgtagacttaccatattacccaacagttccactcccaagtgtatacccaagagaaatgaaaacatatgttcacataaaatcttgtacatgaatgtttatagtagcattatttataatacaaaagtggaaacaacccaaatgtcaacttccaaatggataaagtgtggtatggtgatacaatggaatgttatttaataataaaaaggaataaagtactgatgcatgcaacaacatggatgaaccttgaaaatactgtgctaagtgaaagaagccaaccacaaaataccatatattgtgtgattctgcttaaatgacatgtccagaatgtccatattaaagtagattagtggtttcctgaggctgggggagggagttggggaaattgcktagtgactactgggtaaagagtttctttctggggtgatgaaatggtctaaaatagaatgtggtggt

SEQ ID NO: 625516 - DNA, 323 bp, Homo sapiens
atggcggtgcctgcctgcaatcccagctactcgggaggctgaggcacaagaatcgcttgaacctgggaggyggaggctgcagtgagccaagatcgcaccactgcactgcagcctgggcaacagagcaagactctgtctcaaaaacaaacaaaacaacaaaacaacaacaacaacaacaaaaatggaacatagaactaaaggcaaaagttaaaactaaaacttccagaagaaatcgtaggagaaaacctttgtgaccttggtttaggcaaagattgtttgcatgcaacaccgatagagcatgattcataaaatatcaagttaat

SEQ ID NO: 625517 - DNA, 584 bp, Homo sapiens
gagacggggtttcaccatgttggccaggctggtctcagactcctggcctgaaattatctgcccgcctcagcctcccaaagtgctggaattacaggtgtgaaccaccacgaccgacctttatcctcatttttaaccaggatggtctcttccaggacaaaggaagcatcttccccagaggcaaactcaagtctctgccccaattttgctctagcaaaattgctgggagcttaaagtggaggtttccgggatccactgagcgctgcttttcccaggscagtgtacctactgcgggggcttgggagtgccgctcttttatcatcttcctctggtctctggtcccctatggggaagggaaacaccctcatggtgacttgggtgcccatctttctttccagaaaccttccagtgcttctggcacatccaggcagtcaagcaagatccacagcaaacagtccatttacaaagaggatgaaacgagaaaaggagaatggcagaagaatatgttggttcaatccagtgcctcggtggagaaggttggccgtgatcagccagggagagggatatgagctggggagtgggcggtc

SEQ ID NO: 625518 - DNA, 530 bp, Homo sapiens
ggcatcactctacggcagggtctaggcagatcatgcctcctggcaacacctaattgcaggatccagtcagataacacctccttgccagttgactagcaataaaacttttcytttctcaaaagcttgtgccatagtattggcttctgtgtgcatcgggcaccgagcccattgattgcttagtaacacatggactcatgaacccatcctttcagcacctatgaactaagtgttaaaatgggattttgtcctggcatgttgggaagacagaggaggaacactgggtccaacctgatatttgggaagatttcctgaagaaaatgatacctgggccgatctttggtaaaagacttatccaagtaaagtaagcattgggtaaatgagtatcaacagagggaatcctgagagcaaagcacagaggtgtgaagcaatgtagtgtgtgagacaattaaatgtaattttgtgcccaggtgatatggtttggctctgtgtccccacccaaatctcaacttgaattgtatctcccagaattc

SEQ ID NO: 625519 - DNA, 587 bp, Homo sapiens
aaggacccagaatggacaagtcccttgtcaacacagagcactttccatcatttcctgcttcttgaacccagacagacacagagaagacytgcaagaaagggcataccctaatttgcctggtgtccatgaaggtcatggatgtaggatttgcagtacactgtggggagaagagccataaactatgtaggcatcacttaactttggacaaatcactttacctctctaagcctcagttccctcttctgtaaaacaaggttgaactggacatttttcgagtttccttccagttctaaaggactgccgccccaggcttccctaaataatctgctcctgcttggattcaatagaacactggagattctttctcttatcctcctgcagtgaagagagacccatgaggacacctgatccagttctctgaggccctccttctccacacttggttgtgtctgagtagtacaaagcatcagacctatcagggtggttggtctttgctgcctattaactgtgtgtgacttagaaaatctttgcacttctgctccttgattactagaagtgagcaattgcaattgctcctgcctggcaga

SEQ ID NO: 625520 - DNA, 587 bp, Homo sapiens
aaggacccagaatggacaagtcccttgtcaacacagagcactttccatcatttcctgcttcttgaacccagacagacacagagaagacttgcaagaaagggcataccctaatttgcctggtgtccatgaaggtcatggatgtaggatttgcagtacactgtggggagaagagccataaactatgtaggcatcacttaactttggacaaatcactttacctctctaagcctcagttccctcttctgtaaaacaaggttgaactggacatttttcgagtttccttccagttctaaaggactgccgccccaggcttccctaaataatctgctcctgcttggattcaatagaacactggagattctttctcttatcctcctgcagtgaagagagacccatgaggacacctgatccagttctctgaggccctccttstccacacttggttgtgtctgagtagtacaaagcatcagacctatcagggtggttggtctttgctgcctattaactgtgtgtgacttagaaaatctttgcacttctgctccttgattactagaagtgagcaattgcaattgctcctgcctggcaga

SEQ ID NO: 625521 - DNA, 482 bp, Homo sapiens
gagtatattttgtttcaactgctttgagcattttcactctagtattcttgtagccattctctgatagcccaactccaggttctttctatgaagcatcttggccctgcccactgctattcctttagcccttttctgcagtacattagatattatgtatccttttttggcactgcatcttttatacatatgtggcaagccacctttggctttggctactagttaaagcctaggtctctacacttatccagcgtcctaaatggggatgcctcactcagttgtacaggttgtgcactgcattactccagggaatgcatgtacatggaccatggtcgtgcttctaaagctatattggtacaatctccatgacactccaagaatgacccattctcataaactacctgtcaatttctcagcaaaygcaagcttcattcagaggcactggcaagagccataaagcatgcctgatcctgggtactccaggt

SEQ ID NO: 625522 - DNA, 626 bp, Homo sapiens
gtgccactgcactccagcctgggcaacaggcaagaccttgtctattaaaaaattatttttttaaaaggacatctattacaacccctttaattgtcaacctgtgagttactggaaacttactattttagggagacaaaaggctaaaaagacagttgttaattctcagcacaattcagaattttttggtagacatatcattcttttcttccctgatccayacacatgtatcattcacaacctgaacccttcaatggagtctccttgttcctaagataaattccagccctataaaggccctcaagatggagccttgctgaccattctggcctcattttgtaccactgacccctctttctgtgtgcttcagccctcttgtcttcttcctaggagaggcttttcctcatccctcagtcctagtcaagccccccatccccaccccagttgcacactcccttagcaacttggcaacttctgaaggatttatacaattgtaattaagcaattagttgagtaactggttgagcattcactccatattcctgaatgaccactcacagagatcatggattatctctgtcttgtcccccaagagcttatgactgtaccttgcatgtataatgggtaca

SEQ ID NO: 625523 - DNA, 626 bp, Homo sapiens
gtgccactgcactccagcctgggcaacaggcaagaccttgtctattaaaaaattatttttttaaaaggacatctattacaacccctttaattgtcaacctgtgagttactggaaacttactattttagggagacaaaaggctaaaaagacagttgttaattctcagcacaattcagaattttttggtagacatatcattcttttcttccctgatccacacacatgtatcattcacaacctgaacccttcaatggagtctccttgttcctaagataaattccagccctataaaggccctcaagatggagccttgctgaccattctggcctcattttgtaccactgacccctctttctgtgtgcytcagccctcttgtcttcttcctaggagaggcttttcctcatccctcagtcctagtcaagccccccatccccaccccagttgcacactcccttagcaacttggcaacttctgaaggatttatacaattgtaattaagcaattagttgagtaactggttgagcattcactccatattcctgaatgaccactcacagagatcatggattatctctgtcttgtcccccaagagcttatgactgtaccttgcatgtataatgggtaca

SEQ ID NO: 625524 - DNA, 615 bp, Homo sapiens
ccaggttgggtgctcacagccatgaggagtggctaagtaaacatctgctctcggcagggccctctgagatcaggcacagccatcaacagtggctgcatgcctctcatgcttctgagttacgtttgtcctgcttctgagaagatcagccacttcagaatgaaccaattaatacaatcgctaggtgccctcctgtagtacctctgtgaggtttgaaggacttgccctgatgaacctccacttccctgtaattccctataagatctgcagcacaaagctgtgaaggtgctggtcaggggtggaatgcaactgatgctgtcaccagactctaatcccaatatctcccagatattccacagataccacattctaaccagaataatctgcatcmtctaaagggtttatgatatgtggctgtgggactggaccaatatgagcccacagaagcctgcatacttggaaccacttggtgggatcaatgtcattaggagacacaactataaatgctgtcattcaacccagcttgaatgaataacaaagaacatgctccaggaggataaagaacagagcatctccttggtaagtattctaaatatataatataagtatcatgaattc

SEQ ID NO: 625525 - DNA, 461 bp, Homo sapiens
gaaggaaaaggacttacaaccataaaataccatctttcatatttactatgtacttatctttaccagtacactctatttctttatgtagatttgagttactgtccagtgtccttccatttcagtctgaaggacttcatttagtttttattttctgtatgacatatttgctagttttcagtcaggtctgtgtgaagagaccaccaaacaggctttgtgtgagcaacaaggctgtttatttcacctgggtgcaggcgggctgagtctgaaaacagtcagygaagggagataggggtggggccgttttataggatttgggcgggtaaaggaagattagtcaaagggggttgttctttgtcgggcagggccaggagtcacaaggtgttcagtgggggagcttttgaggcaggatgagccaggagaaggaatttcacaagataatatcatcagttaaggcagaaaca

SEQ ID NO: 625526 - DNA, 549 bp, Homo sapiens
tcaacttcctgtgtgtatttcttgaagatcatttatgctccagatgcatgattctctcttatttttctggaactccagatctcaccctccttgtaacagttagtgctctcgcaagcataactctaaagttttcctgaggctggggrataaaagcaaaacagaataaagttagaggcctgaacaaatgaaatggtccttctattttctttccgtatgtcagcataaaaatcccctgtgtgtctctttcaaatatgtgattattttttaaaaacttccaactccagacaataaattttggttctctgtacttggaccaaatgcctaatagaatgggtaagtttggggaataatcaccacagtggaatacattataacaattagaatgaacagcctgctacgaatgcaacaataccagtgactctcataagcagaatgttgagtggaagaagcgagacataaaagtttgcacactatgtgatttattttatatgaaatatagaaacaggaaaactaactgggatagggattgtcctttgtgggaggagatat

SEQ ID NO: 625527 - DNA, 585 bp, Homo sapiens
gtgttccatttgttctttatttttatatgatttgttgatagagttttcccagatataattaataagcaagaaaggagagcagttaaattaattaattcacctttatatttgtttaatagaagaaccaaaatttggtttttaaaaaggtgttttatgccagtaatgatgtggaaatctgcaggtatcttaagctcatcagagggaatatcttaagacaattttaaaatgcttgggtcctgaaaagaaatgtcaaacgtagtgcaatcatagctcactgcagccttgaactcttgggctcaagcaagcctcctgcctcagcctctggaacaactaagactacaggcatgtgctactacactgggataatkattttttaatttaatttaattttgtagagatgggggtctcactatcttgccaagctggtctcgaactcctggcctcaagcaatcctcccacataagcctcccaaactgctgggataacaggcttgagtcactgtgccaggccctgactattattttttaaacactaagtttaaaagttttcactgattatttaaaataataaaaagtaacaaagagg

SEQ ID NO: 625528 - DNA, 604 bp, Homo sapiens
ttcaaacttactgcaaagctactgtaatcaagacactgtggtactgctatatggatagacatatatagatgaatgaaatcaaatggagaatatagaaataaacctttgcatttatggtcaattaattttgacaagggtgccatgataatttactaggagaaagaatactctttttaacaaaatgttttgggataagtgtatatccacatggaaaagaatgaagttggattcctaccttacaccatgtacaaaaattaacttgaaaaggatcaaagacctaaatgtaagagctaacactaaaaaactcttagaagaaattttagatgtaaatctttatgaccttggatttggcaatggtttcctagaagtgacaccaaaagcaaaagcaaccaaagacaaaaatagataagctggatttcatcaaaatggaaaactcttgtgcttcaacaggcactgtgaaaaaagtgaaaaaacaactacagagtgggagaaaatatttgcagatcgtatgtctgrtaagggtctagtatctagaatatataaagaactcttacaactcaacaataaaaaacacatgtaacacaattttaaaatgggcagagga

SEQ ID NO: 625529 - DNA, 463 bp, Homo sapiens
taaaaactgaaagaattcgtcactagtgtcaggcctctgagcccaagctaagccatcatatcccctgtgacctgcacatccagacggcctgaagtaactgaagaatcacaaaagaagtgaaaatagcctgttcctgccttagctgatgacgttccaccacaaaagaagtgaaaatggyctgttcctgccttaactgattatattatcttgtgaaattccttctcctggctcgtcctggctcaaaagctcccccactgagcaccttgtgacccccatccctgcccaccagagaacaacccccctttgactaattttcctttacctgcccaaatcctataaaacagccccatccctatcttccttcgctgactctcttttcggactcagcccacctgcacccaggtgaaataaacagccttgttgctcacacaaagcctgtttggtggtcccttcacatggacgt

SEQ ID NO: 625530 - DNA, 463 bp, Homo sapiens
taaaaactgaaagaattcgtcactagtgtcaggcctctgagcccaagctaagccatcatatcccctgtgacctgcacatccagacggcctgaagtaactgaagaatcacaaaagaagtgaaaatagcctgttcctgccttagctgatgacgttccaccacaaaagaagtgaaaatggtctgttcctgccttaactgattatattatcttgtgaaattccttctcctggctcgtcctggctcaaaagctcccccactgagcaccttgtgacccccatccctgcccaccagagaacaacccccctttgactaattttcctttacctgcccaaatcctataaaacagccccatccctatctyccttcgctgactctcttttcggactcagcccacctgcacccaggtgaaataaacagccttgttgctcacacaaagcctgtttggtggtcccttcacatggacgt

SEQ ID NO: 625531 - DNA, 598 bp, Homo sapiens
ttgtctatcactatattttttctttttcttttctttttttttttttgcgatggagtttcactcttgttgcccaggctggagtggaatggcgtgatctcaccacaacctctgcctcctgggttcaagcgattctcctgcctcagcctccctagtagctgggattataggcatgcgccaccatgcctgactaattttgtatttttagtagagatggggtttctgmatgttggtcaggctggtctcgaactcccgatctcgggtgatccgcccgccttggcctcccaaagtgctgggattacagacaagagccaccatggctggccttgtattttcttttttctgatgctgatctcaataagataacgctcaagaacaacacaacactgtgatgtgggtgagcggctgagagctgaacactctggcttcctgaggtaaatacttgcagctgaatgatgattagaaaggaaccacaggaatgctgtctccaagagcactgcctgcaagaagaaggcacaggtggccagcactggtggcctgtggactctacacttcacagctttggtccagcaccagcaaaatagtgatgcaagactattgt

SEQ ID NO: 625532 - DNA, 514 bp, Homo sapiens
atatttatccttcagtaaatacatggtgaagaaaggaatgaaaattagttatcattagtttatacttagagtaaaaactgaattctctttttttgtattctactgcccagcaaatcttacttaaacattgatttaattatctactcatttgaaaaattaaatcccttctattattattctgctgcacaaaataaatatgtatgtttgtgcacatctatgtacacatatacatatatatacatacacacatacatatgtatgtatataktcatctctttatgattttgtcctctttgcacttagccaacttaattttccactgccttcaatatgaaacttccttttttaaaaaaaaaaaaaacactggtctccccactgtccagagaatacatcatgttcaactgtgctgttgcctgtgtttttttttttttttccttgagtggaatacctttatttttctctgcttatttaagttctacacagccttccaggcctaacctacttccaccagctc

SEQ ID NO: 625533 - DNA, 514 bp, Homo sapiens
atatttatccttcagtaaatacatggtgaagaaaggaatgaaaattagttatcattagtttatacttagagtaaaaactgaattctctttttttgtattctactgcccagcaaatcttacttaaacattgatttaattatctactcatttgaaaaattaaatcccttctattattattctgctgcacaaaataaatatgtatgtttgtgcacatctatgtacacatatacatatatatacatacacacatacatatgtatgtatatagtcatctctttatgattttgtcctcwttgcacttagccaacttaattttccactgccttcaatatgaaacttccttttttaaaaaaaaaaaaaacactggtctccccactgtccagagaatacatcatgttcaactgtgctgttgcctgtgtttttttttttttttccttgagtggaatacctttatttttctctgcttatttaagttctacacagccttccaggcctaacctacttccaccagctc

SEQ ID NO: 625534 - DNA, 644 bp, Homo sapiens
atgaggcactctgccaggccctgcaatgcartggcaaataacactagaaccacttagaaagggagaacttgcaggctaagttctcctttattttgtgctaagatactattgaattctcttaaaaactcatttgtaggcctttagcatcacagcccacatggtatatgggagaaagactgcaaaagcagcatataagaggaaccaaatatctcaatatggaaaatcagaaagggttttccagaggtggaggcaagtaaactgggacctacatgattaggagtaggttttggcattcaacaacattgttcaattaccctacattttggtgctctctattaacaataattttttaacattttttggacaagaggcctcataaagaatctaataaaaggtttgtccattatatttagaaattattaaaatgataaactttatgttatttgtattttactacaaattaaaaatcctcctatccaagaaaaatatgtaaatgcacatagacacaaataatgtcaatgttgtgaaatatatttggttttctgctggagagaggagtcactactgacatctagagagtagagaacagaaatgctgttaaacatcttatacagaataagcctccacaacaaagaattctctga

SEQ ID NO: 625535 - DNA, 512 bp, Homo sapiens
catttgtaggcctttagcatcacagcccacatggtatatgggagaaagactgcaaaagcagcatataagaggaaccaaatatctcaatatggaaaatcagaaagggttttccagaggtggaggcaagtaaactgggacctacatgattaggagtaggttttggcattcaacaacattgttcaattaycctacattttggtgctctctattaacaataattttttaacattttttggacaagaggcctcataaagaatctaataaaaggtttgtccattatatttagaaattattaaaatgataaactttatgttatttgtattttactacaaattaaaaatcctcctatccaagaaaaatatgtaaatgcacatagacacaaataatgtcaatgttgtgaaatatatttggttttctgctggagagaggagtcactactgacatctagagagtagagaacagaaatgctgttaaacatcttatacagaataagcctccacaacaaagaattc

SEQ ID NO: 625536 - DNA, 552 bp, Homo sapiens
gacttcagggtctgtcttttgggaaaaactgacatataaataaaccttacttctgtgcaaaaaaaacaaacaaaaaaaaaaaaaacagacatttctttcaatcataaatggcaagtgttctacctttgaactatggatatatcaaccttaaatcaaaacaatttttgaaaagaaaaacacagtgatgagaaaaatcataatggttaaacatgtttatgtaaataattagctccttttattttgaaataggtacattgtctcctaacttctgattcgctcagtgccacattaataaaaggtcacaatgttttaaaatgctaagattttagcattatatcaggactagagatgaatttaaaaaactgagtttgcatatatgaagaaaaactttaggtttgatttggagaytctctgcctgaatttacagctctgaaaaatctgctatttctaatcagcgataaacctcctctcccttgactcatggaactttgttttcactgagtctagaggcgttagtatcagttgcaaaatgtcctggaagagggatttaga

SEQ ID NO: 625537 - DNA, 552 bp, Homo sapiens
gacttcagggtctgtcttttgggaaaaactgacatataaataaaccttacttctgtgcaaaaaaaacaaacaaaaaaaaaaaaaacagacatttctttcaatcataaatggcaagtgttctacctttgaactatggatatatcaaccttaaatcaaaacaatttttgaaaagaaaaacacagtgatgagaaaaatcataatggttaaacatgtttatgtaaataattagctccttttattttgaaataggtacattgtctcctaacttctgattcgctcagtgccacattaataaaaggtcacaatgttttaaaatgctaagattttagcattatatcaggactagagatgaatttaaaaaactgagtttgcatatatgaagaaaaactttaggtttgatttggagacyctctgcctgaatttacagctctgaaaaatctgctatttctaatcagcgataaacctcctctcccttgactcatggaactttgttttcactgagtctagaggcgttagtatcagttgcaaaatgtcctggaagagggatttaga

SEQ ID NO: 625538 - DNA, 550 bp, Homo sapiens
cagtatccctcttttaaagagtttcacgaacaggtgcaaaggcagctgtattttgttgtttttactcgcacctttagaagagggtactttcattttttccttcaccttgatatcattgcagattgctgtagtaagacctagttcttctatatgttccacctgcttccaattggtaggatgctgaggggaacaataagtcagcttatgtgtatccagtaataataactttctattatcttaaaagactgagggtattcattatggttaattactaattttatattcagacctatacattgtgtttctcttggctcttttcaaagcagtctcctaaattttcaaagtatgctcaaaattcttaacacttgaaattgctggagaccsagttaatgaattgtaatttaccttagggtgggtatccactcaattacatcttagttcttcctttctctgatgattccaccttataaatcctcacagcccagttgtgacctagcttgaccacaaagaaattctctgctgaagcttgcaatgaaataatttgaaatcc

SEQ ID NO: 625539 - DNA, 520 bp, Homo sapiens
gacatctcaaaaacttcgggatggaattcagagagctatgagtttgactcctactctacaaactccattttattaatctccctgtgcctcagtttcttcctttatatgtggaaaaataatatgaaatgttctctctctcttttttttttttgagagagctttccattgttttagccctggactcacctcttcataatttaaaccttggaacctccatttgtcctggagttagttatcatattagaccaagtaacagattcctagcttttcagctcaacaggtaaggtctaaatacaagactgaaaaagataaaagtagaattagttggaggataagttgtttcctggttcttctctagtacttccccycatatcctgcccatttgataaagaccatatgatctgaggagtgaaaagagaattggggagtaaggagtccagcaaggaagttggcctgtctcttcattctgtcatcttgctattttagagatacttggaggacttcttctgtcctctctgaa

SEQ ID NO: 625540 - DNA, 473 bp, Homo sapiens
tttctccattatatttctcattatctgatgactgaataggttacttatcactttccagtagaacataacctctatgaaggcagaaaaaaaaaaaagctttaatgttttgtttgctattgtctccccttggccttacttggtgtcttatgtaccataaacacccattaaataaataattgagttaggcattactaatagccgcattttagtagctgaattttagaggagaggaaacrgaattaattagttagatagtaagttaggtcagtaaggaaccttcctaaggtcttacaactagtctgttacagagctagctatgtcttgattctagaacccacattttttaccattttgcagacactactccatcaaggtgaggagcaggcatgacatttggaatcaggcagagctgagttcaaatgacgattttcctacttattttctgtatgatttaaaacaagtttcttaacctc

SEQ ID NO: 625541 - DNA, 562 bp, Homo sapiens
tttctccattatatttctcattatctgatgactgaataggttacttatcactttccagtagaacataacctctatgaaggcagaaaaaaaaaaaagctttaatgttttgtttgctattgtctccccttggccttacttggtgtcttatgtaccataaacacccattaaataaataattgagttaggcattactaatagccgcattttagtagctgaattttagaggagaggaaacggaattaattagttagatagtaagttaggtcagtaaggaaccttcctaaggtcttacaactagtctgttacagagctagctatgtcttgattctagaacccacattttttaccattttgcagacactactccatcaaggtgaggagcaggcatgacatttggaatcaggcagagctgagttcaaatgacgattttcctacttattttctgtatgatttaaaacaagtttcttaacctctacactttatttttcttagctaaaaatagaatagcaatwaaacctacttctttgggtttctgtgaagaccaagtcagctagagcttgtc

SEQ ID NO: 625542 - DNA, 537 bp, Homo sapiens
acaaacgctaatcttgaatacttcatttctttgacctaatgagtggcagattcataaaggcgttatcacaatttggcattattatagccaattaaagtgtatgctcttgtaaatatcatggttttggtttttgctttcttatatttaccggtgccagcatttctcaattgggatatgccaacaaatcaattattcaaaaggtatgaaaaagggttcattgtttcatatctagtggctgagtttaagatttggtaaatactgagccagaattttagtgtgtggttttattacatgacaatactcatttttaagttgagatctctttagcttgaccctaagtgtttttatgttttatatactttcctgaacagtttttcttctcaccctgtacaccctggtttatacctgctttcaccttcctggactgactattgaatctcaagcttacttttttgtaagattcaatagtgagcatttacttttttccttttacaacttctaaccatttgaayatcttttctgtcagtcctcctagta

SEQ ID NO: 625543 - DNA, 573 bp, Homo sapiens
ttattgggcaatgactctttctggctacttcctgctgaaaaggggcatcatgcagggaacaacagcagctggggctcctcttggggtcaatccaagggtcctcagaaaaaaggtgtgtccatgcatggttcagtctgcagcaccattttaagtttcattgcttctaggtaagaggaaacaatttgagttataatattgagtagacagggttcaaacattaatatagaacatatgagcaagagaggacttaataatggagctaatcagttccacaaaaaagactaaaattcattaaagrgcaattgtagccatccagggctggagcctgcattttttcttaacctgttaatgattttaacttgatctttaagcacttgtgggttttcttctacttgactacaggtgttgatctagaagcagcatgtttcatttaagactgaacaggcaccccctacctcggctgtaagaacatccagggctcatctattctgtgctactagtgaggctaaagagtctatggattagacttctatggatcctactgttgccttccatcctcaatacatcataatg

SEQ ID NO: 625544 - DNA, 479 bp, Homo sapiens
ttattacttttccctggggaaagccacagttgtgtcacagcatgggatagagaaaattctcatcaaaattctgctgtctttctggatagaagggctagagaaaggagctcagggtaatgagggctatagagacttagaggaggggatccaaaaagaagagatccagaaaaggcaaaccctacattctgtgtaaaaactatgycaagtcactggctaagctatgcatgtgtgaaacagtttgaaagcaacctgaactgagattgagctgcctcccaccgcaggtatgacagagcttaaaatttgagtctaactgagttaattggctgctaaaaaaaaaagcatcaacacttttaggaggaatataaaggaggtcagagtccctacaacataacatttgccatgtccaagaaacaacctaacattattctacatataaagggccaggaaaatgtgagccactctcaagagtaaagatggca

SEQ ID NO: 625545 - DNA, 579 bp, Homo sapiens
cttcagcccctaatcagggactactggtcctttaaccaaactctggagacacagatcatacaagcaccayttttacagacatattgcagttctcatggggtctttttgagctaaaatggcacctctttcaggaagaacacccattttatttttgttttctcattgtaatgttaactccttgcatacctttcaaactggcacactctcaccaagaaaaattgggaatgatggtggccacattggggagctttgatatggacaaactgttttttaaaagatgccttaaaacaaaagaaaacaaaattctgtttatagtctgctctgattaactggtgtgaagaggcttctaaatgcaaatcaaactaaaaaattgcttccctaaaatgttctttagtaaaacaaatgcaaaacataagaaactgtctccttaatcagcactttcagacaatacttaagattagcttctgatattgacatactcaatgtcctttccacattttcattgattattgaaagtctgaaattgtagatatgagatgtaagcaaaaactgactcagaggttgccccaatatatgaac

SEQ ID NO: 625546 - DNA, 555 bp, Homo sapiens
gcttttattacattgaagatatgtctcttgtatatcaattttgctgagagttttaatcataaagtaatgttgaactttgtcaaatgctttgagacgcatcattagattctttatttgcagtttttcttgttttttgatgtaagtactcatagctataaggttacctcagtattgtttttgctgtatatcataggttttggtatgttatgtttccattatcatttgtttcaagaattttttaaatttctttcttaatttgttcattgactccctggacattcaggaacatgattgtctgatttttatgtgatttattatgagtgtttcaaactcctctcattattgatttctagttttattccattatagacagagaggrtgcttgatattatttacattttttgaatgttttataccttgttttgtgacctaacatatggtctatcctttagaatgatccatatgccgaggcaaagaatgtgtattctgtagccattgtatgaaatattctgtgaatatgtgttagatccatttggtctatagtgcagattaaat

SEQ ID NO: 625547 - DNA, 483 bp, Homo sapiens
ccaaacacaagatcttattattattcattcttctaactatttttttggtacctgttaacaatccccacttcccctcaacctcccactacctttccccacctctggtaaacattcttctactatccatgtccatgarttcaattgttttgattttaacatcccacaaataaatgagaacatgcaatgtttgtctttctgttgcctggcttgtttcacttaacacaatgatctccagttccatccatgttgttgcaaatgacagacttttattcatttttactggctgaatagtacttcaatgtgtatatgtaccacatattctttatctggtcatctgttcatggatgcttaggttgtttccaaatcttggctatggtgaaaagagctgcaacaaacatggtagtgcagatatctctctgatatactgatttcctttcttttgggtatatactgagcagtggaattgctggatcatatggtagc

SEQ ID NO: 625548 - DNA, 620 bp, Homo sapiens
aggtcacacctcaaggaactagagaaacaagaacaaaccaaactcaaacccagcagaagaaaggaaataaccaagatcagagcagaactaaatgaaattgaaacaaacaaacaaaaaatacaaaagataaatgaaacaaaaagctagttctttgaaaagataaacaaaattggtagaccattagcaagattaaccaagaaaagagcagagaaaatccaaataacctcattaagaaacgaaatgggagatattacaattgacaccactgaaatacaaaagattattcaatgctaccatgaacatctttatgggcataaactagaaaatctagaagagatggataaattcctggaaaaatacaaccctcttagcttaaatcaggaagaattagataccctgaacagaccaataacaagcagtaagattgaaatggtaattaaaaaattaccaacaaaaaaaaaagcccagtactagacagattcagagcagaattctaccagacattcaaagaagaatkggtaccaaccctttggacactattccacaagatagagaaagagggaatcctccctgatttattctataaagttggcatcaccttaataccaaaaccaggaaaa

SEQ ID NO: 625549 - DNA, 620 bp, Homo sapiens
aggtcacacctcaaggaactagagaaacaagaacaaaccaaactcaaacccagcagaagaaaggaaataaccaagatcagagcagaactaaatgaaattgaaacaaacaaacaaaaaatacaaaagataaatgaaacaaaaagctagttctttgaaaagataaacaaaattggtagaccattagcaagattaaccaagaaaagagcagagaaaatccaaataacctcattaagaaacgaaatgggagatattacaattgacaccactgaaatacaaaagattattcaatgctaccatgaacatctttatgggcataaactagaaaatctagaagagatggataaattcctggaaaaatacaaccctcttagcttaaatcaggaagaattagataccctgaacagaccaataacaagcagtaagattgaaatggtaattaaaaaattaccaacaaaaaaaaaagcccagtactagacagattcagagcagaattctaccagacattcaaagaagaatgggtaccaaccctttkgacactattccacaagatagagaaagagggaatcctccctgatttattctataaagttggcatcaccttaataccaaaaccaggaaaa

SEQ ID NO: 625550 - DNA, 567 bp, Homo sapiens
caaacctggaaagatatattcttgattttttaattgatacacaataattgtacatatttatggggtgctatagtctttgctgttttgcagccttcattgttgataccttcaggtactgaaaaatcccaggtgactaggaactagagcagatcctcagcatactgcagcagccctacaaaaaacctggccagactgtttgttatgagggtcccgaatcccatatcttctcactgggaggatctttgtggcttgggtcttcacccaccccctgggactatcaagccggtagcatttctgtaattccctgsgacagaactcccagtgggagaggtgggttgccatctttgctgtcttgcagttcttgcccttgatgtttccaggctctggagagtctgcaggcccaagggcttgtctggacacccagaagagcacccacctcatggaaaagtggtcagactgttctccacacagtttccagtcctcaattctcctcactgggcagggctgcctgacctgggacgccaggaaaaccattctgcccctacatgaccacttcaatcagaaaca

SEQ ID NO: 625551 - DNA, 571 bp, Homo sapiens
ctttgcctgatagcatgattgtaaatttcttgaggcctcccgagccatgcttcctgtacagccrgaagaaccatgagccaattaaaacacttttctttataaattatagtctcaggtagttctttatagcaatatgagagcagactaatacaataccaatctacaaaatggaaaaattcctttatattattgcctctgattttaatagttacttggttctgcccttccccgacaaactatcttattggtaaccacatgtcatagaggtaacttttgttgccctggtttaatttttccttttacccatttagttttctttatataattttttatttaatttaaatttactcttaaatatctcttaactaggaaaaaaatgtattttcttcagcaaaaaccacatccttctgttttataactttaccaaaaacaactattatgctcctactattttaattcttagtaacccaaattcccagtgccaggaaatgaaactcaggttacttaatttaacataatatgactttaagattttaaaatattgcagagaattttgaaattaaatttacct

SEQ ID NO: 625552 - DNA, 571 bp, Homo sapiens
ctttgcctgatagcatgattgtaaatttcttgaggcctcccgagccatgcttcctgtacagccagaagaaccatgagccaattaaaacacttttctttataaattatagtctcaggtagttctttatagcaatatgagagcagactaatacaataccaatctacaaaatggaaaaattcctttatattattgcctctgattttaatagttacttggttctgcccttccccgacaaactatcttattggtaaccacatgtcatagaggtaacttttgttgccctggtttaatttttccttttacccatttagttttctttatataattttttatttaatttaaatttactcttaaatatctcttaactaggaaaaaaatrtattttcttcagcaaaaaccacatccttctgttttataactttaccaaaaacaactattatgctcctactattttaattcttagtaacccaaattcccagtgccaggaaatgaaactcaggttacttaatttaacataatatgactttaagattttaaaatattgcagagaattttgaaattaaatttacct

SEQ ID NO: 625553 - DNA, 452 bp, Homo sapiens
atggaattgcatctttcatttagctctcagcttgaatattactcatgtagagaaatgctacagatttctgtatgtttattttgtatgctgaaactttattcaacttgtttatcaggtctattagtctttcaggagtcttttggactttctagctatagactcatactgtcagcaaagagagattatttgacttcttcttttcctatttggatgccttttatttctttctcttgactaattgctctgctatcrtttccagtactctgttgaataggagtggtgaaagtggacatccttgtcttttttgcagttcttaaagaggattcttccaacttttgcctgttcagtattatgttgcctctgggtttgtcatagatagctcttcgtgttttgaggtatgttccttcagtgcctagtttgaatgcttttatcatgaagggatgctggatttt

SEQ ID NO: 625554 - DNA, 556 bp, Homo sapiens
ctgtaaccaccgcctcctgggttcaagcaattctcctgtctcagcctcccgagtagctgggactacagrtgggcgccaccacgtgtggctagtttttgtatttttagtagagatggggtttcaccatgttagccggctggtctcgaactcctgacctcaggtgatccacccgcgttggcctcccaaagtgctgggattacaggcatgagccaacacgcccagctaatattcattttctaagaccatttctccccagttgatgtctatctgcagataagacaaaaatcaaagatccaagtatattttaattaacattttcttctgaaatctgagctaccttccaatatctagaaaagaaatgctttttttgacaagccaaataaagttattctgatatcaaaggtgagtaggaatgagaataaaagcacaaaggtcatcctttccagggtccataaactcaaaagcctaaattaattcacttcagcagatttttcaattaaacaagaatcattaagtcaatcttttgattaatggctacttgactaaaattaaaatg

SEQ ID NO: 625555 - DNA, 373 bp, Homo sapiens
gcctcccaaagtgctgggattactgacgtgagccactgcacccagccatgagatgcattttgaacragatgatcttcggggtctaacaaagcgctgacttcttatcatcttatatgaaattccagaaacagtgagactattttctttttcaataggaggaaactgaaatccaggcagtatgtgatatatttagggctcttgtggttctgaaactgcttccttggtttagaagcattagggagggtgatgtgtgaccgggcttcctctcaaaatggtatagttgggtctgatcatgtaacaatgccgcagaaacaccatgagagggtagccctgtgggccctggagtctgtgctgcctgcttgggtgacaggag

SEQ ID NO: 625556 - DNA, 549 bp, Homo sapiens
gcagtttatcacatactgttcttatggtagtgaataagtctcacaaaatccgatggtttcagaagtagaaactcccctgcacaagctctcttgcctgccaccatgtaagacgtgactttgctcctcattcaccttccaccattattgtgaggcctccccagccatgtggaactatgccattaaacctcttttataaattatccagtcttggktgtgtctttattagcagtgtaacagcagactaatacagatggcatatgtaaaatatcttaaaagatggatggaaacattatatgatatttggagtataaaattatataagtacttactgcaaagactatataattaagaataaatgattaattttctgaaaattgaattatataattagcatatgatgaaataaaacagagaaaacattaacataagatgacatacaacagagaaaacataaagctaaaattggattcttgtgcagccagaattgattacattcatattaagtcctcttcatctgtcttaataatgtatcacaaagagcaaaaaaaa

SEQ ID NO: 625557 - DNA, 537 bp, Homo sapiens
tattaaccaacacaagacggacaagatagataggaagagacttaaagaaaaagcaagagtgtagaagaataataaagaaatgactttggaaagcaagtgaaattacataatcccatttccttacactgagatagacaccatttataaaaagacatcttcaatgaattcaatattatcagttgatataccaattttagttaagaycaggcatggtggcttacacctgaaatcccagaacttagaggtagaggcaggagcataacttgagcgcaggagttggagacctgcctggacaacatagcaagaccccattccctacaaaaagaaataaaatagacaatcacctcccaaaaaattttagttaagtacaaaatatgattaaaaaatattcaaagaagcattctgggataatgggtttgaataaatgagatatttgttaaagcaattgttgatcaactcccagaagtaagaggaaagattattatacaggaagggagtgatagtatgtgtcagggataggaactacagagagaagat

SEQ ID NO: 625558 - DNA, 537 bp, Homo sapiens
tattaaccaacacaagacggacaagatagataggaagagacttaaagaaaaagcaagagtgtagaagaataataaagaaatgactttggaaagcaagtgaaattacataatcccatttccttacactgagatagacaccatttataaaaagacatcttcaatgaattcaatattatcagttgatataccaattttagttaagaccaggcatggtggcttacamctgaaatcccagaacttagaggtagaggcaggagcataacttgagcgcaggagttggagacctgcctggacaacatagcaagaccccattccctacaaaaagaaataaaatagacaatcacctcccaaaaaattttagttaagtacaaaatatgattaaaaaatattcaaagaagcattctgggataatgggtttgaataaatgagatatttgttaaagcaattgttgatcaactcccagaagtaagaggaaagattattatacaggaagggagtgatagtatgtgtcagggataggaactacagagagaagat

SEQ ID NO: 625559 - DNA, 537 bp, Homo sapiens
tattaaccaacacaagacggacaagatagataggaagagacttaaagaaaaagcaagagtgtagaagaataataaagaaatgactttggaaagcaagtgaaattacataatcccatttccttacactgagatagacaccatttataaaaagacatcttcaatgaattcaatattatcagttgatataccaattttagttaagaccaggcatggtggcttacacctgaaatcccagaacttagaggtagaggcaggagcataacttgagcgcaggagttggagacctgcctggacaacatagcaagaccccattccctacaaaaagaaataaaatagacaatcacctcccaaaaaattttagttaagtacaaaatatgattaaaaaatattcaaagaagcattctgggataatgggtttgaataaatgagatatttgttaaagcaattgttgatcaactcccagaagtaagaggaaagattattatacaggaagggagtgatagtatgtgtcagrgataggaactacagagagaagat

SEQ ID NO: 625560 - DNA, 576 bp, Homo sapiens
gactaaaaatgtcacatattgtataattccatttatatgaaatatccagaataggtaagttcatagagacataagctaactagtgatgccaggtactgagagaaggtaggtataggaaatgattacttaatgagtgaggggttttattttgaaatgataataatattttggaacttgttatagatatagggggtggttgcacaattttgttaatactactgaattttaaatttcaaaagctaattttatgttgtataaattttacctcaatttttaaaatgcatttgttattctcttagaattraataattcttgttgaataatttacatcataagaaaatattcaaatgaggatttcaccaggagacttgaaaaaaaattgtagtttctgtttctcgccctcccactgacacatttgacctaataatgaccaaagttttcaaagttttttaatgggaatgtttgctgtattatttagtgaagctgtatacttctaaaggcttacaagtaaaaacaattctcacaggtccatacctgtcacactaccattaaggtctttcctggatccctggtact

SEQ ID NO: 625561 - DNA, 597 bp, Homo sapiens
aagaaaaaataacagatatctaaattagsaaaaatatactagacttttaaactttctgaagaaagaaatctaaatgtcacttttgacatatgaaatataaatacaaatataaagctgatatttcaaaatgtacagaataaacttttgtaaatatagaaaatgttaaataagttattaaattattttattattaatttgccaaattattaataataattggatggttaggaatatatatttacatattagtatccaatattatgttgtatgtttttctataaaacagagtttttacacagtaaggagcagccatctatccttttactgttgatatagcagagaataagggtgacacaatctgtaattccatgtaactttcgcttcagtgttgggggaaaataaattataaagtaaactcgtaaacaaaaacacatacctcaaactggatagacaaagaaagtctctaagaaaatggtattttgctgagacctaaattgcaaggagatttggtcatgggaaagttgaaggaagagtattccatgaagagagaagaaaggaatttcacatgaatgaaaaatggtgtcagggaaccgacaa

SEQ ID NO: 625562 - DNA, 569 bp, Homo sapiens
  misc_feature 488: n = A,T,C or G
tcagcatttccagagacatttgaaacccctgaaatctcacgtattctactcttacaaaaagtcgaggaataaatgaagaacttaagaatatcactgaatccatctcatttccacaaactattgaataaaaataaattcaccagctgttgcagccatccttgtttttcaggaaaggtttagtgttatctgttggaaagacaataatctaaaatgtgaacaaagaagaaatgttaatcttctttgtaattcattgataatttatgagtgtgagagatgtcagcaatttaccaattttaattatgtcacwgcactcacttatagaaagcatttgtgacactgaattgcccatttccttggaaaaaaatccactcaattataccatgccttctctcacaggataaattttaaatgtttcttagtttgcatatttagaaattatatttcataattgctaaaggcatagattttaaatgttcttaccacaaaantaataagtatgagaggcgatggatatgcttattagctaaattttatcattatacaatataacatataccaataaatcacac

SEQ ID NO: 625563 - DNA, 448 bp, Homo sapiens
gcccttaaacttatggctggatgataagagacgtatgttaaaaaagcctctctggctgcaaaacagggaaaagattgaaaagaagtaaggctagaagtgacaggatggtaatgaaagccattacagtggagatggagagaggccaacagattataaatatattaatgagtttgaatttacaggacatgaagatttgttttaaattcagcaaaygcctattgagagcttaaaatctgtcaaaaattgtgccaagtgtccagggaaatgtaatgagggagagggagatatggtcttgtgtcttatagagctcccagtccattgagaaggacaaatacataatagtaaagaaacagctatatgagcagttttatattgcgcatcatggaggacaacacaacttgcatttgtggtttgtttaattgtatatgttaggaaggataattccaat

SEQ ID NO: 625564 - DNA, 521 bp, Homo sapiens
aaattcacagtgaaggttcagcagaagcttttgcagatctcaataagcgctttaaaatgtttgaaaacataaaccacaactctgcaaggtttttattgatatgcaggggtattcctggtacattatctgcttacaagcagacatataatgaagaaaagaaataaaccaagcaaaccaccatggacgtattccataaaagagtgatagcttctcaagaagagcctcaggcaggcccttcaggagacattcaagaagaaggcattgttatcataagagatgacagctccacatgtgttagtgcccctatagacctaccagtggtacaagatgtggatgtagaagacagtgacagtgctgaagctgaccctgtgtrggcctagtctaatgtgtgtgtatcttagtttttatccaaatgtttagaaagtaaaagaaaaaaagttttaaaaatagcaaaatatagaactagtatgtgaagaaagaaaatattttttgtacgtgtacaatgtgtgtgtgccttaagc

SEQ ID NO: 625565 - DNA, 559 bp, Homo sapiens
gatagcttctcaagaagagcctcaggcaggcccttcaggagacattcaagaagaaggcattgttatcataagagatgacagctccacatgtgttagtgcccctatagacctaccagtggtacaagatgtggatgtagaagacagtgacagtgctgaagctgaccctgtgtaggcctagtctaatgtgtgtrtatcttagtttttatccaaatgtttagaaagtaaaagaaaaaaagttttaaaaatagcaaaatatagaactagtatgtgaagaaagaaaatattttttgtacgtgtacaatgtgtgtgtgccttaagctaagagttactccaaagagtcaaatagttaacaaaagtaaaaaaagttatagtaagctaaggttaatttattattgaagaaagaactaaagaactttaaaaaatcaatatagtgtagcctaggtttccagtcttcataaggtttacagtattgtacagtaatgttctagatcctcacattcactcactgactcacccagagtaacttccagtcttacacgctccattcatggtaaataca

SEQ ID NO: 625566 - DNA, 616 bp, Homo sapiens
ttctattattattacactgtattaatgaaatgatggtaaaactcacaataatgtagaaatcagtgggagctctgagcctgttttcctacaactagatggtcctctctgggggtgatgggagacagtgacagatcaccaggccttacattctcataaggagtgtgcmacctaatatagattcctcgcatgcccagaccacaatagggttcgtgcttctaggagactctaatgccaccactgatctgacagggggtggagctcaggtggtaatgtgagccaagaggagtggctgtaaatacagataacacttcgctcactcacttgccagtcacctacttgtgtgtggcctggttcctaatgggccatggactggcactggttcaggagctttgctaaatttttctgcatttaaaatatattttattgagatatttctggaacttttgggtgcctagatttgtgatgttatacagtggtgctcattttaggaatatttattaaatgcttttggtgtgctgggcactgtgctaagcactagaaatacaatggcagataaaagaatctagtggcctcctgcactttatgattcatacattatagctacaaaacaaacaat

SEQ ID NO: 625567 - DNA, 465 bp, Homo sapiens
agaatttgcaggcagattctcagcctaggggtcccgtggacctacagccttgctctggagccttcagcctccctggatggcaagcccaagttcccatagaaatgcccagttgtagttgtaaagcagacttcatgagtagtttttccacctatgtcagcattctccccacgttattatgaactacgctatgtcagaacaccaactctcagctctgggaagacaagtgagatgtcaggatttctgggcaagagcaccctagctacccctctataaaaagaaaatgtttttctactttgttttcaccgctagacatgcagtaggttcatctgcaacatgaacagcttgtgtaacttcctgctcrttttcctgtgtagcgtaatagttgagttctctctttaatgacctcattaaattaacaagtttgggttgactctcagcttctttctatcccttatacagtagtcc

SEQ ID NO: 625568 - DNA, 657 bp, Homo sapiens
cccactgaactgctgcttacttctcccctgtccaccccgatggggactcagttgccaggacctgtacctatgtgctgaaccctccttccccatctcatttcaccaactaccatgaattcctgcagatcctgcatcttaaatatcactgagaatagaatgaccccataatttactatcaaatagggacactttagaagtgaaagtaattgtgaattatgtaagacaacaagcagacagcaggcccgacctagcaatggtggggcaaaagtggccctctcttctttcttacctccrtggcttatttcaggtcctcatccttcaccccctgaatgactgacaggcctttcacttctctctctgcctttgcactcagcaacatcctccagtagataattgctaaaatgcaaatcaaatcatgttactgcttagccaataaaataaccaccacaaaatcaagaagtggaagacacactaaaacttaatgtgagagattctctgttgcctttcagcatgaggagagccaagtcctttaccaatgcacccagttcctccccagcccctcccttccaaccctaacctcccgtcctaagggactgagctcaatttctccatgattcaaggctgcatcttgtttctctgaacatcagtgatatttgc

SEQ ID NO: 625569 - DNA, 576 bp, Homo sapiens
ttcttttttaacttgatccttatttccttctccaactcaagtgtagttgtcaggggagctactgcagtgtgtaaaatagagaggagcactgcaaatgtggaaacaaactccttgccctttggcaactccatccttttccttccgtctttctttttctcctgccaagctattgtggagcctcacratgccacagaccctgatttccaggatatggctgctctggaaaatggcttcaccttttctacttaacatgcccaaacctcagtttccccatctgtaacatggtggtgatggtagttatctaacagagttcttgtgagaattaagtgaggtagcagcagtaatgagtccgctctgagccggctcaagggaacacacgcactgtgccgggtgctctcctcaaggatgcatgaactccacctagaaacctctcccctttctgtagctgatagcatccattttcagtatcaattttgggagaggaaaagactttccctctaccctctgaggtttggtaactcggtctatgaaataaacaaacagcatggagattaacaggagaagacagctacactt

SEQ ID NO: 625570 - DNA, 594 bp, Homo sapiens
cacaacttcattaacgttttcttttaattatttatttttttcttattttgggattattccatttttcttgtgttaacttttttaaataacaatatatacacttaaagctactggtattcccctaagtatggctctagctctactccatggcttttgataggcaatacttatattactacaaaatkctaaatctttggtaatattcataataacttatttggacccataaaatttttaaaggagtctttttagtttgctatgttttgttgttgttttgatgtttgtttagggcttttttgccttctacctattgatatctaattttattccattgtggtcagaaaatatggtctatatgataatgatgcattggtatttgcagagagttctatcattatacattttccaagtggtcgaaaatcgtgactgtttcctggtttgatgcagcactctctctgtatagctattagattaaacttattcagttaatttagctcaacaattatgacagaggtccatgaggatctcccagcgtattacaggtttatcaatccctgtgcgaatttggccaaatttgatcagattccattttac

SEQ ID NO: 625571 - DNA, 534 bp, Homo sapiens
atcaatttatattgtctttttttttttttttcctgaagaggggtcttgctctgttgcccaaactgaagtgcagtggtgcaatcacagcttactgtaactttgaactcctgggctsaagtgatcctcctacctcagcctcccaaagcactgggattgcaagtgtgagccactatgccaggcctatttttgataatgaaaattagagaaagtagattccagtgcatacttattaaatgtcattactaacagaatgaaaatagtagatgtgagttccaaatcacaagggaaaagtcagtttaaaaaagtaacctcaatataaaaggtgtattaaaaatgaccataaaacaaaatagcagaaataaaattaagcatataaatcatgttaataaaatgatcaggatgaactcttattttgaatcacagactcacatttggttaagagtaaaatctaaatactgcgttagtgtacccagttaatccaaaaatattaaaaataaggcaatgggcaatgatatagtgaatgaatcccaacaa

SEQ ID NO: 625572 - DNA, 534 bp, Homo sapiens
atcaatttatattgtctttttttttttttttcctgaagaggggtcttgctctgttgcccaaactgaagtgcagtggtgcaatcacagcttactgtaactttgaactcctgggctgaagtgatcctcctacctcagcctcccaaagcactgggattgcaagtgtgagccactatgccaggcctatttttgataatgaaaattagagaaagtagattccagtgcatacttattaaatgtcattactaacagaatgaaaatagtagatgtgagttccaaatcacaagggaaaagtcagkttaaaaaagtaacctcaatataaaaggtgtattaaaaatgaccataaaacaaaatagcagaaataaaattaagcatataaatcatgttaataaaatgatcaggatgaactcttattttgaatcacagactcacatttggttaagagtaaaatctaaatactgcgttagtgtacccagttaatccaaaaatattaaaaataaggcaatgggcaatgatatagtgaatgaatcccaacaa

SEQ ID NO: 625573 - DNA, 330 bp, Homo sapiens
tacagaaagaaaaagaattgtcagtcaagaaccttacaaccaggaaaacaytttcacaaatgaaggctaagtaaagaaaatcctaaattaataaaaaatgagattattcaatgttagaaggtcttccttgagagaaatcctaaaggaatctctcaggctaacagcagataacttcaggaagtatttcaaatccacacaataaaacaaacactgccagtaaaggtaattatgtagataattataaaaggcagtataactgcagatttttctcctttcttctctaagtatattttttaaaaaacaattacataaaaaaggtatataattgta

SEQ ID NO: 625574 - DNA, 613 bp, Homo sapiens
ttgtcctgatttgtaccaatcaataaaactggaattgtaagtgcagaggttggtgagtcattctaatgaattatttattcaacttgaagccctgagtgggagcctctatcttggtagccagtgattggaagtgtgggtgcactgggaatgcagctggcatcctgcagggccctaagtctgtggcatctgtgctaacatcaggtggttactgtcaagactttcttcactcagtcaggtctgtgcttcaggtgcactgctctgtggagtggggagggggcctggagtgcatttctgctcatggggctcatgatttgaactcaggcctaatatgttaatgagcagacacctggccaagccctgggggcctcaaaaaaccaagacaggggaagcatcaagaatgtgatgagagagtacgcggccatgggagtgtcacctttgcctyctcttctccctgtggctggaaaggctggcctgtctggctgcccaaggatagacggggagaggtttaattgaatcacctactgtgttgggtaaagtaaactgtcgtcattgcaaatataatcaggactgtattttaacagtagaaaatgtgattataatgacatatttatca

SEQ ID NO: 625575 - DNA, 613 bp, Homo sapiens
ttgtcctgatttgtaccaatcaataaaactggaattgtaagtgcagaggttggtgagtcattctaatgaattatttattcaacttgaagccctgagtgggagcctctatcttggtagccagtgattggaagtgtgggtgcactgggaatgcagctggcatcctgcagggccctaagtctgtggcatctgtgctaacatcaggtggttactgtcaagactttcttcactcagtcaggtctgtgcttcaggtgcactgctctgtggagtggggagggggcctggagtgcatttctgctcatggggctcatgatttgaactcaggcctaatatgttaatgagcagacacctggccaagccctgggggcctcaaaaaaccaagacaggggaagcatcaagaatgtgatgagagagtacgcggccatgggagtgtcacctttgccttctcttctccctgtggctggaaaggctggcctgtctggctgcccaaggatagayggggagaggtttaattgaatcacctactgtgttgggtaaagtaaactgtcgtcattgcaaatataatcaggactgtattttaacagtagaaaatgtgattataatgacatatttatca

SEQ ID NO: 625576 - DNA, 613 bp, Homo sapiens
ttgtcctgatttgtaccaatcaataaaactggaattgtaagtgcagaggttggtgagtcattctaatgaattatttattcaacttgaagccctgagtgggagcctctatcttggtagccagtgattggaagtgtgggtgcactgggaatgcagctggcatcctgcagggccctaagtctgtggcatctgtgctaacatcaggtggttactgtcaagactttcttcactcagtcaggtctgtgcttcaggtgcactgctctgtggagtggggagggggcctggagtgcatttctgctcatggggctcatgatttgaactcaggcctaatatgttaatgagcagacacctggccaagccctgggggcctcaaaaaaccaagacaggggaagcatcaagaatgtgatgagagagtacgcggccatgggagtgtcacctttgccttctcttctccctgtggctggaaaggctggcctgtctggctgcccaaggatagacggggagaggtttaattgaatcacctactgtgttgggtaaagtaaactgtcgtcattgcaaatataatcaggactgtattttaacagtagaaaatgygattataatgacatatttatca

SEQ ID NO: 625577 - DNA, 452 bp, Homo sapiens
tgaattgttggaactgggattaatcagaatatggcagattagcatccaagatggaattgctttattctcattcaaggtttccctcattcttcactctccccatgctggtcaccttgctgtttgttcctcaaacacatatgaaatgcgtttctgtcttggcagtcatcctgctacctgtaatgtcagcactgctttctgttgtcccttcagtcaggtcactgttcaaatagctctctagacaggctcttccttatcattctacttaaaatagcccccaatcactctgtgtccctttagcctgcttcctcttcctgctatttcatactacctgaaaaaatacttgaacttcctagaacataagctcataaaagcaagaactgtgctccacctctcctctcctctaccccagcactcagaagagmaacagagtcagcatccagtgagtgttcatg

SEQ ID NO: 625578 - DNA, 558 bp, Homo sapiens
ccagtgtagtgcaccagcataccatctgtggatctgtgggatgttcagaagatcaaggtctctgtagaccacactataacagaaagctggaaaacgaacatgatctgggagaagacactgactttgtacttctatccttgccaggtgaaagcaaacttctgctggttcttaccgatayagatggggagaaaacacaagctgagtcaatagctacatattaagtgctgagagtggttaagttgttctatgttgcatttagaaaagcagctaaaattggagttactgcctgattaaatttacgacgacatacagtcattctccaagattcagcaacttcctgcacaggctaaagagctaaagaggtgagccaagtgggcagaaatgtgacaggcctccctgtccctgcatctttcatgtctttaatcatggcatcgatccctgtaattcccctagaaatacagaaatgcaggtttactatttgcgtagggaaagaaaatcccaggctcctgggcctgttcaaccatttctttgacctcatctctccttgcttgattttat

SEQ ID NO: 625579 - DNA, 558 bp, Homo sapiens
ccagtgtagtgcaccagcataccatctgtggatctgtgggatgttcagaagatcaaggtctctgtagaccacactataacagaaagctggaaaacgaacatgatctgggagaagacactgactttgtacttctatccttgccaggtgaaagcaaacttctgctggttcttaccgatatagatggggagaaaacacaagctgagtcaatagctacatattaagtgctgagagtggttaagttgttctatgttgcatttagaaaagcagctaaaattggagttactgcctgattaaatttacgacgacatacagtcattctccaagattcagcaacttcctgcacaggctaaagagctaaagaggtgagccaagtgggcagaaatgtgacaggcctccctgtccctgcatctttcatgtctttaatcatggcatcgatccctgtaattcccctagaaatacagwaatgcaggtttactatttgcgtagggaaagaaaatcccaggctcctgggcctgttcaaccatttctttgacctcatctctccttgcttgattttat

SEQ ID NO: 625580 - DNA, 453 bp, Homo sapiens
gagtcctaaaaatatagctccatcttttcagagtcttccatcatcctatgttgttgacaagactgagaatggtctctgtctctcctttcctttgtaggcaacctttctcttcctgctcccacccatggaacattttagaatcttcttttttttttttttttttttttttttggtgttttgaaattttgcagtacctgtctaggtgtggagcagttccccgggcttccttttaatctgtagctctggaatactcttgctattgatgattctatgtgtcgactattttgctcacaccccacccagatgcattctctactgkggttctctgctcttccctgtgccaggggaagctgatggctcctttgctggcagggctccagttgggtttggtcaatgggagggactgacaggagactggaagtggaaggagagagaggttggtagaattctttt

SEQ ID NO: 625581 - DNA, 453 bp, Homo sapiens
gagtcctaaaaatatagctccatcttttcagagtcttccatcatcctatgttgttgacaagactgagaatggtctctgtctctcctttcctttgtaggcaacctttctcttcctgctcccacccatggaacattttagaatcttcttttttttttttttttttttttttttggtgttttgaaattttgcagtacctgtctaggtgtggagcagttccccgggcttccttttaatctgtagctctggaatactcttgctattgatgattctatgtgtcgactattttgctcacaccccacccagatgcattctctactgtggktctctgctcttccctgtgccaggggaagctgatggctcctttgctggcagggctccagttgggtttggtcaatgggagggactgacaggagactggaagtggaaggagagagaggttggtagaattctttt

SEQ ID NO: 625582 - DNA, 577 bp, Homo sapiens
atcgagctgggctggcaacaaggactctgaatatctacaagctccaggtgatgctggggcacagaacacactcaacgaggcttctacccactaccccaattcttagcaccaaacactttccccagaggcctagcctggccctccrtcctcaagcatgtctgcacctgaaatcatctttgtccccagcatcttggcaccatcgagactaataatgagaagcaactccaggcacttgcgtgggatccagggggggcctgaggcccccaattctttgggaagcttgaacaatgacatctttctggggtgatgggaagacaaaagtgactccatcttggatgctaattttcccatgttgacttctgattagccccagtcccatgaatgcctcctgactcctactttatttactgtcccgagtgtaagaatatgtactcctgcttttagatcaaagcaagcttgatgttatcatgcaaattctgggctatgatgcacatggcgttcttgcctgctctggcacactacctttcactgtcttgctggagcatgtatatccttttcccttggtatataagccttg

SEQ ID NO: 625583 - DNA, 577 bp, Homo sapiens
atcgagctgggctggcaacaaggactctgaatatctacaagctccaggtgatgctggggcacagaacacactcaacgaggcttctacccactaccccaattcttagcaccaaacactttccccagaggcctagcctggccctccatcctcaagcatgtctgcacctgaaatcatctttgtccccagcatcttggcaccatcgagactaataatgagaagcaactccaggcacttgcgtgggatccagggggggcctgaggcccccaattcyttgggaagcttgaacaatgacatctttctggggtgatgggaagacaaaagtgactccatcttggatgctaattttcccatgttgacttctgattagccccagtcccatgaatgcctcctgactcctactttatttactgtcccgagtgtaagaatatgtactcctgcttttagatcaaagcaagcttgatgttatcatgcaaattctgggctatgatgcacatggcgttcttgcctgctctggcacactacctttcactgtcttgctggagcatgtatatccttttcccttggtatataagccttg

SEQ ID NO: 625584 - DNA, 577 bp, Homo sapiens
atcgagctgggctggcaacaaggactctgaatatctacaagctccaggtgatgctggggcacagaacacactcaacgaggcttctacccactaccccaattcttagcaccaaacactttccccagaggcctagcctggccctccatcctcaagcatgtctgcacctgaaatcatctttgtccccagcatcttggcaccatcgagactaataatgagaagcaactccaggcacttgcgtgggatccagggggggcctgaggcccccaattctttgggaagcttgaacaatgacatctttctggggtgatgggaagacaaaagtgactccatcttggatgctaatttkcccatgttgacttctgattagccccagtcccatgaatgcctcctgactcctactttatttactgtcccgagtgtaagaatatgtactcctgcttttagatcaaagcaagcttgatgttatcatgcaaattctgggctatgatgcacatggcgttcttgcctgctctggcacactacctttcactgtcttgctggagcatgtatatccttttcccttggtatataagccttg

SEQ ID NO: 625585 - DNA, 545 bp, Homo sapiens
acactcctctcctgtcttccaacgagtggtcatttttgtccgcaacttgatcacagcaatccctggggccctagctctactctcaataaagagttatggctgtgtgttttgaatgacaccttaggacccatcctgcctccacctccttctccataaaatagaaacctaacttgyccctccaagctctgaaatgctgaaacttaccaactcccttttctccccgctatttcttccttccatggcagggactttcagattttctttcttttactaacaaggcactaaacatgattttctcatacaaaatcgagagccataaagtggcttaccacagtcctatttcaataaagatgaatactcgacatctggcaagtagtgtgtgcctgacagtgtccccactgtgctatgctcatttaaccctcagaaacaatctcatgttacagattttacagaagttgttgggacagagaaggtaagtaaacccccccaaggtcacatgactgctaagggtggggccatagtttgatcccaggtagtctgaattc

SEQ ID NO: 625586 - DNA, 545 bp, Homo sapiens
acactcctctcctgtcttccaacgagtggtcatttttgtccgcaacttgatcacagcaatccctggggccctagctctactctcaataaagagttatggctgtgtgttttgaatgacaccttaggacccatcctgcctccacctccttctccataaaatagaaacctaacttgtccctccaagctctgaaatgctgaaacttaccaactcccttttctccccgctatttcttccttccrtggcagggactttcagattttctttcttttactaacaaggcactaaacatgattttctcatacaaaatcgagagccataaagtggcttaccacagtcctatttcaataaagatgaatactcgacatctggcaagtagtgtgtgcctgacagtgtccccactgtgctatgctcatttaaccctcagaaacaatctcatgttacagattttacagaagttgttgggacagagaaggtaagtaaacccccccaaggtcacatgactgctaagggtggggccatagtttgatcccaggtagtctgaattc

SEQ ID NO: 625587 - DNA, 545 bp, Homo sapiens
acactcctctcctgtcttccaacgagtggtcatttttgtccgcaacttgatcacagcaatccctggggccctagctctactctcaataaagagttatggctgtgtgttttgaatgacaccttaggacccatcctgcctccacctccttctccataaaatagaaacctaacttgtccctccaagctctgaaatgctgaaacttaccaactcccttttctccccgctatttcttccttccatggcagggactttcagattttctttcttttactaacaaggcactaarcatgattttctcatacaaaatcgagagccataaagtggcttaccacagtcctatttcaataaagatgaatactcgacatctggcaagtagtgtgtgcctgacagtgtccccactgtgctatgctcatttaaccctcagaaacaatctcatgttacagattttacagaagttgttgggacagagaaggtaagtaaacccccccaaggtcacatgactgctaagggtggggccatagtttgatcccaggtagtctgaattc

SEQ ID NO: 625588 - DNA, 545 bp, Homo sapiens
acactcctctcctgtcttccaacgagtggtcatttttgtccgcaacttgatcacagcaatccctggggccctagctctactctcaataaagagttatggctgtgtgttttgaatgacaccttaggacccatcctgcctccacctccttctccataaaatagaaacctaacttgtccctccaagctctgaaatgctgaaacttaccaactcccttttctccccgctatttcttccttccatggcagggactttcagattttctttcttttactaacaaggcactaaacatgattttctcatacaaaatcgagagccataaagtggcttaccacagtcctakttcaataaagatgaatactcgacatctggcaagtagtgtgtgcctgacagtgtccccactgtgctatgctcatttaaccctcagaaacaatctcatgttacagattttacagaagttgttgggacagagaaggtaagtaaacccccccaaggtcacatgactgctaagggtggggccatagtttgatcccaggtagtctgaattc

SEQ ID NO: 625589 - DNA, 599 bp, Homo sapiens
ctaaataggaagaaatctaataatataattaaaaatgggtaaaatatctgaatagacgcttctcaaaagaggtcatacaaatgamacataggcatatgaaaaggtgctcaacatcattgactgtcagagatatgcaaatcaaaactacaatgggatctcatgtcaacccggttaaagtggcttttatccaagaaaggcaataacaaatgttggtgaggatgtggagaaaagtgaacccttatacactgttggtgggaatgtaaattaatacagccactaggatgaacaatatggaggttccccaaacaactgaaaatagaactaccctatgatccagcaatcctactggtaggtaaatacccaaaagaaaggaaattagtatatcaaagagatagctgcacttccatgtttattgcaacactattcacaatagccaagatttgaaatcactctaattgttcaccaatagacaaatggataaagaaactgtggtacatatatacgatggagtacgattcagccataaaaaagaataagatcctgtcatttacaacaacatggatggaattagaggacataatgttaaatgaaataaaaaa

SEQ ID NO: 625590 - DNA, 599 bp, Homo sapiens
ctaaataggaagaaatctaataatataattaaaaatgggtaaaatatctgaatagacgcttctcaaaagaggtcatacaaatgaaacataggcatatgaaaaggtgctcaacatcattgaytgtcagagatatgcaaatcaaaactacaatgggatctcatgtcaacccggttaaagtggcttttatccaagaaaggcaataacaaatgttggtgaggatgtggagaaaagtgaacccttatacactgttggtgggaatgtaaattaatacagccactaggatgaacaatatggaggttccccaaacaactgaaaatagaactaccctatgatccagcaatcctactggtaggtaaatacccaaaagaaaggaaattagtatatcaaagagatagctgcacttccatgtttattgcaacactattcacaatagccaagatttgaaatcactctaattgttcaccaatagacaaatggataaagaaactgtggtacatatatacgatggagtacgattcagccataaaaaagaataagatcctgtcatttacaacaacatggatggaattagaggacataatgttaaatgaaataaaaaa

SEQ ID NO: 625591 - DNA, 599 bp, Homo sapiens
ctaaataggaagaaatctaataatataattaaaaatgggtaaaatatctgaatagacgcttctcaaaagaggtcatacaaatgaaacataggcatatgaaaaggtgctcaacatcattgactgtcagagatatgcaaatcaaaactacaatgggatctcatgtcaacccggttaaagtggcttttatccaagaaaggcaataacaaatgttggtgaggatgtggagaaaagtgaacccttatacactgttggtgggaatgtaaattaatacagccactaggatgaacartatggaggttccccaaacaactgaaaatagaactaccctatgatccagcaatcctactggtaggtaaatacccaaaagaaaggaaattagtatatcaaagagatagctgcacttccatgtttattgcaacactattcacaatagccaagatttgaaatcactctaattgttcaccaatagacaaatggataaagaaactgtggtacatatatacgatggagtacgattcagccataaaaaagaataagatcctgtcatttacaacaacatggatggaattagaggacataatgttaaatgaaataaaaaa

SEQ ID NO: 625592 - DNA, 599 bp, Homo sapiens
ctaaataggaagaaatctaataatataattaaaaatgggtaaaatatctgaatagacgcttctcaaaagaggtcatacaaatgaaacataggcatatgaaaaggtgctcaacatcattgactgtcagagatatgcaaatcaaaactacaatgggatctcatgtcaacccggttaaagtggcttttatccaagaaaggcaataacaaatgttggtgaggatgtggagaaaagtgaacccttatacactgttggtgggaatgtaaattaatacagccactaggatgaacaatatggaggttccccaaacaactgaaaatagaactaccctatgatccagcaatcctactggtaggtaaatacccaaaagaaaggaaattagtatatcaaagagayagctgcacttccatgtttattgcaacactattcacaatagccaagatttgaaatcactctaattgttcaccaatagacaaatggataaagaaactgtggtacatatatacgatggagtacgattcagccataaaaaagaataagatcctgtcatttacaacaacatggatggaattagaggacataatgttaaatgaaataaaaaa

SEQ ID NO: 625593 - DNA, 581 bp, Homo sapiens
agccaccccagcttcaaggaaaggggacacagacccaatctgtcaatgagaagagtgtcaacgaatctgggggctgtttttaaatccaccacaagtggtgctcagaatatttaacaactggtgcagcacaacccactcacctgaatggctgctgtctgcaggggtggagcagagctcgagtakcggcccctgcagggccaggcctcaacccttagtgctggatggcagggtgtctgtggggccccaggggaggctcctgggtgttgggggtgcagcagctattcaccaacatgtcttagtcttttcagactgacatacaaaataccataaataggtggcttaaataacagacacttattttgcacagttctggaggctgggaagtctaagatcaattcagttcctggggagggcctcttcctggcttgcggacggctgcctttttgacacgtcctcccatgacctttcctctgtgcttacacgtgttcacggggggaagagctctctctctctctcctgctcttttcataagatcactataccatcatgagggccccgccctcataacctcatctaaccct

SEQ ID NO: 625594 - DNA, 503 bp, Homo sapiens
cctggcaagggacatggcagggagaagacctagacctggttaaatgggattggacctgccacttagcctcagggaccctttggagacttccgtatgtactgtggacaggggcagatgctcygactcctccaggggggcgctctgctggcaagtcagcaccagggccttgatctccttcttgaagttggtgttgagaaagccatagatgaatgggttgacgcaggtggaggccatggcaagcaagtggcacactaagaagatgaggttcccgtggcagatggggatggcctcatggtgccagtcttccaggctgttgaacacatgcagaggcagccagagcacagcaaaggccaccaccatcaccaccagcaccacattgacctgcttcatgtgcccagctcgcaagctgtaggtgcccttgtgaaacacgcgcccctgcctctgcaggcgccggtagatgcgtgcataacagaccaggatgaagcccagtgggaggcagtact

SEQ ID NO: 625595 - DNA, 503 bp, Homo sapiens
cctggcaagggacatggcagggagaagacctagacctggttaaatgggattggacctgccacttagcctcagggaccctttggagacttccgtatgtactgtggacaggggcagatgctccgactcctccaggggggcgctctgctggcaagtcagcaccagggccttgatctccttcttgaagttggtgttgagaaagccatagatgaatgggttgacrcaggtggaggccatggcaagcaagtggcacactaagaagatgaggttcccgtggcagatggggatggcctcatggtgccagtcttccaggctgttgaacacatgcagaggcagccagagcacagcaaaggccaccaccatcaccaccagcaccacattgacctgcttcatgtgcccagctcgcaagctgtaggtgcccttgtgaaacacgcgcccctgcctctgcaggcgccggtagatgcgtgcataacagaccaggatgaagcccagtgggaggcagtact

SEQ ID NO: 625596 - DNA, 503 bp, Homo sapiens
cctggcaagggacatggcagggagaagacctagacctggttaaatgggattggacctgccacttagcctcagggaccctttggagacttccgtatgtactgtggacaggggcagatgctccgactcctccaggggggcgctctgctggcaagtcagcaccagggccttgatctccttcttgaagttggtgttgagaaagccatagatgaatgggttgacgcaggtggaggccatggcaagcaagtggcacactaagaagatgaggttcccrtggcagatggggatggcctcatggtgccagtcttccaggctgttgaacacatgcagaggcagccagagcacagcaaaggccaccaccatcaccaccagcaccacattgacctgcttcatgtgcccagctcgcaagctgtaggtgcccttgtgaaacacgcgcccctgcctctgcaggcgccggtagatgcgtgcataacagaccaggatgaagcccagtgggaggcagtact

SEQ ID NO: 625597 - DNA, 503 bp, Homo sapiens
cctggcaagggacatggcagggagaagacctagacctggttaaatgggattggacctgccacttagcctcagggaccctttggagacttccgtatgtactgtggacaggggcagatgctccgactcctccaggggggcgctctgctggcaagtcagcaccagggccttgatctccttcttgaagttggtgttgagaaagccatagatgaatgggttgacgcaggtggaggccatggcaagcaagtggcacactaagaagatgaggttcccgtggcagatggggatggcctcatggtgccagtcttccaggctgttgaacacatgcagaggcagccagagcacrgcaaaggccaccaccatcaccaccagcaccacattgacctgcttcatgtgcccagctcgcaagctgtaggtgcccttgtgaaacacgcgcccctgcctctgcaggcgccggtagatgcgtgcataacagaccaggatgaagcccagtgggaggcagtact

SEQ ID NO: 625598 - DNA, 354 bp, Homo sapiens
atttttgtatttttagtagagatggggctttaccgcgttggccaggctggtcttgaactcctgactcgagggatccgcctgccttggcttcccaaagtgctgtgattatgagcatgagccactgcacccagcctgacctacctaatttagaccaaatgtctttattttaccagtaatctttaaaactgtttttatttctcagagattactaaagtcacgtgaactacaaggcattacagttttttctttcaaaatattttatttaagccttatttttctttaagccaattacttagagttcrtttatataaacatcacacacacgacacatatataactacacagatagaaaaa

SEQ ID NO: 625599 - DNA, 354 bp, Homo sapiens
atttttgtatttttagtagagatggggctttaccgcgttggccaggctggtcttgaactcctgactcgagggatccgcctgccttggcttcccaaagtgctgtgattatgagcatgagccactgcacccagcctgacctacctaatttagaccaaatgtctttattttaccagtaatctttaaaactgtttttatttctcagagattactaaagtcacgtgaactacaaggcattacagttttttctttcaaaatattttatttaagccttatttttctttaagccaattacttagagttcgtttatataaacatcacacacwcgacacatatataactacacagatagaaaaa

SEQ ID NO: 625600 - DNA, 576 bp, Homo sapiens
atggaaaaaaatatactatgtagcaccaattataacaaagttggaggggctagttaaawatcagaaaaagtaaacttcagaacaagaaatatgcagaacaagaaataaacgagaacatttcataatgataaatttatcagaaagagaaaaattgtaaacatatattcacctaataatagaacttcaaaatatgacaaagaaatggacagaaatgaagggggaagtagagaaatctacacttatatttacaaattgtcatacttgtttctcagtaacttatagaacaagtagaaaaaatgaataaaggggaaggacacttgaacaatactactaaccaacttgatttaattgatgcctatagaaccttctacctaatacagatttttaggtgtagtgtcctcataacctaggaatgcaaagtcagtttaatcaacagcgcaataaatcaatcaatgcaattcagcatattcgtagaatccacattgtttccaactgaacacaaaactttcattataatggaccatatctggggcagaaaacaagtttatacatttaagaggaccaaaataatataga

SEQ ID NO: 625601 - DNA, 576 bp, Homo sapiens
atggaaaaaaatatactatgtagcaccaattataacaaagttggaggggctagttaaatatcagaaaaagtaaacttcagaacaagaaatatgcagaacaagaaataaacgagaacatttcataatgataaatttatcagaaagagaaaaattgtaaacatatattcacctaataatagaacttcaaaatatgacaaagaaatggacagaaatgaagggggaagtagagaaatctacacttatatttacaaattgtcatacttgtttctcagtaacttatagaacaagtagaaaaaatgaataaaggggaaggacacttgaacaatactactaaccaacttgatttaattgatgcctatagaaccttctacctaatacagatttttaggtgtagtgtcctcataacctaggaatgcaaagtcagtttaatcaacagcgcaataaatcaatcaatgcaattcascatattcgtagaatccacattgtttccaactgaacacaaaactttcattataatggaccatatctggggcagaaaacaagtttatacatttaagaggaccaaaataatataga

SEQ ID NO: 625602 - DNA, 576 bp, Homo sapiens
atggaaaaaaatatactatgtagcaccaattataacaaagttggaggggctagttaaatatcagaaaaagtaaacttcagaacaagaaatatgcagaacaagaaataaacgagaacatttcataatgataaatttatcagaaagagaaaaattgtaaacatatattcacctaataatagaacttcaaaatatgacaaagaaatggacagaaatgaagggggaagtagagaaatctacacttatatttacaaattgtcatacttgtttctcagtaacttatagaacaagtagaaaaaatgaataaaggggaaggacacttgaacaatactactaaccaacttgatttaattgatgcctatagaaccttctacctaatacagatttttaggtgtagtgtcctcataacctaggaatgcaaagtcagtttaatcaacagcgcaataaatcaatcaatgcaattcagcatattcrtagaatccacattgtttccaactgaacacaaaactttcattataatggaccatatctggggcagaaaacaagtttatacatttaagaggaccaaaataatataga

SEQ ID NO: 625603 - DNA, 576 bp, Homo sapiens
atggaaaaaaatatactatgtagcaccaattataacaaagttggaggggctagttaaatatcagaaaaagtaaacttcagaacaagaaatatgcagaacaagaaataaacgagaacatttcataatgataaatttatcagaaagagaaaaattgtaaacatatattcacctaataatagaacttcaaaatatgacaaagaaatggacagaaatgaagggggaagtagagaaatctacacttatatttacaaattgtcatacttgtttctcagtaacttatagaacaagtagaaaaaatgaataaaggggaaggacacttgaacaatactactaaccaacttgatttaattgatgcctatagaaccttctacctaatacagatttttaggtgtagtgtcctcataacctaggaatgcaaagtcagtttaatcaacagcgcaataaatcaatcaatgcaattcagcatattcgtagaatccacattgtttccaacygaacacaaaactttcattataatggaccatatctggggcagaaaacaagtttatacatttaagaggaccaaaataatataga

SEQ ID NO: 625604 - DNA, 583 bp, Homo sapiens
ttagtcagcagactaagtcacctaaatgctctgtcagaagcggaatttgtactcaggaatggccaactgcaaagtccatgtgcttgaacagtatggcatactgatacatgcacctgccatgaccagaacacaatacagtgatctggcagcacttcgtggctcaccatctctgctatactgataacaacttgagggctggacctacttatcttattcaacaaggaccctctcagaggttagggttgcccagtgcaaagatagcaagtcatgtgacacatgggccacctcacccctcctgcagccattgataactttcttctttgaacatggcattctttcgctctaagcccagttaagaattcagaatccttctaggcccagtttttaaagcagcsaccaccaatctattggtgctgacatgaattcaaaagatactttctatcccttatctaaatagttcataagatgatgaggctgaactatggaacaaatgtagtccatcagagatttctagaaaaaaaaaacaactctcaatagtcctagaagtttggaaatgagtattaatcccaggataatccacaca

SEQ ID NO: 625605 - DNA, 566 bp, Homo sapiens
tcatgctgccgccctcactgactcacctgtccagcctcctactgggttggggtgagggcttattgccccagagcctagataggcaccagaggcagctataaaggcatgttgggccagtcctcagcatcctaggttcgccactgtctgctgccacacgaggatgggaggcatggggaagctggctgccgagggcctggcccaccgcaccgagaaggccccccaggaaaccaggtgaggacccagggctatatctacctgggctggggggatctggggcagactgggtctgtgggaggyggatctacgtaggcaggcgaggacctgcggggaggccttggcccctcaggaaccctggtctcctgctctaccaagtcagcacggagttgaggggtgcagacctggggaggtctcctgggggcagggcatgagtcctggtgctgggtgaacactggcagcttggacccttccctctggaaatctggggagcctttcttgtcaaaacagcctattctgaataacctatgcaggaaaaggaagatggatttttatttttaccataactttaa

SEQ ID NO: 625606 - DNA, 566 bp, Homo sapiens
tcatgctgccgccctcactgactcacctgtccagcctcctactgggttggggtgagggcttattgccccagagcctagataggcaccagaggcagctataaaggcatgttgggccagtcctcagcatcctaggttcgccactgtctgctgccacacgaggatgggaggcatggggaagctggctgccgagggcctggcccaccgcaccgagaaggccccccaggaaaccaggtgaggacccagggctatatctacctgggctggggggatctggggcagactgggtctgtgggaggcggatctacgtaggcaggcgaggacctgcggggaggccttggcccctcaggaaccctggtctcctgctctaccaagtcagcacggagttgaggggtgcagacctggggaggtctcctgggggcagggcatgagtcctggtgctgggtgaacactggcagcttggacccttccctctggaaatctggggagcctttcttgtcaaaacagcctattctgaataacytatgcaggaaaaggaagatggatttttatttttaccataactttaa

SEQ ID NO: 625607 - DNA, 587 bp, Homo sapiens
gcaattcaataataagaagacaaacaacttaattaaaaatggcaaagtcaggatgaacttaccygaagatccttaatttaattacatctacaaagctgttttatccaaataaggttatagtcacaggatccaggagtttggacccagaccaaccttttgtgggggccacaattcaacccactccaggattttaataataactattccataacaaaagacagaacaccatgactgtccctccattcacctgcatggcctctgaaacctaaggacaccttagaagtggcatctctagctcggcgtggtggttcatgcctgtaatcccaacactttgggaagccgaggccggcagagcacttgaaatcaggagtttgagacaagcctgggcaacatggcaaaaccccgtctccactaaaaatacaaaaattagccagatgaggtggtgcacgcctgtaatcccagctatgtgggaggctgaggcaggaaaatcatttaaacctgggaggtggaggttgcagtcagccgagatcgagccactgcactccagcctggaagatacagtgaggttctgtctcaaaaaaaaaaag

SEQ ID NO: 625608 - DNA, 545 bp, Homo sapiens
tgggtcactgctgcaccgccctgacccatgtgggtccctgaggagcgacctgccggggccacctggctggatgaaaaagacacaccttggacttaagccgtgagaaaaaaaaaacttcatcagtaagaagaatgaataaacagactaggttgaatccatacaatggaatgttagcagacaataaaaagaaaatgaactaytgatgccccctactgcacagcagaagctctgaatcgtgttcctgaatgaaagaagtcaggtatgaaagaataaacattgtatgattccatttatatgaaaatgaatctgtgatttaaaaatcagactagtattaggttggtgcgaaagtaattgcgttttttgccttttttttttttaatagttgctttggggtttatggatggagtggcatggtagaggttagctgaagggggcatgaaataactttttgggggtgctagagtgttgtaaatcttacagtgggggagggacaggagtgcaggcatttgacaaaacacattgaattgtgaaatttaagatttttg

SEQ ID NO: 625609 - DNA, 545 bp, Homo sapiens
tgggtcactgctgcaccgccctgacccatgtgggtccctgaggagcgacctgccggggccacctggctggatgaaaaagacacaccttggacttaagccgtgagaaaaaaaaaacttcatcagtaagaagaatgaataaacagactaggttgaatccatacaatggaatgttagcagacaataaaaagaaaatgaactactgatgycccctactgcacagcagaagctctgaatcgtgttcctgaatgaaagaagtcaggtatgaaagaataaacattgtatgattccatttatatgaaaatgaatctgtgatttaaaaatcagactagtattaggttggtgcgaaagtaattgcgttttttgccttttttttttttaatagttgctttggggtttatggatggagtggcatggtagaggttagctgaagggggcatgaaataactttttgggggtgctagagtgttgtaaatcttacagtgggggagggacaggagtgcaggcatttgacaaaacacattgaattgtgaaatttaagatttttg

SEQ ID NO: 625610 - DNA, 587 bp, Homo sapiens
gcaattcaataataagaagacaaacaacttaattaaaaatggcaaagtcaggatgaacttacctgaagatccttaatttaattacatctacaaagcygttttatccaaataaggttatagtcacaggatccaggagtttggacccagaccaaccttttgtgggggccacaattcaacccactccaggattttaataataactattccataacaaaagacagaacaccatgactgtccctccattcacctgcatggcctctgaaacctaaggacaccttagaagtggcatctctagctcggcgtggtggttcatgcctgtaatcccaacactttgggaagccgaggccggcagagcacttgaaatcaggagtttgagacaagcctgggcaacatggcaaaaccccgtctccactaaaaatacaaaaattagccagatgaggtggtgcacgcctgtaatcccagctatgtgggaggctgaggcaggaaaatcatttaaacctgggaggtggaggttgcagtcagccgagatcgagccactgcactccagcctggaagatacagtgaggttctgtctcaaaaaaaaaaag

SEQ ID NO: 625611 - DNA, 545 bp, Homo sapiens
tgggtcactgctgcaccgccctgacccatgtgggtccctgaggagcgacctgccggggccacctggctggatgaaaaagacacaccttggacttaagccgtgagaaaaaaaaaacttcatcagtaagaagaatgaataaacagactaggttgaatccatacaatggaatgttagcagacaataaaaagaaaatgaactactgatgccccctactgcacagcagaagctctgaatcgtgttcctgaatgaaagaagtcaggtatgaaagaataaacattgtatgattccatttatatgaaaatgaatctgtgatttaaaaatcagactagtattaggttggtgcraaagtaattgcgttttttgccttttttttttttaatagttgctttggggtttatggatggagtggcatggtagaggttagctgaagggggcatgaaataactttttgggggtgctagagtgttgtaaatcttacagtgggggagggacaggagtgcaggcatttgacaaaacacattgaattgtgaaatttaagatttttg

SEQ ID NO: 625612 - DNA, 545 bp, Homo sapiens
tgggtcactgctgcaccgccctgacccatgtgggtccctgaggagcgacctgccggggccacctggctggatgaaaaagacacaccttggacttaagccgtgagaaaaaaaaaacttcatcagtaagaagaatgaataaacagactaggttgaatccatacaatggaatgttagcagacaataaaaagaaaatgaactactgatgccccctactgcacagcagaagctctgaatcgtgttcctgaatgaaagaagtcaggtatgaaagaataaacattgtatgattccatttatatgaaaatgaatctgtgatttaaaaatcagactagtattaggttggtgcgaaagtaattgcgktttttgccttttttttttttaatagttgctttggggtttatggatggagtggcatggtagaggttagctgaagggggcatgaaataactttttgggggtgctagagtgttgtaaatcttacagtgggggagggacaggagtgcaggcatttgacaaaacacattgaattgtgaaatttaagatttttg

SEQ ID NO: 625613 - DNA, 587 bp, Homo sapiens
gcaattcaataataagaagacaaacaacttaattaaaaatggcaaagtcaggatgaacttacctgaagatccttaatttaattacatctacaaagctgttttatccaaataaggttatagtcacaggatccaggagtttggacccagaccaaccttttgtgggggccacaattcaacccactccaggattttaataataactattccataacaaaagacagaacaccatgactgtccctccattcrcctgcatggcctctgaaacctaaggacaccttagaagtggcatctctagctcggcgtggtggttcatgcctgtaatcccaacactttgggaagccgaggccggcagagcacttgaaatcaggagtttgagacaagcctgggcaacatggcaaaaccccgtctccactaaaaatacaaaaattagccagatgaggtggtgcacgcctgtaatcccagctatgtgggaggctgaggcaggaaaatcatttaaacctgggaggtggaggttgcagtcagccgagatcgagccactgcactccagcctggaagatacagtgaggttctgtctcaaaaaaaaaaag

SEQ ID NO: 625614 - DNA, 587 bp, Homo sapiens
gcaattcaataataagaagacaaacaacttaattaaaaatggcaaagtcaggatgaacttacctgaagatccttaatttaattacatctacaaagctgttttatccaaataaggttatagtcacaggatccaggagtttggacccagaccaaccttttgtgggggccacaattcaacccactccaggattttaataataactattccataacaaaagacagaacaccatgactgtccctccattcacctgcatggcctctgaaacctaaggacaccttagaagtggcatctcyagctcggcgtggtggttcatgcctgtaatcccaacactttgggaagccgaggccggcagagcacttgaaatcaggagtttgagacaagcctgggcaacatggcaaaaccccgtctccactaaaaatacaaaaattagccagatgaggtggtgcacgcctgtaatcccagctatgtgggaggctgaggcaggaaaatcatttaaacctgggaggtggaggttgcagtcagccgagatcgagccactgcactccagcctggaagatacagtgaggttctgtctcaaaaaaaaaaag

SEQ ID NO: 625615 - DNA, 586 bp, Homo sapiens
gtgcacgcctgtaatcccagctatgtgggaggctgaggcaggaaaatcatttaaacctgggaggtggaggttgcagtcagccgagatcgagccactgcactccagcctggaagatasagtgaggttctgtctcaaaaaaaaaaagtgtcatctccaccactggctccctgggccacagacaggcagggaggaaaaggactcagatccctcgtgtgccttccaccgacggcttcgcctcctcctctaacaggtctgtggtctgatgttgagtccatgtggcccccagtctatgccggaggtactccccggctaaccctagaagccagttgtattagtcctttttcatgctgctatgaagaaacacccaagactgggtaatttctaaagaaaagaggtttaatagactcacagttcttcacagggcagcaggagagagaatgagtgttagcaggagaaatgctgggcacttataaagccatcagatctcacgagactcactcactatcatgagaacagcatgggggaaaccgcccccattatccaattaccttcatctatctagtcctaactttaacacgtaaggatt

SEQ ID NO: 625616 - DNA, 586 bp, Homo sapiens
gtgcacgcctgtaatcccagctatgtgggaggctgaggcaggaaaatcatttaaacctgggaggtggaggttgcagtcagccgagatcgagccactgcactccagcctggaagatacagtgaggttctgtctcaaaaaaaaaaagtgtcatctccaccactggctccctgggccacagacaggcagggaggaaaaggactcagatccctcgtgtgccttccaccgacggcttcgcctcctcctctaacaggyctgtggtctgatgttgagtccatgtggcccccagtctatgccggaggtactccccggctaaccctagaagccagttgtattagtcctttttcatgctgctatgaagaaacacccaagactgggtaatttctaaagaaaagaggtttaatagactcacagttcttcacagggcagcaggagagagaatgagtgttagcaggagaaatgctgggcacttataaagccatcagatctcacgagactcactcactatcatgagaacagcatgggggaaaccgcccccattatccaattaccttcatctatctagtcctaactttaacacgtaaggatt

SEQ ID NO: 625617 - DNA, 618 bp, Homo sapiens
ggtaggtgggggacagttctttgcctctcgactgtgctcagccatgtagcttgctttggtcaatggatgttagcagatgtgactcacggaggaatggaaattaccttgcatagctgggcttgtcctcttgaactgctgccatctccatgcataacacttctttgaactccttcagcctgagccccagatggaatatcagtggagaagtttaaatctcagtgaggagccaagtccagttggactcatagcttgaaacagagctgccccattgagctcgcctaggtcagctagccccagctgacctgcagtcatgtcaattgtatgtcactaagattytgtggctcttttttactcagctttagctaactaatatatcaccatatcagggaattttggtaggacaacatagctaagcacaatttgagatggggaatagaatagggtaaattctctgttcaaagcatatggtaatctggtgcctattttacttattatcccatttgtgcccttttttataacatgtctttggaagcgaaactgtacatccagtgtctctgtaacactgagtctattgtccatgtaacattcagtctactgaactgctttaaaatattagtt

SEQ ID NO: 625618 - DNA, 406 bp, Homo sapiens
gcaacactttgcataatccttcaaaaatatcttcagggacattcaagaaccaagaattggataaagcttttaaaatcaatgctggttataaaagaaaaaaaacatagcttacaagaaaaaaatgtgttgatgattttccaaagaggaagaggaagcctctgaaaatatgactcaacttcacttgctggtttccaaagcaaattstaagttgatgacatggatttagcccaactgtgtcagacaatttttggtgaggtaggcgatggggttttgtttgtttcttgcagaatttgggggtacttgatttgcgctgttctttgctaaaaacacttatctgccccactcaaaatccattcacacatagatgttttcttattcacatttctatgtttaatttcaagagata

SEQ ID NO: 625619 - DNA, 406 bp, Homo sapiens
gcaacactttgcataatccttcaaaaatatcttcagggacattcaagaaccaagaattggataaagcttttaaaatcaatgctggttataaaagaaaaaaaacatagcttacaagaaaaaaatgtgttgatgattttccaaagaggaagaggaagcctctgaaaatatgactcaacttcacttgctggtttccaaagcaaattctaagttgatgacatggatttagcccaactgtgtcagacaatttttggtgaggtaggcgatggggttttgtttgtttcttgcagaatttgggggtacttgatttgcgctgttctttgctaaaaacacttatctgccccactcaaaatccattcacacatagatgttttcttattcacatttstatgtttaatttcaagagata

SEQ ID NO: 625620 - DNA, 551 bp, Homo sapiens
tattcaaaagacagttctaattctagacaaaagatatgatctcctagaaacaygggtttatttaagatgacttcacttgagttgataccacatgggtcttcttcattcaatgaacccttaatcttttgttgggcatagagattggcttctattttttttttatcacaaatgaaaagatgcgatagtatatgttggaacccatgacttgccttataaataggcatggcaggtaattaattgcatgaataattcagaaatggcataattatggccaagtctatccttttctttacctcctttgcctgccacccgtcatctgatgccacaatttctgcaagaaatttgtgcgttatatttctctgctttgggacatcttttaaaatgtagttaatacaaatatgggcaatttcactctgaaatgtgtaacatatataacatatactctctataattcacactatagtattaaagacacctggtaagaggatttaaaagtaagacacattatatctgaattattggaataagaataggttaattttgagagcatt

SEQ ID NO: 625621 - DNA, 551 bp, Homo sapiens
tattcaaaagacagttctaattctagacaaaagatatgatctcctagaaacatgggtttatttaagatgacttcacttgagttgataccacatgggtcttcttcattcaatgaacccttaatcttttgttgggcatagagattggcttctattttttttttatcacaaatgaaaagatgcgatagtatatgttggaacccatgacttgccttataaataggcatggcaggtaattaattgcatgaataattcagaaatggcataattatggccaagtctatccttttctttacctcctttgcctgccacccgtcatctgatgccacaatttctgcaagaaatttgtgcgttatatttctctgctttgggacatcttttaaaatgtagttaatacaaatatgggcaatttcactctgaaatgtgtaacatatataacatatactctctataattcacactatagtattraagacacctggtaagaggatttaaaagtaagacacattatatctgaattattggaataagaataggttaattttgagagcatt

SEQ ID NO: 625622 - DNA, 443 bp, Homo sapiens
tttgattgttaaatgccttgagacagacttctttgggttaaatctgcttgatgttctataaccttcttgtccttgaatattgatatctttctccaggtttgggaagttctctgtcattttccctttgaataaactttctactcctattcctttctctaccttctctttaaagccaataactattagatttgccctcttgaagctattttctagatatcgcaggtgtgcttcatttttttaaaaaaattctgttttcttttgtctcttctatgtattttcaaatagcctgtcttcaagctcactaaktcattcttctgcttgatcatttctgttattaaaagactgtgatgcatccttcagtatgtcaattgcacttttcagctccagaatttctgcttgattctttttaattatttcaatctctttgttaaattttttctgat
